United States Patent Application Publication US 2007/0214517 A1 - sequence listing, part 4

SEQ ID NO: 4607 - protein, 593 aa, Zea mays subsp. mays
  peptide (1)..(593): Ceres Seq. ID no. 13493006
  misc_feature (1)..(217): Homolog of NCBI NO: 34898846 NR Description: OJ1058_A12.21 [Oryza sativa (japonica
  misc_feature (266)..(584): Homolog of NCBI NO: 34898846 NR Description: OJ1058_A12.21 [Oryza sativa (japonica
  misc_feature (1)..(589): Homolog of NCBI NO: 34898856 NR Description: OJ1058_A12.26 [Oryza sativa (japonica
  misc_feature (1)..(221): Homolog of NCBI NO: 34898858 NR Description: OJ1058_A12.27 [Oryza sativa (japonica
  misc_feature (265)..(591): Homolog of NCBI NO: 34898858 NR Description: OJ1058_A12.27 [Oryza sativa (japonica
  misc_feature (1)..(592): Homolog of NCBI NO: 28812097 NR Description: P0458H05.21 [Oryza sativa (japonica
  misc_feature (1)..(592): Homolog of NCBI NO: 28812101 NR Description: P0458H05.25 [Oryza sativa (japonica
  misc_feature (1)..(585): Homolog of NCBI NO: 28812103 NR Description: P0458H05.27 [Oryza sativa (japonica
  misc_feature (1)..(593): Homolog of NCBI NO: 28812096 NR Description: P0458H05.20 [Oryza sativa (japonica
  misc_feature (1)..(583): Homolog of NCBI NO: 28812099 NR Description: P0458H05.23 [Oryza sativa (japonica
MLPNNVSASPVLYATAVVGAVPEQVWGMGLCRGDANASSCLACLTQAFQDLPNDCSYNKDAAIYYDPCTLHYSDVHTLADDDTGPTTMSYNINNNANVTSDPARFERLLAALVNATAEHAASNSTRRFATGEADADFDRQFPKVYALAQCTPDQTPAQCRKCLAGLISQSLDGFQNNIGGRVLWVNCTWRYETSPFFNGPAMVRLASSSSPPAAAAAGGGERKYSVFIVVLAVVLPTLAALNLVFCFCFWRRPAPQAKQSQPMYSTEAEDVETVDSMMIDVSALRAATGNFDESNKLGEGGFGAVYKGVLPDGDEIAVKRLSKSSTQGVEELKNELALVARLRHRNLVRLVGVCLEQQERLLVYEFVPNRSLDLVLFGTDTREPLSWEQRYRIINGIARGLQYLHEDSQLKVVHRDLKASNILLDVEMNPKISDFGLARIFGRDQTQAVTSRVVGTYGYLAPEYLMRGNYSVKSDAFSFGVMVLEIVTGRKNNGSSHKSGDLLTTVWEHWEAGTVAELVDPSLGGSFPEGDVLRCIHIGLLCVQGDPAARPVMSSVVTMLGTDTVTLQAPSKPGFFARKSGTSTTVSADDGSI

SEQ ID NO: 4608 - protein, 566 aa, Zea mays subsp. mays
  peptide (1)..(566): Ceres Seq. ID no. 13493007
  misc_feature (1)..(558): Homolog of NCBI NO: 28812103 NR Description: P0458H05.27 [Oryza sativa (japonica
  misc_feature (1)..(566): Homolog of NCBI NO: 28812096 NR Description: P0458H05.20 [Oryza sativa (japonica
  misc_feature (1)..(556): Homolog of NCBI NO: 28812099 NR Description: P0458H05.23 [Oryza sativa (japonica
  misc_feature (1)..(565): Homolog of NCBI NO: 28812097 NR Description: P0458H05.21 [Oryza sativa (japonica
  misc_feature (1)..(565): Homolog of NCBI NO: 28812101 NR Description: P0458H05.25 [Oryza sativa (japonica
  misc_feature (1)..(190): Homolog of NCBI NO: 34898846 NR Description: OJ1058_A12.21 [Oryza sativa (japonica
  misc_feature (239)..(557): Homolog of NCBI NO: 34898846 NR Description: OJ1058_A12.21 [Oryza sativa (japonica
  misc_feature (1)..(562): Homolog of NCBI NO: 34898856 NR Description: OJ1058_A12.26 [Oryza sativa (japonica
  misc_feature (1)..(194): Homolog of NCBI NO: 34898858 NR Description: OJ1058_A12.27 [Oryza sativa (japonica
  misc_feature (238)..(564): Homolog of NCBI NO: 34898858 NR Description: OJ1058_A12.27 [Oryza sativa (japonica
MGLCRGDANASSCLACLTQAFQDLPNDCSYNKDAAIYYDPCTLHYSDVHTLADDDTGPTTMSYNINNNANVTSDPARFERLLAALVNATAEHAASNSTRRFATGEADADFDRQFPKVYALAQCTPDQTPAQCRKCLAGLISQSLDGFQNNIGGRVLWVNCTWRYETSPFFNGPAMVRLASSSSPPAAAAAGGGERKYSVFIVVLAVVLPTLAALNLVFCFCFWRRPAPQAKQSQPMYSTEAEDVETVDSMMIDVSALRAATGNFDESNKLGEGGFGAVYKGVLPDGDEIAVKRLSKSSTQGVEELKNELALVARLRHRNLVRLVGVCLEQQERLLVYEFVPNRSLDLVLFGTDTREPLSWEQRYRIINGIARGLQYLHEDSQLKVVHRDLKASNILLDVEMNPKISDFGLARIFGRDQTQAVTSRVVGTYGYLAPEYLMRGNYSVKSDAFSFGVMVLEIVTGRKNNGSSHKSGDLLTTVWEHWEAGTVAELVDPSLGGSFPEGDVLRCIHIGLLCVQGDPAARPVMSSVVTMLGTDTVTLQAPSKPGFFARKSGTSTTVSADDGSI

SEQ ID NO: 4609 - DNA, 1752 bp, Zea mays subsp. mays
  misc_feature (1)..(1752): Ceres Seq. ID no. 12461973
  misc_feature: MA Experiment ID: 108522 Result: Down-regulated in Transcription
  misc_feature: MA Experiment 108522 PARAMETER Experiment Name: Zm_42deg_Heat_P Parameter: Age (day) Value: 8
  misc_feature: MA Experiment 108522 PARAMETER Experiment Name: Zm_42deg_Heat_P Parameter: Organism Value: Zea mays
  misc_feature: MA Experiment 108522 PARAMETER Experiment Name: Zm_42deg_Heat_P Parameter: Plant Line Value: 35A19
  misc_feature: MA Experiment 108522 PARAMETER Experiment Name: Zm_42deg_Heat_P Parameter: Temperature (deg C) Value: 42 vs. 22
  misc_feature: MA Experiment 108522 PARAMETER Experiment Name: Zm_42deg_Heat_P Parameter: Timepoint (hr) Value: 1
  misc_feature: MA Experiment 108522 PARAMETER Experiment Name: Zm_42deg_Heat_P Parameter: Tissue Value: Aerial
  misc_feature: MA Experiment ID: 108535 Result: Down-regulated in Transcription
  misc_feature: MA Experiment 108535 PARAMETER Experiment Name: Zm_Meristem_P Parameter: Age (day) Value: 8
  misc_feature: MA Experiment 108535 PARAMETER Experiment Name: Zm_Meristem_P Parameter: Organism Value: Zea mays
  misc_feature: MA Experiment 108535 PARAMETER Experiment Name: Zm_Meristem_P Parameter: Plant Line Value: 35A19
  misc_feature: MA Experiment 108535 PARAMETER Experiment Name: Zm_Meristem_P Parameter: Tissue Value: Root Meristem vs. Above Root Meristem
  misc_feature: MA Experiment ID: 108543 Result: Down-regulated in Transcription
  misc_feature: MA Experiment ID: 20000492 Result: Down-regulated in Transcription
  misc_feature: MA Experiment 20000492 PARAMETER Experiment Name: Zm_Hybrid_Seed_Dev_P Parameter: DAP Value: 12
  misc_feature: MA Experiment 20000492 PARAMETER Experiment Name: Zm_Hybrid_Seed_Dev_P Parameter: Organism Value: Zea mays
  misc_feature: MA Experiment 20000492 PARAMETER Experiment Name: Zm_Hybrid_Seed_Dev_P Parameter: Plant Line Value: 35A19
  misc_feature: MA Experiment 20000492 PARAMETER Experiment Name: Zm_Hybrid_Seed_Dev_P Parameter: Tissue Value: Fert Kernel vs. Unfert Floret
gcacgagaccattacctagaacatcctaatcaaaaagtgggaactgcatgctgagagcaaacccagaaaggaaaaaggaaaaaaagaaaacagagagaggggagagtgggagacggtcggagacagaggcctcactcctccacactctcagtcgtcttccagtcccagcgctttcttggatcgcgaggaaaccactcggggagtttgcagttgcagagaactgtatcggccgaagtggttgcacggtgtgttggccttggccatgcgccacggcagggaacagagacgagcagcagggaggcagcaatggaggcgctcattgaccctgctctcgctgtaaagatagtcccgcggtgccctccgaattccacttgatccaactctcgacatgaagcggccacgcggcgctactccctccctgtctgcgatgcccaatcatcaggaagatgacggctacggcgtggtcgggatggaggcggacgtggacgtggacgtggacgaggagatgatggcgttcggcggcggcggcggcggggagaagaagcggcgcctgagcgccgagcaggtgcgcgcgctggagcggagcttcgagagtggagaacaagctggagccggagcgcaaggcgcggctggcgcgcgacctcggcctgcagccccgccaggtcgccgtctggttccagaaccgccgcgcccgctggaagaccaagcagctggagcgcgactacgccgcgctgcgccgctcctacgacgcgcttcggctcgaccacgacgcgctccgccgcgacaaggacgccctcctcgccgagatcagggagctcaaggcgaagctgggggacgacgaggacgcagcggcgagcttcacgtcggtcaaggcggagccggcggcctcggacgggccggcccccgcgggggtggggtcgtccgagatcagtgactccagcgcggtgctgaacgacgcggacccgcccgtggcggaggcgccggcgccggcgcccgaggtgcagggcacccttcttgtcgcgccggctggccccgttgccggcgcagcggcggcgaaccatggcggggtgttcttccacgggagtttcctgaaggtggaggaggacgagacgggccttttagacgacgacgggccgtgcggcgggttcttcgccgtggagcagccgccggcgatggcgtggtggaacgagcccgcggaacactggaactgaaccgaggtggacgcggcagtgcagcgtagtagaatcgggatctcggacgagcggtggaggaataaccgaatagaggaattcggagcgataaagaaggggcttttctgcaaattttgtaaaacggggttttacctagccctactttttgtcaattctcgagcgtattagcagtagacagtagtagtagtctgggtcggaacccaggtcaagctcagcgcctgggttgcgtttggactccagtgcagaattgcgtagaggatttagaggaagagcggagctgagctgagcgaggcaggagtaaaggacaacctgtatgtcactgttagtgggcccagtgccacgtgaaagtcaggcactgttggtgcccattgacggccggacttgccagcgacgcggatgggcgacgtgaacgtgtctggccgagcagtgcgctcgctccctccccccaatgggccatggcctcttccgcgaaagcgtgctcccctgtaagtatctgatttggatgctagccaaggctgctggatgattacttcgattatct

SEQ ID NO: 4610 - protein, 181 aa, Zea mays subsp. mays
  peptide (1)..(181): Ceres Seq. ID no. 12461974
  misc_feature (46)..(68): Homolog of NCBI NO: 15148916 NR Description: homeodomain leucine zipper protein HDZ1
  misc_feature (15)..(89): Homolog of NCBI NO: 37534178 NR Description: putative homeotic protein
  misc_feature (14)..(68): Homolog of NCBI NO: 27531102 NR Description: homeobox protein Pphb7 long form [Physcomitrella
  misc_feature (14)..(68): Homolog of NCBI NO: 21623495 NR Description: homeobox protein PpHB7 [Physcomitrella patens]
  misc_feature (47)..(69): Homolog of NCBI NO: 34902432 NR Description: Unknown protein [Oryza sativa (japonica
  misc_feature (21)..(69): Homolog of NCBI NO: 37533686 NR Description: putative homeodomain leucine zipper protein
  misc_feature (21)..(69): Homolog of NCBI NO: 33943626 NR Description: homeodomain leucine-zipper protein Hox8
  misc_feature (1)..(68): Homolog of NCBI NO: 5006853 NR Description: homeodomain leucine zipper protein [Oryza sativa]
MKRPRGATPSLSAMPNHQEDDGYGVVGMEADVDVDVDEEMMAFGGGGGGEKKRRLSAEQVRALERSFESGEQAGAGAQGAAGARPRPAAPPGRRLVPEPPRPLEDQAAGARLRRAAPLLRRASARPRRAPPRQGRPPRRDQGAQGEAGGRRGRSGELHVGQGGAGGLGRAGPRGGGVVRDQ

SEQ ID NO: 4611 - protein, 168 aa, Zea mays subsp. mays
  peptide (1)..(168): Ceres Seq. ID no. 12461975
  misc_feature (33)..(55): Homolog of NCBI NO: 15148916 NR Description: homeodomain leucine zipper protein HDZ1
  misc_feature (2)..(76): Homolog of NCBI NO: 37534178 NR Description: putative homeotic protein
  misc_feature (1)..(55): Homolog of NCBI NO: 27531102 NR Description: homeobox protein Pphb7 long form [Physcomitrella
  misc_feature (1)..(55): Homolog of NCBI NO: 21623495 NR Description: homeobox protein PpHB7 [Physcomitrella patens]
  misc_feature (34)..(56): Homolog of NCBI NO: 34902432 NR Description: Unknown protein [Oryza sativa (japonica
  misc_feature (8)..(56): Homolog of NCBI NO: 37533686 NR Description: putative homeodomain leucine zipper protein
  misc_feature (8)..(56): Homolog of NCBI NO: 33943626 NR Description: homeodomain leucine-zipper protein Hox8
  misc_feature (1)..(55): Homolog of NCBI NO: 5006853 NR Description: homeodomain leucine zipper protein [Oryza sativa]
MPNHQEDDGYGVVGMEADVDVDVDEEMMAFGGGGGGEKKRRLSAEQVRALERSFESGEQAGAGAQGAAGARPRPAAPPGRRLVPEPPRPLEDQAAGARLRRAAPLLRRASARPRRAPPRQGRPPRRDQGAQGEAGGRRGRSGELHVGQGGAGGLGRAGPRGGGVVRDQ

SEQ ID NO: 4612 - protein, 154 aa, Zea mays subsp. mays
  peptide (1)..(154): Ceres Seq. ID no. 12461976
  misc_feature (19)..(41): Homolog of NCBI NO: 15148916 NR Description: homeodomain leucine zipper protein HDZ1
  misc_feature (1)..(62): Homolog of NCBI NO: 37534178 NR Description: putative homeotic protein
  misc_feature (1)..(41): Homolog of NCBI NO: 27531102 NR Description: homeobox protein Pphb7 long form [Physcomitrella
  misc_feature (1)..(41): Homolog of NCBI NO: 21623495 NR Description: homeobox protein PpHB7 [Physcomitrella patens]
  misc_feature (20)..(42): Homolog of NCBI NO: 34902432 NR Description: Unknown protein [Oryza sativa (japonica
  misc_feature (1)..(42): Homolog of NCBI NO: 37533686 NR Description: putative homeodomain leucine zipper protein
  misc_feature (1)..(42): Homolog of NCBI NO: 33943626 NR Description: homeodomain leucine-zipper protein Hox8
  misc_feature (1)..(41): Homolog of NCBI NO: 5006853 NR Description: homeodomain leucine zipper protein [Oryza sativa]
MEADVDVDVDEEMMAFGGGGGGEKKRRLSAEQVRALERSFESGEQAGAGAQGAAGARPRPAAPPGRRLVPEPPRPLEDQAAGARLRRAAPLLRRASARPRRAPPRQGRPPRRDQGAQGEAGGRRGRSGELHVGQGGAGGLGRAGPRGGGVVRDQ

SEQ ID NO: 4613 - DNA, 1176 bp, Zea mays subsp. mays
  misc_feature (1)..(1176): Ceres Seq. ID no. 12566580
  misc_feature: MA Experiment ID: 108528 Result: Down-regulated in Transcription
  misc_feature: MA Experiment 108528 PARAMETER Experiment Name: Zm_Imbibed_Seeds_P Parameter: Age (day) Value: 5 vs. 2
  misc_feature: MA Experiment 108528 PARAMETER Experiment Name: Zm_Imbibed_Seeds_P Parameter: Organism Value: Zea mays
  misc_feature: MA Experiment 108528 PARAMETER Experiment Name: Zm_Imbibed_Seeds_P Parameter: Plant Line Value: 35A19
  misc_feature: MA Experiment 108528 PARAMETER Experiment Name: Zm_Imbibed_Seeds_P Parameter: Tissue Value: Aerial vs. Embryo
  misc_feature: MA Experiment ID: 108530 Result: Down-regulated in Transcription
  misc_feature: MA Experiment 108530 PARAMETER Experiment Name: Zm_Imbibed_Seeds_P Parameter: Age (day) Value: 6 vs. 2
  misc_feature: MA Experiment 108530 PARAMETER Experiment Name: Zm_Imbibed_Seeds_P Parameter: Organism Value: Zea mays
  misc_feature: MA Experiment 108530 PARAMETER Experiment Name: Zm_Imbibed_Seeds_P Parameter: Plant Line Value: 35A19
  misc_feature: MA Experiment 108530 PARAMETER Experiment Name: Zm_Imbibed_Seeds_P Parameter: Tissue Value: Aerial vs. Embryo
  misc_feature: MA Experiment ID: 108535 Result: Up-regulated in Transcription
  misc_feature: MA Experiment 108535 PARAMETER Experiment Name: Zm_Meristem_P Parameter: Age (day) Value: 8
  misc_feature: MA Experiment 108535 PARAMETER Experiment Name: Zm_Meristem_P Parameter: Organism Value: Zea mays
  misc_feature: MA Experiment 108535 PARAMETER Experiment Name: Zm_Meristem_P Parameter: Plant Line Value: 35A19
  misc_feature: MA Experiment 108535 PARAMETER Experiment Name: Zm_Meristem_P Parameter: Tissue Value: Root Meristem vs. Above Root Meristem
  misc_feature: MA Experiment ID: 108547 Result: Down-regulated in Transcription
  misc_feature: MA Experiment 108547 PARAMETER Experiment Name: Zm_Imbibed_Seeds_P Parameter: Age (day) Value: 4 vs. 2
  misc_feature: MA Experiment 108547 PARAMETER Experiment Name: Zm_Imbibed_Seeds_P Parameter: Organism Value: Zea mays
  misc_feature: MA Experiment 108547 PARAMETER Experiment Name: Zm_Imbibed_Seeds_P Parameter: Plant Line Value: 35A19
  misc_feature: MA Experiment 108547 PARAMETER Experiment Name: Zm_Imbibed_Seeds_P Parameter: Tissue Value: Aerial vs. Embryo
  misc_feature: MA Experiment ID: 108556 Result: Down-regulated in Transcription
  misc_feature: MA Experiment 108556 PARAMETER Experiment Name: Zm_Drought_P Parameter: Age (day) Value: 9
  misc_feature: MA Experiment 108556 PARAMETER Experiment Name: Zm_Drought_P Parameter: Organism Value: Zea mays
  misc_feature: MA Experiment 108556 PARAMETER Experiment Name: Zm_Drought_P Parameter: Plant Line Value: 35A19
  misc_feature: MA Experiment 108556 PARAMETER Experiment Name: Zm_Drought_P Parameter: Timepoint (hr) Value: 24
  misc_feature: MA Experiment 108556 PARAMETER Experiment Name: Zm_Drought_P Parameter: Tissue Value: Aerial
  misc_feature: MA Experiment 108556 PARAMETER Experiment Name: Zm_Drought_P Parameter: Treatment Value: Drought vs. No Drought
  misc_feature: MA Experiment ID: 20000492 Result: Up-regulated in Transcription
  misc_feature: MA Experiment 20000492 PARAMETER Experiment Name: Zm_Hybrid_Seed_Dev_P Parameter: DAP Value: 12
  misc_feature: MA Experiment 20000492 PARAMETER Experiment Name: Zm_Hybrid_Seed_Dev_P Parameter: Organism Value: Zea mays
  misc_feature: MA Experiment 20000492 PARAMETER Experiment Name: Zm_Hybrid_Seed_Dev_P Parameter: Plant Line Value: 35A19
  misc_feature: MA Experiment 20000492 PARAMETER Experiment Name: Zm_Hybrid_Seed_Dev_P Parameter: Tissue Value: Fert Kernel vs. Unfert Floret
atctccatctccatcttcctcgcagcgccggcgatccatcttccgctgcctcccttcctcgcgctcgggctctcagtgacggcatcagcggtttcccctcccgcctctcgccagtcgcatcacgccctcgcctccggtccaccgcacaccggccggtgaccctgcattacttgctaatctttcttgagggcagatggccgtttcttttgcaaatgtcaacgccgaggcagggctgaaaaagcttgatgagtaccttctcactcgcagctacatcactggctaccaagcttccaaggatgacctggctgtctactcttcatttttggctgatccctcatccaagtatatcaatgtagcaaggtggtttaatcacattgatgcactcctgaggctgagtggagttaccgcagagggcctaggtgttaaggttgagccatcagcggttccttcagcttcaattcttgatgttgctgatggacaggccccagctgctgacgaggatgacgatgatgatgttgacctttttggcgaggagactgaagaggagaagaaggctgctgaagaacgtgctgcggctgccaaggcttctggcaagaagaaagaatctgggaaatcgtcagttttacttgatgtgaagccatgggacgatgagactgacatggccaagctcgaggaagctgttaggagtgtccagatggaaggactgctttggggcgcatccaagcttgtcccagttggatatggcatcaagaagctgcaaatcatgatgaccattgtcgatgaccttgtctctgttgacactctcatcgaggaccatctctgcgctgagccagtgagcgaatacgtccagagctgcgacattgtcgccttcaacaagatctaaatttccttgtgatggtggcaatggtggttggtgggcactgtaccagcctaatttataattttccatgagcatcttcaagagtttttctaaattatcatttggagtcatttacataaaaagcactttctatatctttttaatctcaacaacttttctatatcttgtttgcaccctggagagctatttacgttttctatatttagctagcgagaaacctggatggctggaatagaagataactatatttagacaatactttaaataagctgttggaagatagtaattcttgtgtc

SEQ ID NO: 4614 - protein, 229 aa, Zea mays subsp. mays
  peptide (1)..(229): Ceres Seq. ID no. 12566581
  misc_feature (140)..(229): Pfam Name: EF-1 guanine nucleotide exchange domain Pfam Description: EF-1 guanine nucleotide exchange domain
  misc_feature (4)..(229): Homolog of NCBI NO: 480620 NR Description: translation elongation factor eEF-1 beta-A1 chain
  misc_feature (4)..(229): Homolog of NCBI NO: 15224107 NR Description: putative  elongation factor beta-1
  misc_feature (4)..(229): Homolog of NCBI NO: 21593028 NR Description: putative elongation factor beta-1 [Arabidopsis
  misc_feature (4)..(229): Homolog of NCBI NO: 30691619 NR Description: elongation factor 1-beta -related [Arabidopsis
  misc_feature (4)..(229): Homolog of NCBI NO: 25299531 NR Description: probable elongation factor 1-beta
  misc_feature (1)..(229): Homolog of NCBI NO: 6015064 NR Description: ELONGATION FACTOR 1-BETA (EF-1-BETA)
  misc_feature (1)..(229): Homolog of NCBI NO: 38232568 NR Description: translational elongation factor 1 subunit Bbeta
  misc_feature (1)..(229): Homolog of NCBI NO: 3894214 NR Description: elongation factor 1 beta 2
  misc_feature (1)..(229): Homolog of NCBI NO: 7711024 NR Description: putative elongation factor 1 beta [Hordeum
  misc_feature (1)..(229): Homolog of NCBI NO: 6166140 NR Description: ELONGATION FACTOR 1-BETA (EF-1-BETA)
MAVSFANVNAEAGLKKLDEYLLTRSYITGYQASKDDLAVYSSFLADPSSKYINVARWFNHIDALLRLSGVTAEGLGVKVEPSAVPSASILDVADGQAPAADEDDDDDVDLFGEETEEEKKAAEERAAAAKASGKKKESGKSSVLLDVKPWDDETDMAKLEEAVRSVQMEGLLWGASKLVPVGYGIKKLQIMMTIVDDLVSVDTLIEDHLCAEPVSEYVQSCDIVAFNKI

SEQ ID NO: 4615 - DNA, 1547 bp, Zea mays subsp. mays
  misc_feature (1)..(1547): Ceres Seq. ID no. 12409896
  misc_feature: MA Experiment ID: 108529 Result: Down-regulated in Transcription
  misc_feature: MA Experiment 108529 PARAMETER Experiment Name: Zm_Imbibed_Seeds_P Parameter: Age (day) Value: 5 vs. 2
  misc_feature: MA Experiment 108529 PARAMETER Experiment Name: Zm_Imbibed_Seeds_P Parameter: Organism Value: Zea mays
  misc_feature: MA Experiment 108529 PARAMETER Experiment Name: Zm_Imbibed_Seeds_P Parameter: Plant Line Value: 35A19
  misc_feature: MA Experiment 108529 PARAMETER Experiment Name: Zm_Imbibed_Seeds_P Parameter: Tissue Value: Roots vs. Embryo
  misc_feature: MA Experiment ID: 108543 Result: Up-regulated in Transcription
  misc_feature: MA Experiment ID: 108556 Result: Down-regulated in Transcription
  misc_feature: MA Experiment 108556 PARAMETER Experiment Name: Zm_Drought_P Parameter: Age (day) Value: 9
  misc_feature: MA Experiment 108556 PARAMETER Experiment Name: Zm_Drought_P Parameter: Organism Value: Zea mays
  misc_feature: MA Experiment 108556 PARAMETER Experiment Name: Zm_Drought_P Parameter: Plant Line Value: 35A19
  misc_feature: MA Experiment 108556 PARAMETER Experiment Name: Zm_Drought_P Parameter: Timepoint (hr) Value: 24
  misc_feature: MA Experiment 108556 PARAMETER Experiment Name: Zm_Drought_P Parameter: Tissue Value: Aerial
  misc_feature: MA Experiment 108556 PARAMETER Experiment Name: Zm_Drought_P Parameter: Treatment Value: Drought vs. No Drought
  misc_feature: MA Experiment ID: 20000479 Result: Down-regulated in Transcription
  misc_feature: MA Experiment 20000479 PARAMETER Experiment Name: Zm_Drought_P Parameter: Age (day) Value: 10
  misc_feature: MA Experiment 20000479 PARAMETER Experiment Name: Zm_Drought_P Parameter: Organism Value: Zea mays
  misc_feature: MA Experiment 20000479 PARAMETER Experiment Name: Zm_Drought_P Parameter: Plant Line Value: 35A19
  misc_feature: MA Experiment 20000479 PARAMETER Experiment Name: Zm_Drought_P Parameter: Timepoint (hr) Value: 48
  misc_feature: MA Experiment 20000479 PARAMETER Experiment Name: Zm_Drought_P Parameter: Tissue Value: Aerial
  misc_feature: MA Experiment 20000479 PARAMETER Experiment Name: Zm_Drought_P Parameter: Treatment Value: Drought vs. No Drought
attttcaaacccggaaaaaccccaagcgcattgaggaagcggccagcggtggtcccttcccccctccagtctccactctccagagtccagacctccactccactgtccactccaaagcgcagcagcgggcaaaaccaggcacccgcccgatccgattcggcttccgtctcactcatctcgcccggcctccacggagagatctggcggcggaggcgatgccactgggcgacggcgcggaggcggcggacttcgtgctgccggacgagctcctggcggcgctgccgcgggacccctacgagcagctggatctggcacgccgcatcaccgcgctggcggtgtccgggcgggtgtccggcctggagcgggaggcggggcgcctgcgggcggaggccgcggggaaggaccgcgagaacgccgagctccgggagcgagtggtgctgctcgacaccgcgctgcaggagaccaacgccaggctcccgcgccgcgctcgaggacaatattaagctcagcaaggagcgagactcgctggcgcagacgtccaagaagctggcgcgcgacctgcagaagctggagtcattcaagaggcatctgatgcagtcattgcgtgatgatagttcatcaccacaggaaacagttgacattacaacatgtgaccagtcagtagcaacaaaagcatcgtctagtggagatggtggatctggcagccaccctacaacaaatatatttagtgaatctttggatgctggaagtacgaaccgagacggtacggcatcaaggcctccgatccaaaaatatgccccctcatcgcacatcactccttggcttacccccaaggccactcctaaaataatgtccacttctgcttctccaaggcaaatatctaccacagcaacaccgaagctgatgtctggtgctacctcgccaacaaaatctcgaattgaagctcacatgtcaatgacaccatggtacccatcaagcaagcagtcatcggcagctagctcacctccacgaggaggttcaaacccaggtcggactcctcgtgttgatggaaaggaattttttcgccaagccaggagtcgtctatcctatgaacaatttggagcattcttagccaacatcaaagaactcaatgcccataagcagtcccgtgaggaaactctcaagaaagctgaggacatctttggtcccgaaaacaaagatctatatctgtctttccgaggcttgctaaatcgtagcatgccgtaggctccgtatgtctcttttttgttgttgggtttgcaggtaatgaagttgccgcattggcaacttattgccatctaagttgtggatttgaagatctagttggaagttttgccccccataatccacactaggtttaacgagcgtcgagcggacctctctgaacaactgagtgcgctaacccagagttgctcctgtaagtggtgcacctgtcgagtgctaaactataggatgcatcctgtcatggtgcctacattcttcgtaaaaccatgaaacagaatcttgggagtaaaattccatctcgtctc

SEQ ID NO: 4616 - protein, 414 aa, Zea mays subsp. mays
  peptide (1)..(414): Ceres Seq. ID no. 12409897
  misc_feature (336)..(411): Homolog of NCBI NO: 23613663 NR Description: hypothetical protein, conserved [Plasmodium
  misc_feature (336)..(411): Homolog of NCBI NO: 23489944 NR Description: hypothetical protein [Plasmodium yoelii yoelii]
  misc_feature (153)..(360): Homolog of NCBI NO: 34909876 NR Description: B1143G03.2 [Oryza sativa (japonica
  misc_feature (163)..(343): Homolog of NCBI NO: 25404089 NR Description: hypothetical protein T6H22.12 [imported] -
  misc_feature (161)..(290): Homolog of NCBI NO: 38344261 NR Description: OSJNBa0008M17.14 [Oryza sativa (japonica
  misc_feature (165)..(384): Homolog of NCBI NO: 7485048 NR Description: hypothetical protein - Arabidopsis thaliana
  misc_feature (160)..(412): Homolog of NCBI NO: 18414476 NR Description: Expressed protein
  misc_feature (182)..(412): Homolog of NCBI NO: 38344261 NR Description: OSJNBa0008M17.14 [Oryza sativa (japonica
  misc_feature (163)..(409): Homolog of NCBI NO: 15222835 NR Description: hypothetical protein; protein id: At1g56080.1
  misc_feature (152)..(413): Homolog of NCBI NO: 30684901 NR Description: expressed protein [Arabidopsis thaliana]
IFKPGKTPSALRKRPAVVPSPLQSPLSRVQTSTPLSTPKRSSGQNQAPARSDSASVSLISPGLHGEIWRRRRCHWATARRRRTSCCRTSSWRRCRGTPTSSWIWHAASPRWRCPGGCPAWSGRRGACGRRPRGRTARTPSSGSEWCCSTPRCRRPTPGSRAALEDNIKLSKERDSLAQTSKKLARDLQKLESFKRHLMQSLRDDSSSPQETVDITTCDQSVATKASSSGDGGSGSHPTTNIFSESLDAGSTNRDGTASRPPIQKYAPSSHITPWLTPKATPKIMSTSASPRQISTTATPKLMSGATSPTKSRIEAHMSMTPWYPSSKQSSAASSPPRGGSNPGRTPRVDGKEFFRQARSRLSYEQFGAFLANIKELNAHKQSREETLKKAEDIFGPENKDLYLSFRGLLNRSMP

SEQ ID NO: 4617 - protein, 217 aa, Zea mays subsp. mays
  peptide (1)..(217): Ceres Seq. ID no. 12409898
  misc_feature (139)..(214): Homolog of NCBI NO: 23613663 NR Description: hypothetical protein, conserved [Plasmodium
  misc_feature (139)..(214): Homolog of NCBI NO: 23489944 NR Description: hypothetical protein [Plasmodium yoelii yoelii]
  misc_feature (1)..(163): Homolog of NCBI NO: 34909876 NR Description: B1143G03.2 [Oryza sativa (japonica
  misc_feature (1)..(146): Homolog of NCBI NO: 25404089 NR Description: hypothetical protein T6H22.12 [imported] -
  misc_feature (1)..(93): Homolog of NCBI NO: 38344261 NR Description: OSJNBa0008M17.14 [Oryza sativa (japonica
  misc_feature (1)..(187): Homolog of NCBI NO: 7485048 NR Description: hypothetical protein - Arabidopsis thaliana
  misc_feature (1)..(215): Homolog of NCBI NO: 18414476 NR Description: Expressed protein
  misc_feature (1)..(215): Homolog of NCBI NO: 38344261 NR Description: OSJNBa0008M17.14 [Oryza sativa (japonica
  misc_feature (1)..(212): Homolog of NCBI NO: 15222835 NR Description: hypothetical protein; protein id: At1g56080.1
  misc_feature (1)..(216): Homolog of NCBI NO: 30684901 NR Description: expressed protein [Arabidopsis thaliana]
MQSLRDDSSSPQETVDITTCDQSVATKASSSGDGGSGSHPTTNIFSESLDAGSTNRDGTASRPPIQKYAPSSHITPWLTPKATPKIMSTSASPRQISTTATPKLMSGATSPTKSRIEAHMSMTPWYPSSKQSSAASSPPRGGSNPGRTPRVDGKEFFRQARSRLSYEQFGAFLANIKELNAHKQSREETLKKAEDIFGPENKDLYLSFRGLLNRSMP

SEQ ID NO: 4618 - DNA, 1681 bp, Zea mays subsp. mays
  misc_feature (1)..(1681): Ceres Seq. ID no. 12373285
  misc_feature: MA Experiment ID: 108545 Result: Up-regulated in Transcription
  misc_feature: MA Experiment 108545 PARAMETER Experiment Name: Zm_Imbibed_Seeds_P Parameter: Age (day) Value: 3 vs. 2
  misc_feature: MA Experiment 108545 PARAMETER Experiment Name: Zm_Imbibed_Seeds_P Parameter: Organism Value: Zea mays
  misc_feature: MA Experiment 108545 PARAMETER Experiment Name: Zm_Imbibed_Seeds_P Parameter: Plant Line Value: 35A19
  misc_feature: MA Experiment 108545 PARAMETER Experiment Name: Zm_Imbibed_Seeds_P Parameter: Tissue Value: Aerial vs. Embryo
  misc_feature: MA Experiment ID: 20000487 Result: Up-regulated in Transcription
  misc_feature: MA Experiment 20000487 PARAMETER Experiment Name: Zm_50mM_NH4NO3_L_to_H_P Parameter: Organism Value: Zea mays
  misc_feature: MA Experiment 20000487 PARAMETER Experiment Name: Zm_50mM_NH4NO3_L_to_H_P Parameter: Timepoint (hr) Value: 4
  misc_feature: MA Experiment 20000487 PARAMETER Experiment Name: Zm_50mM_NH4NO3_L_to_H_P Parameter: Tissue Value: Leaves
  misc_feature: MA Experiment 20000487 PARAMETER Experiment Name: Zm_50mM_NH4NO3_L_to_H_P Parameter: Treatment Value: 50mM NH4NO3 vs. 100mM Mannitol
atcgcgtgcgctctgtggaccgtggtggcgactactgggtggccgccgccacccccgctcggccgccctacgccaggtgctcaccgtcttcgggaccttcgccggcaacgaacactcaccagggaggatgttgcccttgtttagacactgctgtgcctttggaagtcatcatcctcatcccttaatttggaggaacatcttccaaacatcgcgaagagaacaaaaacaaatcaggagttgggatgcacagtgctcagcaaatcaggatcaagcttctatagagaaatgcaatgctccaaagaatttaccaatacctgataattcacttctcgatgctcgtattctctattgtacctctcctgccctgggtcataacaaagaagcacacccagaatcgaacaaaagagttcctgtgatagttgatactcttgagaaattggagcttagtcccaagcatcgtggttcacaggttcttgaaattcaaaatttcaaccctgcttctctagatgatgttgcacgagttcattcaagatcttacatcactggactagaaaaggctatgggcagagcttcagatgaaggtctgatattgattgaagggacaggaccaacatacgctacagaaactactttccgagaatcacttctatcagctggtgccggaatcacactggttgattcagtggtcgcagcgtcaaagttaggtcctaatccgccccttggctttgcattgataaggccaccaggacatcatgctgttcctcaaggtcccatgggtttttgtgtctttgggaacattgcagtggcagctcggtacgctcagcatcaacatggactaaagcgtgtgatgataatagattttgatgttcaccatggcaatgggacgtcagattcattttatgatgatccagatatcttcttcttgtcaactcaccagcttggaagctaccctggtactggtaagatcaatgaagtcggacagggtgatggtgaaggcacgacactcaaccttcctctgcccggtggcgcaggtgactacgcaatgagatgtgcatttgatgaggtcattgctccatcggcccatcgattcaagcctgatataatccttgtatcagctggatacgacgcacacgcgctggaccctctggctggccttcagttcacaacaggcacgttctacatgctggcatccagcatcaagcaggtgaccaaggaactctgtggtggccgctgtgtcttcttcctggaaggcgggtacaacctgcagtcgctctccagctccgttgccgacacgttccgtgcattccttgatgagcccagcctcgcagcacagtttgatgatccagcgatacttttcgaagagccgactcggaagatcaaggaagcaatcgagaaggccaagagcatccactcactctaggctgtcagctaattttccccccaatccccagaaatcccggaggggtagccctaaattgggaaaaggtgctgtcagcagtgtgcactgcagaactgcaagatcttgtggcaattggcattttgcaggtaggtagtgcatagtttgaacttggaaggcatggtcattttaatttagccaattctcaccagaaaatggaattaccgttctctcaatactagctgtatatattgaccaaaagttatgtgctacattattaatttt

SEQ ID NO: 4619 - protein, 472 aa, Zea mays subsp. mays
  peptide (1)..(472): Ceres Seq. ID no. 12373286
  misc_feature (111)..(441): Pfam Name: Histone deacetylase family Pfam Description: Histone deacetylase family
  misc_feature (127)..(471): Homolog of NCBI NO: 11497747 NR Description: acetylpolyamine aminohydrolase (aphA)
  misc_feature (129)..(429): Homolog of NCBI NO: 23501331 NR Description: histone deacetylase family protein [Brucella suis
  misc_feature (129)..(429): Homolog of NCBI NO: 17987787 NR Description: acetylspermidine deacetylase [Brucella
  misc_feature (126)..(427): Homolog of NCBI NO: 15964636 NR Description: CONSERVED HYPOTHETICAL PROTEIN [Sinorhizobium
  misc_feature (141)..(428): Homolog of NCBI NO: 27377764 NR Description: bll2653 [Bradyrhizobium japonicum]
  misc_feature (167)..(429): Homolog of NCBI NO: 22962933 NR Description: hypothetical protein [Rhodopseudomonas palustris]
  misc_feature (166)..(435): Homolog of NCBI NO: 15789452 NR Description: acetoin utilization protein; Aup [Halobacterium
  misc_feature (174)..(428): Homolog of NCBI NO: 24213615 NR Description: histone deacetylase family protein
  misc_feature (127)..(472): Homolog of NCBI NO: 7445481 NR Description: hypothetical protein F17M5.230 - Arabidopsis
  misc_feature (100)..(472): Homolog of NCBI NO: 18418220 NR Description: putative protein
SRALCGPWWRLLGGRRHPRSAALRQVLTVFGTFAGNEHSPGRMLPLFRHCCAFGSHHPHPLIWRNIFQTSRREQKQIRSWDAQCSANQDQASIEKCNAPKNLPIPDNSLLDARILYCTSPALGHNKEAHPESNKRVPVIVDTLEKLELSPKHRGSQVLEIQNFNPASLDDVARVHSRSYITGLEKAMGRASDEGLILIEGTGPTYATETTFRESLLSAGAGITLVDSVVAASKLGPNPPLGFALIRPPGHHAVPQGPMGFCVFGNIAVAARYAQHQHGLKRVMIIDFDVHHGNGTSDSFYDDPDIFFLSTHQLGSYPGTGKINEVGQGDGEGTTLNLPLPGGAGDYAMRCAFDEVIAPSAHRFKPDIILVSAGYDAHALDPLAGLQFTTGTFYMLASSIKQVTKELCGGRCVFFLEGGYNLQSLSSSVADTFRAFLDEPSLAAQFDDPAILFEEPTRKIKEAIEKAKSIHSL

SEQ ID NO: 4620 - protein, 430 aa, Zea mays subsp. mays
  peptide (1)..(430): Ceres Seq. ID no. 12373287
  misc_feature (69)..(399): Pfam Name: Histone deacetylase family Pfam Description: Histone deacetylase family
  misc_feature (99)..(386): Homolog of NCBI NO: 27377764 NR Description: bll2653 [Bradyrhizobium japonicum]
  misc_feature (125)..(387): Homolog of NCBI NO: 22962933 NR Description: hypothetical protein [Rhodopseudomonas palustris]
  misc_feature (124)..(393): Homolog of NCBI NO: 15789452 NR Description: acetoin utilization protein; Aup [Halobacterium
  misc_feature (85)..(429): Homolog of NCBI NO: 11497747 NR Description: acetylpolyamine aminohydrolase (aphA)
  misc_feature (87)..(387): Homolog of NCBI NO: 17987787 NR Description: acetylspermidine deacetylase [Brucella
  misc_feature (84)..(385): Homolog of NCBI NO: 15964636 NR Description: CONSERVED HYPOTHETICAL PROTEIN [Sinorhizobium
  misc_feature (87)..(387): Homolog of NCBI NO: 23501331 NR Description: histone deacetylase family protein [Brucella suis
  misc_feature (132)..(386): Homolog of NCBI NO: 24213615 NR Description: histone deacetylase family protein
  misc_feature (85)..(430): Homolog of NCBI NO: 7445481 NR Description: hypothetical protein F17M5.230 - Arabidopsis
  misc_feature (58)..(430): Homolog of NCBI NO: 18418220 NR Description: putative protein
MLPLFRHCCAFGSHHPHPLIWRNIFQTSRREQKQIRSWDAQCSANQDQASIEKCNAPKNLPIPDNSLLDARILYCTSPALGHNKEAHPESNKRVPVIVDTLEKLELSPKHRGSQVLEIQNFNPASLDDVARVHSRSYITGLEKAMGRASDEGLILIEGTGPTYATETTFRESLLSAGAGITLVDSVVAASKLGPNPPLGFALIRPPGHHAVPQGPMGFCVFGNIAVAARYAQHQHGLKRVMIIDFDVHHGNGTSDSFYDDPDIFFLSTHQLGSYPGTGKINEVGQGDGEGTTLNLPLPGGAGDYAMRCAFDEVIAPSAHRFKPDIILVSAGYDAHALDPLAGLQFTTGTFYMLASSIKQVTKELCGGRCVFFLEGGYNLQSLSSSVADTFRAFLDEPSLAAQFDDPAILFEEPTRKIKEAIEKAKSIHSL

SEQ ID NO: 4621 - protein, 286 aa, Zea mays subsp. mays
  peptide (1)..(286): Ceres Seq. ID no. 12373288
  misc_feature (1)..(255): Pfam Name: Histone deacetylase family Pfam Description: Histone deacetylase family
  misc_feature (1)..(285): Homolog of NCBI NO: 11497747 NR Description: acetylpolyamine aminohydrolase (aphA)
  misc_feature (1)..(243): Homolog of NCBI NO: 23501331 NR Description: histone deacetylase family protein [Brucella suis
  misc_feature (1)..(243): Homolog of NCBI NO: 17987787 NR Description: acetylspermidine deacetylase [Brucella
  misc_feature (1)..(241): Homolog of NCBI NO: 15964636 NR Description: CONSERVED HYPOTHETICAL PROTEIN [Sinorhizobium
  misc_feature (1)..(242): Homolog of NCBI NO: 27377764 NR Description: bll2653 [Bradyrhizobium japonicum]
  misc_feature (1)..(243): Homolog of NCBI NO: 22962933 NR Description: hypothetical protein [Rhodopseudomonas palustris]
  misc_feature (1)..(249): Homolog of NCBI NO: 15789452 NR Description: acetoin utilization protein; Aup [Halobacterium
  misc_feature (1)..(242): Homolog of NCBI NO: 24213615 NR Description: histone deacetylase family protein
  misc_feature (1)..(286): Homolog of NCBI NO: 7445481 NR Description: hypothetical protein F17M5.230 - Arabidopsis
  misc_feature (1)..(286): Homolog of NCBI NO: 18418220 NR Description: putative protein
MGRASDEGLILIEGTGPTYATETTFRESLLSAGAGITLVDSVVAASKLGPNPPLGFALIRPPGHHAVPQGPMGFCVFGNIAVAARYAQHQHGLKRVMIIDFDVHHGNGTSDSFYDDPDIFFLSTHQLGSYPGTGKINEVGQGDGEGTTLNLPLPGGAGDYAMRCAFDEVIAPSAHRFKPDIILVSAGYDAHALDPLAGLQFTTGTFYMLASSIKQVTKELCGGRCVFFLEGGYNLQSLSSSVADTFRAFLDEPSLAAQFDDPAILFEEPTRKIKEAIEKAKSIHSL

SEQ ID NO: 4622 - DNA, 1418 bp, Zea mays subsp. mays
  misc_feature (1)..(1418): Ceres Seq. ID no. 12382218
  misc_feature: MA Experiment ID: 108528 Result: Down-regulated in Transcription
  misc_feature: MA Experiment 108528 PARAMETER Experiment Name: Zm_Imbibed_Seeds_P Parameter: Age (day) Value: 5 vs. 2
  misc_feature: MA Experiment 108528 PARAMETER Experiment Name: Zm_Imbibed_Seeds_P Parameter: Organism Value: Zea mays
  misc_feature: MA Experiment 108528 PARAMETER Experiment Name: Zm_Imbibed_Seeds_P Parameter: Plant Line Value: 35A19
  misc_feature: MA Experiment 108528 PARAMETER Experiment Name: Zm_Imbibed_Seeds_P Parameter: Tissue Value: Aerial vs. Embryo
  misc_feature: MA Experiment ID: 108530 Result: Down-regulated in Transcription
  misc_feature: MA Experiment 108530 PARAMETER Experiment Name: Zm_Imbibed_Seeds_P Parameter: Age (day) Value: 6 vs. 2
  misc_feature: MA Experiment 108530 PARAMETER Experiment Name: Zm_Imbibed_Seeds_P Parameter: Organism Value: Zea mays
  misc_feature: MA Experiment 108530 PARAMETER Experiment Name: Zm_Imbibed_Seeds_P Parameter: Plant Line Value: 35A19
  misc_feature: MA Experiment 108530 PARAMETER Experiment Name: Zm_Imbibed_Seeds_P Parameter: Tissue Value: Aerial vs. Embryo
  misc_feature: MA Experiment ID: 108534 Result: Up-regulated in Transcription
  misc_feature: MA Experiment 108534 PARAMETER Experiment Name: Zm_4deg_Cold_P Parameter: Age (hr) Value: 8
  misc_feature: MA Experiment 108534 PARAMETER Experiment Name: Zm_4deg_Cold_P Parameter: Organism Value: Zea mays
  misc_feature: MA Experiment 108534 PARAMETER Experiment Name: Zm_4deg_Cold_P Parameter: Plant Line Value: 35A19
  misc_feature: MA Experiment 108534 PARAMETER Experiment Name: Zm_4deg_Cold_P Parameter: Temperature (deg C) Value: 4 vs. 22
  misc_feature: MA Experiment 108534 PARAMETER Experiment Name: Zm_4deg_Cold_P Parameter: Timepoint (hr) Value: 6
  misc_feature: MA Experiment 108534 PARAMETER Experiment Name: Zm_4deg_Cold_P Parameter: Tissue Value: Aerial
  misc_feature: MA Experiment ID: 108543 Result: Up-regulated in Transcription
  misc_feature: MA Experiment ID: 108545 Result: Down-regulated in Transcription
  misc_feature: MA Experiment 108545 PARAMETER Experiment Name: Zm_Imbibed_Seeds_P Parameter: Age (day) Value: 3 vs. 2
  misc_feature: MA Experiment 108545 PARAMETER Experiment Name: Zm_Imbibed_Seeds_P Parameter: Organism Value: Zea mays
  misc_feature: MA Experiment 108545 PARAMETER Experiment Name: Zm_Imbibed_Seeds_P Parameter: Plant Line Value: 35A19
  misc_feature: MA Experiment 108545 PARAMETER Experiment Name: Zm_Imbibed_Seeds_P Parameter: Tissue Value: Aerial vs. Embryo
  misc_feature: MA Experiment ID: 108547 Result: Down-regulated in Transcription
  misc_feature: MA Experiment 108547 PARAMETER Experiment Name: Zm_Imbibed_Seeds_P Parameter: Age (day) Value: 4 vs. 2
  misc_feature: MA Experiment 108547 PARAMETER Experiment Name: Zm_Imbibed_Seeds_P Parameter: Organism Value: Zea mays
  misc_feature: MA Experiment 108547 PARAMETER Experiment Name: Zm_Imbibed_Seeds_P Parameter: Plant Line Value: 35A19
  misc_feature: MA Experiment 108547 PARAMETER Experiment Name: Zm_Imbibed_Seeds_P Parameter: Tissue Value: Aerial vs. Embryo
  misc_feature: MA Experiment ID: 108556 Result: Down-regulated in Transcription
  misc_feature: MA Experiment 108556 PARAMETER Experiment Name: Zm_Drought_P Parameter: Age (day) Value: 9
  misc_feature: MA Experiment 108556 PARAMETER Experiment Name: Zm_Drought_P Parameter: Organism Value: Zea mays
  misc_feature: MA Experiment 108556 PARAMETER Experiment Name: Zm_Drought_P Parameter: Plant Line Value: 35A19
  misc_feature: MA Experiment 108556 PARAMETER Experiment Name: Zm_Drought_P Parameter: Timepoint (hr) Value: 24
  misc_feature: MA Experiment 108556 PARAMETER Experiment Name: Zm_Drought_P Parameter: Tissue Value: Aerial
  misc_feature: MA Experiment 108556 PARAMETER Experiment Name: Zm_Drought_P Parameter: Treatment Value: Drought vs. No Drought
  misc_feature: MA Experiment ID: 108688 Result: Down-regulated in Transcription
  misc_feature: MA Experiment 108688 PARAMETER Experiment Name: Zm_Embryos-Flowers__P Parameter: Tissue Value: Immature Flowers vs. Aerial+
  misc_feature: MA Experiment ID: 20000477 Result: Down-regulated in Transcription
  misc_feature: MA Experiment 20000477 PARAMETER Experiment Name: Zm_5mM_SA_P Parameter: Age (day) Value: 10
  misc_feature: MA Experiment 20000477 PARAMETER Experiment Name: Zm_5mM_SA_P Parameter: Organism Value: Zea mays
  misc_feature: MA Experiment 20000477 PARAMETER Experiment Name: Zm_5mM_SA_P Parameter: Plant Line Value: 35A19
  misc_feature: MA Experiment 20000477 PARAMETER Experiment Name: Zm_5mM_SA_P Parameter: Timepoint (hr) Value: 48
  misc_feature: MA Experiment 20000477 PARAMETER Experiment Name: Zm_5mM_SA_P Parameter: Tissue Value: Aerial
  misc_feature: MA Experiment 20000477 PARAMETER Experiment Name: Zm_5mM_SA_P Parameter: Treatment Value: 5mM SA vs. No Treatment
  misc_feature: MA Experiment ID: 20000478 Result: Down-regulated in Transcription
  misc_feature: MA Experiment 20000478 PARAMETER Experiment Name: Zm_5mM_SA_P Parameter: Age (day) Value: 11
  misc_feature: MA Experiment 20000478 PARAMETER Experiment Name: Zm_5mM_SA_P Parameter: Organism Value: Zea mays
  misc_feature: MA Experiment 20000478 PARAMETER Experiment Name: Zm_5mM_SA_P Parameter: Plant Line Value: 35A19
  misc_feature: MA Experiment 20000478 PARAMETER Experiment Name: Zm_5mM_SA_P Parameter: Timepoint (hr) Value: 72
  misc_feature: MA Experiment 20000478 PARAMETER Experiment Name: Zm_5mM_SA_P Parameter: Tissue Value: Aerial
  misc_feature: MA Experiment 20000478 PARAMETER Experiment Name: Zm_5mM_SA_P Parameter: Treatment Value: 5mM SA vs. No Treatment
  misc_feature: MA Experiment ID: 20000532 Result: Up-regulated in Transcription
  misc_feature: MA Experiment 20000532 PARAMETER Experiment Name: Zm_0.001percent_MeJA_P Parameter: Age (day) Value: 10
  misc_feature: MA Experiment 20000532 PARAMETER Experiment Name: Zm_0.001percent_MeJA_P Parameter: Organism Value: Zea mays
  misc_feature: MA Experiment 20000532 PARAMETER Experiment Name: Zm_0.001percent_MeJA_P Parameter: Plant Line Value: 35A19
  misc_feature: MA Experiment 20000532 PARAMETER Experiment Name: Zm_0.001percent_MeJA_P Parameter: Timepoint (hr) Value: 48
  misc_feature: MA Experiment 20000532 PARAMETER Experiment Name: Zm_0.001percent_MeJA_P Parameter: Tissue Value: Aerial
  misc_feature: MA Experiment 20000532 PARAMETER Experiment Name: Zm_0.001percent_MeJA_P Parameter: Treatment Value: 0.001percent MeJA vs. No Treatment
  misc_feature: MA Experiment ID: 20000535 Result: Down-regulated in Transcription
  misc_feature: MA Experiment 20000535 PARAMETER Experiment Name: Zm_Hybrid_Seed_Dev_P Parameter: DAP Value: 30 vs. 12
  misc_feature: MA Experiment 20000535 PARAMETER Experiment Name: Zm_Hybrid_Seed_Dev_P Parameter: Organism Value: Zea mays
  misc_feature: MA Experiment 20000535 PARAMETER Experiment Name: Zm_Hybrid_Seed_Dev_P Parameter: Plant Line Value: 35A19
  misc_feature: MA Experiment 20000535 PARAMETER Experiment Name: Zm_Hybrid_Seed_Dev_P Parameter: Tissue Value: Embryo vs. Unfert Floret
gcacgagaccattacctagaacatcctaatcgaaaaaaagagctcgagaccgacaggacgagactcgcagctagctgacacggccgagaagcagcttcattgcaggcgtagtacgtacccagcagcagctagcactagcagtccatcggagcgacgatggtgagaaggacggtgctggcggcgctgctggtggccgccgccctcgccggcggcgcgcgggcgcagctcaaggaggggttctacgactactcctgcccacaggcggagaagatcgtcaaggactacgtgaaggcgcacatcccccacgcgcccgacgtcgcctccaccctgctccgcacccacttccacgactgcttcgtcaggggctgcgacgcgtcagtgctgctcaacgcgacgggcggcagcgaggcggagaaggacgcggcgcccaacctgacgctgcgcggcttcggcttcatcgaccgcatcaaggcgctgctcgagaaggagtgccccggcgtggtgtcctgcgccgacatcgtcgcgctcgccgcccgcgactccgtcggcgtcatcggcggtccgttctggagcgtgccgacggggaggcgcgacggcaccgtgtccatcaagcaggaggcgctggaccagatccccgcgcccaccatgaacttcacccaactcctccagtccttccagaacaagagcctcaacctcgccgacctcgtctggctctcaggggctcacacgatcggcatctcccaatgcaactccttcagcgagcgcctgtacaacttcacggggcgcggcgggcccgacgacgcggacccgtcgctggacccgctgtacgccgcgaagttgcggctcaagtgcaagacgctgacggacaacacgacgatcgtggagatggaccccggcagcttccgcaccttcgacctgagctactaccgcggcgtgctcaagcggcggggcctgttccagtccgacgccgcgctcatcaccgacgccgcctccaaggccgacatcctcagcgtgatcaacgcgccgcccgaggtgttcttccaggtcttcgcgggctccatggtcaagatgggcgccatcgaggtcaagaccggctccgagggcgagatcaggaagcactgcgccctcgtcaacaagcactaggcggcggaattcatgcgggagatggctccattgctcgcaaaaaatccttgtgagacacacaacatgctctgcatctgcaggcgttgtcgtcaccttggtggacgtagtacatcggtgcatggattatctgttgtttaatttgtacgttcagttcattctgtttcttgtattcttttggttcctttcctcttgtttattcatggatgatgaggtgtttctgttttattctctggttcagctgtaaccatgtaacatgtaaggtgcgcgttttgtcc

SEQ ID NO: 4623 - protein, 328 aa, Zea mays subsp. mays
  peptide (1)..(328): Ceres Seq. ID no. 12382219
  misc_feature (40)..(288): Pfam Name: Peroxidase Pfam Description: Peroxidase
  misc_feature (6)..(326): Homolog of NCBI NO: 7433079 NR Description: peroxidase (EC 1.11.1.7) precursor prx10 -
  misc_feature (6)..(326): Homolog of NCBI NO: 7259219 NR Description: peroxidase [Spinacia oleracea]
  misc_feature (1)..(326): Homolog of NCBI NO: 1084405 NR Description: peroxidase (EC 1.11.1.7) TPX1 precursor - tomato
  misc_feature (1)..(326): Homolog of NCBI NO: 678547 NR Description: peroxidase
MVRRTVLAALLVAAALAGGARAQLKEGFYDYSCPQAEKIVKDYVKAHIPHAPDVASTLLRTHFHDCFVRGCDASVLLNATGGSEAEKDAAPNLTLRGFGFIDRIKALLEKECPGVVSCADIVALAARDSVGVIGGPFWSVPTGRRDGTVSIKQEALDQIPAPTMNFTQLLQSFQNKSLNLADLVWLSGAHTIGISQCNSFSERLYNFTGRGGPDDADPSLDPLYAAKLRLKCKTLTDNTTIVEMDPGSFRTFDLSYYRGVLKRRGLFQSDAALITDAASKADILSVINAPPEVFFQVFAGSMVKMGAIEVKTGSEGEIRKHCALVNKH

SEQ ID NO: 4624 - protein, 165 aa, Zea mays subsp. mays
  peptide (1)..(165): Ceres Seq. ID no. 12382220
  misc_feature (1)..(125): Pfam Name: Peroxidase Pfam Description: Peroxidase
  misc_feature (1)..(163): Homolog of NCBI NO: 7433079 NR Description: peroxidase (EC 1.11.1.7) precursor prx10 -
  misc_feature (1)..(163): Homolog of NCBI NO: 7259219 NR Description: peroxidase [Spinacia oleracea]
  misc_feature (1)..(163): Homolog of NCBI NO: 1084405 NR Description: peroxidase (EC 1.11.1.7) TPX1 precursor - tomato
  misc_feature (1)..(163): Homolog of NCBI NO: 678547 NR Description: peroxidase
MNFTQLLQSFQNKSLNLADLVWLSGAHTIGISQCNSFSERLYNFTGRGGPDDADPSLDPLYAAKLRLKCKTLTDNTTIVEMDPGSFRTFDLSYYRGVLKRRGLFQSDAALITDAASKADILSVINAPPEVFFQVFAGSMVKMGAIEVKTGSEGEIRKHCALVNKH

SEQ ID NO: 4625 - DNA, 1611 bp, Zea mays subsp. mays
  misc_feature (1)..(1611): Ceres Seq. ID no. 12344708
  misc_feature: MA Experiment ID: 108536 Result: Up-regulated in Transcription
  misc_feature: MA Experiment 108536 PARAMETER Experiment Name: Zm_Meristem_P Parameter: Age (day) Value: 8
  misc_feature: MA Experiment 108536 PARAMETER Experiment Name: Zm_Meristem_P Parameter: Organism Value: Zea mays
  misc_feature: MA Experiment 108536 PARAMETER Experiment Name: Zm_Meristem_P Parameter: Plant Line Value: 35A19
  misc_feature: MA Experiment 108536 PARAMETER Experiment Name: Zm_Meristem_P Parameter: Tissue Value: Shoot Meristem vs. Above Shoot Meristem
  misc_feature: MA Experiment ID: 108544 Result: Down-regulated in Transcription
  misc_feature: MA Experiment ID: 20000477 Result: Down-regulated in Transcription
  misc_feature: MA Experiment 20000477 PARAMETER Experiment Name: Zm_5mM_SA_P Parameter: Age (day) Value: 10
  misc_feature: MA Experiment 20000477 PARAMETER Experiment Name: Zm_5mM_SA_P Parameter: Organism Value: Zea mays
  misc_feature: MA Experiment 20000477 PARAMETER Experiment Name: Zm_5mM_SA_P Parameter: Plant Line Value: 35A19
  misc_feature: MA Experiment 20000477 PARAMETER Experiment Name: Zm_5mM_SA_P Parameter: Timepoint (hr) Value: 48
  misc_feature: MA Experiment 20000477 PARAMETER Experiment Name: Zm_5mM_SA_P Parameter: Tissue Value: Aerial
  misc_feature: MA Experiment 20000477 PARAMETER Experiment Name: Zm_5mM_SA_P Parameter: Treatment Value: 5mM SA vs. No Treatment
  misc_feature: MA Experiment ID: 20000478 Result: Down-regulated in Transcription
  misc_feature: MA Experiment 20000478 PARAMETER Experiment Name: Zm_5mM_SA_P Parameter: Age (day) Value: 11
  misc_feature: MA Experiment 20000478 PARAMETER Experiment Name: Zm_5mM_SA_P Parameter: Organism Value: Zea mays
  misc_feature: MA Experiment 20000478 PARAMETER Experiment Name: Zm_5mM_SA_P Parameter: Plant Line Value: 35A19
  misc_feature: MA Experiment 20000478 PARAMETER Experiment Name: Zm_5mM_SA_P Parameter: Timepoint (hr) Value: 72
  misc_feature: MA Experiment 20000478 PARAMETER Experiment Name: Zm_5mM_SA_P Parameter: Tissue Value: Aerial
  misc_feature: MA Experiment 20000478 PARAMETER Experiment Name: Zm_5mM_SA_P Parameter: Treatment Value: 5mM SA vs. No Treatment
  misc_feature: MA Experiment ID: 20000479 Result: Down-regulated in Transcription
  misc_feature: MA Experiment 20000479 PARAMETER Experiment Name: Zm_Drought_P Parameter: Age (day) Value: 10
  misc_feature: MA Experiment 20000479 PARAMETER Experiment Name: Zm_Drought_P Parameter: Organism Value: Zea mays
  misc_feature: MA Experiment 20000479 PARAMETER Experiment Name: Zm_Drought_P Parameter: Plant Line Value: 35A19
  misc_feature: MA Experiment 20000479 PARAMETER Experiment Name: Zm_Drought_P Parameter: Timepoint (hr) Value: 48
  misc_feature: MA Experiment 20000479 PARAMETER Experiment Name: Zm_Drought_P Parameter: Tissue Value: Aerial
  misc_feature: MA Experiment 20000479 PARAMETER Experiment Name: Zm_Drought_P Parameter: Treatment Value: Drought vs. No Drought
  misc_feature: MA Experiment ID: 20000535 Result: Up-regulated in Transcription
  misc_feature: MA Experiment 20000535 PARAMETER Experiment Name: Zm_Hybrid_Seed_Dev_P Parameter: DAP Value: 30 vs. 12
  misc_feature: MA Experiment 20000535 PARAMETER Experiment Name: Zm_Hybrid_Seed_Dev_P Parameter: Organism Value: Zea mays
  misc_feature: MA Experiment 20000535 PARAMETER Experiment Name: Zm_Hybrid_Seed_Dev_P Parameter: Plant Line Value: 35A19
  misc_feature: MA Experiment 20000535 PARAMETER Experiment Name: Zm_Hybrid_Seed_Dev_P Parameter: Tissue Value: Embryo vs. Unfert Floret
aaaagcctgtctagaaccaaacacccctctccaccgactgcaaataatccgactcccactgctgggtgccctgtcccctacctcgggttccgcgcagaggaaggtgagacaccaattccactcccaaaccccacgaaaaccctcgccgtcttcgtccaaatcactcgcttgatctctcctctccgaacccggcaaccccttgaactagggttccagcgacccaatgacggacggcgacgacgagtacaagcgcgaggagtcggtggccctgctggtcatcgtcttcctcgccgcgctctcgctcctttccgtcatcgctgccttcgcctactactgctacattactcgcaaggtctcccgtcgcctccaggcgttccatatccccaagcgttccagctcccatcatacgcttcctccccgggccctgccgccgcagcagcaggggacggacaacccgtccagtaactccaccagagatggtgtcggagcggcggcgatgtcggtggtggctgctggggagaggggcgtgcaggtgttcagctaccggcagcttcacgcggccacgggtgggtttgaccgggcgcacatggttgggcagggcagcttcgggaccgtgtaccgcggggtgctccccgacgggaggaaggtcgcggtcaagctcatggaccgcccagggaaacagggagaagatgagtttgagatggaggtggagttgctgagtaggctccgatcaccgtatttattgggcctgattggccattgttcggaaggtgaacactgtctacttgtatatgagttcatggccaatgggggtctccaggagcatctctatccaaacagaggttcatgtggtggaatctcaaaattggactgggacacaagaatgagaattgcacttgaagcagccaaaggtttggaatatcttcatgaacatgttaatccacctgttatacatagagacttcaagagtagcaatattctcctggacaaggacttccatgcaagaatttcagactttggtctagccaaacttggatctgatagagctggtggtcatgtctcaactcgagttttgggcacacaaggctatgttgcaccagagtatgcattggctgggcatttgactaccaaatcagatgtgtacagttatggtgttgtgcttttggaattgcttactggcagagtaccagttgatatgaagaggtctcctggagaaggtgttttagttaactgggcattgcctatgctcactgaccgagataaagttgtgcggatcttggatccagcatcggaaggtcaatattccttgaaagatgctgtccaagtggctgctattgctgccatgtgtgttcaaccagaggctgactataggccattaatggctgatgttgtccaatcgctggttccacttgtcaagaaccgttataatcagaaatcttgcaatcccaatgtgcaaccatcgaagccacttgactaggagaaaagctagtgtttgatctgcagtttgtgctcgtccttctggaacccttctcgagttctcgtctataacgaactactgttgagacagattcacacgcttcctaacaatgatttcgtctgctggtgccctcc

SEQ ID NO: 4626 - protein, 417 aa, Zea mays subsp. mays
  peptide (1)..(417): Ceres Seq. ID no. 12344709
  misc_feature (117)..(322): Pfam Name: Protein kinase domain Pfam Description: Protein kinase domain
  misc_feature (9)..(414): Homolog of NCBI NO: 22327898 NR Description: Expressed protein
  misc_feature (9)..(414): Homolog of NCBI NO: 20453162 NR Description: At5g56885 [Arabidopsis thaliana]
  misc_feature (91)..(413): Homolog of NCBI NO: 34902828 NR Description: unnamed protein product [Oryza sativa (japonica
  misc_feature (101)..(414): Homolog of NCBI NO: 25405773 NR Description: hypothetical protein T22H22.21 [imported] -
  misc_feature (85)..(414): Homolog of NCBI NO: 15221910 NR Description: protein kinase, putative; protein id: At1g54820.1
  misc_feature (79)..(414): Homolog of NCBI NO: 12322155 NR Description: protein kinase, putative [Arabidopsis thaliana]
  misc_feature (160)..(400): Homolog of NCBI NO: 26449989 NR Description: putative serine/threonine-specific protein kinase
  misc_feature (160)..(400): Homolog of NCBI NO: 30694859 NR Description: protein kinase family [Arabidopsis thaliana]
  misc_feature (5)..(43): Homolog of NCBI NO: 11358842 NR Description: serine/threonine-specific protein kinase-like
  misc_feature (99)..(400): Homolog of NCBI NO: 11358842 NR Description: serine/threonine-specific protein kinase-like
MTDGDDEYKREESVALLVIVFLAALSLLSVIAAFAYYCYITRKVSRRLQAFHIPKRSSSHHTLPPRALPPQQQGTDNPSSNSTRDGVGAAAMSVVAAGERGVQVFSYRQLHAATGGFDRAHMVGQGSFGTVYRGVLPDGRKVAVKLMDRPGKQGEDEFEMEVELLSRLRSPYLLGLIGHCSEGEHCLLVYEFMANGGLQEHLYPNRGSCGGISKLDWDTRMRIALEAAKGLEYLHEHVNPPVIHRDFKSSNILLDKDFHARISDFGLAKLGSDRAGGHVSTRVLGTQGYVAPEYALAGHLTTKSDVYSYGVVLLELLTGRVPVDMKRSPGEGVLVNWALPMLTDRDKVVRILDPASEGQYSLKDAVQVAAIAAMCVQPEADYRPLMADVVQSLVPLVKNRYNQKSCNPNVQPSKPLD

SEQ ID NO: 4627 - protein, 326 aa, Zea mays subsp. mays
  peptide (1)..(326): Ceres Seq. ID no. 12344710
  misc_feature (26)..(231): Pfam Name: Protein kinase domain Pfam Description: Protein kinase domain
  misc_feature (1)..(302): Homolog of NCBI NO: 34910468 NR Description: putative protein kinase [Oryza sativa (japonica
  misc_feature (1)..(323): Homolog of NCBI NO: 22327898 NR Description: Expressed protein
  misc_feature (1)..(323): Homolog of NCBI NO: 20453162 NR Description: At5g56885 [Arabidopsis thaliana]
  misc_feature (1)..(322): Homolog of NCBI NO: 34902828 NR Description: unnamed protein product [Oryza sativa (japonica
  misc_feature (10)..(323): Homolog of NCBI NO: 25405773 NR Description: hypothetical protein T22H22.21 [imported] -
  misc_feature (1)..(323): Homolog of NCBI NO: 15221910 NR Description: protein kinase, putative; protein id: At1g54820.1
  misc_feature (1)..(323): Homolog of NCBI NO: 12322155 NR Description: protein kinase, putative [Arabidopsis thaliana]
  misc_feature (69)..(309): Homolog of NCBI NO: 26449989 NR Description: putative serine/threonine-specific protein kinase
  misc_feature (69)..(309): Homolog of NCBI NO: 30694859 NR Description: protein kinase family [Arabidopsis thaliana]
  misc_feature (8)..(309): Homolog of NCBI NO: 11358842 NR Description: serine/threonine-specific protein kinase-like
MSVVAAGERGVQVFSYRQLHAATGGFDRAHMVGQGSFGTVYRGVLPDGRKVAVKLMDRPGKQGEDEFEMEVELLSRLRSPYLLGLIGHCSEGEHCLLVYEFMANGGLQEHLYPNRGSCGGISKLDWDTRMRIALEAAKGLEYLHEHVNPPVIHRDFKSSNILLDKDFHARISDFGLAKLGSDRAGGHVSTRVLGTQGYVAPEYALAGHLTTKSDVYSYGVVLLELLTGRVPVDMKRSPGEGVLVNWALPMLTDRDKVVRILDPASEGQYSLKDAVQVAAIAAMCVQPEADYRPLMADVVQSLVPLVKNRYNQKSCNPNVQPSKPLD

SEQ ID NO: 4628 - protein, 296 aa, Zea mays subsp. mays
  peptide (1)..(296): Ceres Seq. ID no. 12344711
  misc_feature (1)..(201): Pfam Name: Protein kinase domain Pfam Description: Protein kinase domain
  misc_feature (1)..(272): Homolog of NCBI NO: 34910468 NR Description: putative protein kinase [Oryza sativa (japonica
  misc_feature (1)..(293): Homolog of NCBI NO: 22327898 NR Description: Expressed protein
  misc_feature (1)..(293): Homolog of NCBI NO: 20453162 NR Description: At5g56885 [Arabidopsis thaliana]
  misc_feature (1)..(292): Homolog of NCBI NO: 34902828 NR Description: unnamed protein product [Oryza sativa (japonica
  misc_feature (1)..(293): Homolog of NCBI NO: 25405773 NR Description: hypothetical protein T22H22.21 [imported] -
  misc_feature (1)..(293): Homolog of NCBI NO: 15221910 NR Description: protein kinase, putative; protein id: At1g54820.1
  misc_feature (1)..(293): Homolog of NCBI NO: 12322155 NR Description: protein kinase, putative [Arabidopsis thaliana]
  misc_feature (39)..(279): Homolog of NCBI NO: 26449989 NR Description: putative serine/threonine-specific protein kinase
  misc_feature (39)..(279): Homolog of NCBI NO: 30694859 NR Description: protein kinase family [Arabidopsis thaliana]
  misc_feature (1)..(279): Homolog of NCBI NO: 11358842 NR Description: serine/threonine-specific protein kinase-like
MVGQGSFGTVYRGVLPDGRKVAVKLMDRPGKQGEDEFEMEVELLSRLRSPYLLGLIGHCSEGEHCLLVYEFMANGGLQEHLYPNRGSCGGISKLDWDTRMRIALEAAKGLEYLHEHVNPPVIHRDFKSSNILLDKDFHARISDFGLAKLGSDRAGGHVSTRVLGTQGYVAPEYALAGHLTTKSDVYSYGVVLLELLTGRVPVDMKRSPGEGVLVNWALPMLTDRDKVVRILDPASEGQYSLKDAVQVAAIAAMCVQPEADYRPLMADVVQSLVPLVKNRYNQKSCNPNVQPSKPLD

SEQ ID NO: 4629 - DNA, 1524 bp, Zea mays subsp. mays
  misc_feature (1)..(1524): Ceres Seq. ID no. 12365476
  misc_feature: MA Experiment ID: 108527 Result: Down-regulated in Transcription
  misc_feature: MA Experiment 108527 PARAMETER Experiment Name: Zm_5mM_NO_P Parameter: Age (day) Value: 8
  misc_feature: MA Experiment 108527 PARAMETER Experiment Name: Zm_5mM_NO_P Parameter: Organism Value: Zea mays
  misc_feature: MA Experiment 108527 PARAMETER Experiment Name: Zm_5mM_NO_P Parameter: Plant Line Value: 35A19
  misc_feature: MA Experiment 108527 PARAMETER Experiment Name: Zm_5mM_NO_P Parameter: Timepoint (hr) Value: 6
  misc_feature: MA Experiment 108527 PARAMETER Experiment Name: Zm_5mM_NO_P Parameter: Tissue Value: Aerial
  misc_feature: MA Experiment 108527 PARAMETER Experiment Name: Zm_5mM_NO_P Parameter: Treatment Value: 5mM NO vs. No Treatment
agagattagtgaatccaaaaggcgaccaaacagatcccccgcaccccgctcctgtgctccgctcatggcagagaaccccctgggaaaacgcagcggagaaactctggagatcgaaaccccggcacgcagctaggcgaactgcacgcagctgcaggtcgacagtctaatcaatttcttgtcgcttcagcttctggtgctggtcttcttccagttgcatcctggttacctgtgtcaaggggcggttggtgtctggtgtagttggagggcagagcttcggcggcggcgaagaagaagagcagcagagagactctgctgacactgaccgagggagatatgatgaggaagctgagagagttgctgcagaagagcgacaaccgcgtatgtgccgactgcggcgcacctgatcccaaatgggcatcggctaacattggagtattcatttgcctaaagtgttctggtgttcacagaagcctcgggacacatgtttcaaaggtgctgtcagtcacactagatcaatggacggatgatgagatcaactccatgatagaagttggtggaaactcttatgccaatgctatatatgaagcatttctgccagagggctatcagaagccgcatccagattctagccaagaagagagagctgatttcatcaggtcgaagtatgagttgcaagaattcctgaagccaagcctaaggttagtttccagcaataagggctctttagaggctaccagtaccagctctcgaaaacataaggacaatactgtgtctctttctgctagtttcagcagtgaggctggaatggttgagttcattggaatactaaaagttaaagtgataagagggactaaactagctgtaagagacctgatgagtagtgacccctatattgtactgaccctaggacagcagaaagcaaaaacttctgtgagtaaacgtaatctgaatcctgtttggaatgaagagcttaagctgtcagttccccagcagtacgggcctctgaagcttcaagtgttcgaccacgacatgctatcgaaggatgacgagatgggtgacgcagagattgacctgcagccgatgatcagtgcagctacagcgtttggcgaccctgatctgctcgcggacatgcagatcggcaagtggctcaggtccccagataatgcgctggcaagggacagcgccgtcaatgtcgttggtggcaaggtcaagcaggaggtctctctgaggctgcagaacgtggaatcgggggaggtggaactggagctggagtggataccactcaatcagtagagttcaaatccacctgtaggctatatgtgatgcatgtttcatgtgtgccacacaagtcctgatgctcttgatcatcttcagtttgtcagggtgcctgcagtgttgtagactatctttgcggttgtagaatcagtgtcggagcccggccaccgtgactggttcagcaactctgtacaatgatagtttgaggactcaatgacttgttagtacaagtatgagactgttgtttgc

SEQ ID NO: 4630 - protein, 319 aa, Zea mays subsp. mays
  peptide (1)..(319): Ceres Seq. ID no. 12365477
  misc_feature (3)..(123): Pfam Name: Putative GTPase activating protein for Arf Pfam Description: Putative GTPase activating protein for Arf
  misc_feature (1)..(119): Homolog of NCBI NO: 6648206 NR Description: putative GTPase activating protein [Arabidopsis
  misc_feature (153)..(319): Homolog of NCBI NO: 30680493 NR Description: zinc finger and C2 domain protein, putative
  misc_feature (153)..(319): Homolog of NCBI NO: 6648206 NR Description: putative GTPase activating protein [Arabidopsis
  misc_feature (4)..(319): Homolog of NCBI NO: 19386828 NR Description: putative zinc finger and C2 domain protein
  misc_feature (1)..(28): Homolog of NCBI NO: 7486586 NR Description: hypothetical protein F7J7.100 - Arabidopsis
  misc_feature (27)..(319): Homolog of NCBI NO: 7486586 NR Description: hypothetical protein F7J7.100 - Arabidopsis
  misc_feature (1)..(319): Homolog of NCBI NO: 18412932 NR Description: putative protein
  misc_feature (1)..(319): Homolog of NCBI NO: 25407332 NR Description: hypothetical protein AT4g05330 [imported] -
  misc_feature (1)..(319): Homolog of NCBI NO: 18415638 NR Description: putative protein
  misc_feature (1)..(319): Homolog of NCBI NO: 21594052 NR Description: putative GTPase activating protein [Arabidopsis
MMRKLRELLQKSDNRVCADCGAPDPKWASANIGVFICLKCSGVHRSLGTHVSKVLSVTLDQWTDDEINSMIEVGGNSYANAIYEAFLPEGYQKPHPDSSQEERADFIRSKYELQEFLKPSLRLVSSNKGSLEATSTSSRKHKDNTVSLSASFSSEAGMVEFIGILKVKVIRGTKLAVRDLMSSDPYIVLTLGQQKAKTSVSKRNLNPVWNEELKLSVPQQYGPLKLQVFDHDMLSKDDEMGDAEIDLQPMISAATAFGDPDLLADMQIGKWLRSPDNALARDSAVNVVGGKVKQEVSLRLQNVESGEVELELEWIPLNQ

SEQ ID NO: 4631 - protein, 318 aa, Zea mays subsp. mays
  peptide (1)..(318): Ceres Seq. ID no. 12365478
  misc_feature (2)..(122): Pfam Name: Putative GTPase activating protein for Arf Pfam Description: Putative GTPase activating protein for Arf
  misc_feature (1)..(118): Homolog of NCBI NO: 6648206 NR Description: putative GTPase activating protein [Arabidopsis
  misc_feature (152)..(318): Homolog of NCBI NO: 30680493 NR Description: zinc finger and C2 domain protein, putative
  misc_feature (152)..(318): Homolog of NCBI NO: 6648206 NR Description: putative GTPase activating protein [Arabidopsis
  misc_feature (3)..(318): Homolog of NCBI NO: 19386828 NR Description: putative zinc finger and C2 domain protein
  misc_feature (1)..(27): Homolog of NCBI NO: 7486586 NR Description: hypothetical protein F7J7.100 - Arabidopsis
  misc_feature (26)..(318): Homolog of NCBI NO: 7486586 NR Description: hypothetical protein F7J7.100 - Arabidopsis
  misc_feature (1)..(318): Homolog of NCBI NO: 18412932 NR Description: putative protein
  misc_feature (1)..(318): Homolog of NCBI NO: 25407332 NR Description: hypothetical protein AT4g05330 [imported] -
  misc_feature (1)..(318): Homolog of NCBI NO: 18415638 NR Description: putative protein
  misc_feature (1)..(318): Homolog of NCBI NO: 21594052 NR Description: putative GTPase activating protein [Arabidopsis
MRKLRELLQKSDNRVCADCGAPDPKWASANIGVFICLKCSGVHRSLGTHVSKVLSVTLDQWTDDEINSMIEVGGNSYANAIYEAFLPEGYQKPHPDSSQEERADFIRSKYELQEFLKPSLRLVSSNKGSLEATSTSSRKHKDNTVSLSASFSSEAGMVEFIGILKVKVIRGTKLAVRDLMSSDPYIVLTLGQQKAKTSVSKRNLNPVWNEELKLSVPQQYGPLKLQVFDHDMLSKDDEMGDAEIDLQPMISAATAFGDPDLLADMQIGKWLRSPDNALARDSAVNVVGGKVKQEVSLRLQNVESGEVELELEWIPLNQ

SEQ ID NO: 4632 - protein, 250 aa, Zea mays subsp. mays
  peptide (1)..(250): Ceres Seq. ID no. 12365479
  misc_feature (1)..(54): Pfam Name: Putative GTPase activating protein for Arf Pfam Description: Putative GTPase activating protein for Arf
  misc_feature (1)..(50): Homolog of NCBI NO: 30680493 NR Description: zinc finger and C2 domain protein, putative
  misc_feature (1)..(50): Homolog of NCBI NO: 6648206 NR Description: putative GTPase activating protein [Arabidopsis
  misc_feature (84)..(250): Homolog of NCBI NO: 30680493 NR Description: zinc finger and C2 domain protein, putative
  misc_feature (84)..(250): Homolog of NCBI NO: 6648206 NR Description: putative GTPase activating protein [Arabidopsis
  misc_feature (1)..(250): Homolog of NCBI NO: 19386828 NR Description: putative zinc finger and C2 domain protein
  misc_feature (1)..(250): Homolog of NCBI NO: 7486586 NR Description: hypothetical protein F7J7.100 - Arabidopsis
  misc_feature (1)..(250): Homolog of NCBI NO: 18412932 NR Description: putative protein
  misc_feature (1)..(250): Homolog of NCBI NO: 25407332 NR Description: hypothetical protein AT4g05330 [imported] -
  misc_feature (1)..(250): Homolog of NCBI NO: 18415638 NR Description: putative protein
  misc_feature (1)..(250): Homolog of NCBI NO: 21594052 NR Description: putative GTPase activating protein [Arabidopsis
MIEVGGNSYANAIYEAFLPEGYQKPHPDSSQEERADFIRSKYELQEFLKPSLRLVSSNKGSLEATSTSSRKHKDNTVSLSASFSSEAGMVEFIGILKVKVIRGTKLAVRDLMSSDPYIVLTLGQQKAKTSVSKRNLNPVWNEELKLSVPQQYGPLKLQVFDHDMLSKDDEMGDAEIDLQPMISAATAFGDPDLLADMQIGKWLRSPDNALARDSAVNVVGGKVKQEVSLRLQNVESGEVELELEWIPLNQ

SEQ ID NO: 4633 - DNA, 1419 bp, Zea mays subsp. mays
  misc_feature (1)..(1419): Ceres Seq. ID no. 12383193
  misc_feature: MA Experiment ID: 108527 Result: Up-regulated in Transcription
  misc_feature: MA Experiment 108527 PARAMETER Experiment Name: Zm_5mM_NO_P Parameter: Age (day) Value: 8
  misc_feature: MA Experiment 108527 PARAMETER Experiment Name: Zm_5mM_NO_P Parameter: Organism Value: Zea mays
  misc_feature: MA Experiment 108527 PARAMETER Experiment Name: Zm_5mM_NO_P Parameter: Plant Line Value: 35A19
  misc_feature: MA Experiment 108527 PARAMETER Experiment Name: Zm_5mM_NO_P Parameter: Timepoint (hr) Value: 6
  misc_feature: MA Experiment 108527 PARAMETER Experiment Name: Zm_5mM_NO_P Parameter: Tissue Value: Aerial
  misc_feature: MA Experiment 108527 PARAMETER Experiment Name: Zm_5mM_NO_P Parameter: Treatment Value: 5mM NO vs. No Treatment
  misc_feature: MA Experiment ID: 108535 Result: Down-regulated in Transcription
  misc_feature: MA Experiment 108535 PARAMETER Experiment Name: Zm_Meristem_P Parameter: Age (day) Value: 8
  misc_feature: MA Experiment 108535 PARAMETER Experiment Name: Zm_Meristem_P Parameter: Organism Value: Zea mays
  misc_feature: MA Experiment 108535 PARAMETER Experiment Name: Zm_Meristem_P Parameter: Plant Line Value: 35A19
  misc_feature: MA Experiment 108535 PARAMETER Experiment Name: Zm_Meristem_P Parameter: Tissue Value: Root Meristem vs. Above Root Meristem
  misc_feature: MA Experiment ID: 108556 Result: Up-regulated in Transcription
  misc_feature: MA Experiment 108556 PARAMETER Experiment Name: Zm_Drought_P Parameter: Age (day) Value: 9
  misc_feature: MA Experiment 108556 PARAMETER Experiment Name: Zm_Drought_P Parameter: Organism Value: Zea mays
  misc_feature: MA Experiment 108556 PARAMETER Experiment Name: Zm_Drought_P Parameter: Plant Line Value: 35A19
  misc_feature: MA Experiment 108556 PARAMETER Experiment Name: Zm_Drought_P Parameter: Timepoint (hr) Value: 24
  misc_feature: MA Experiment 108556 PARAMETER Experiment Name: Zm_Drought_P Parameter: Tissue Value: Aerial
  misc_feature: MA Experiment 108556 PARAMETER Experiment Name: Zm_Drought_P Parameter: Treatment Value: Drought vs. No Drought
  misc_feature: MA Experiment ID: 108689 Result: Up-regulated in Transcription
  misc_feature: MA Experiment 108689 PARAMETER Experiment Name: Zm_Drought_Roots_P Parameter: Age (day) Value: 9
  misc_feature: MA Experiment 108689 PARAMETER Experiment Name: Zm_Drought_Roots_P Parameter: Organism Value: Zea mays
  misc_feature: MA Experiment 108689 PARAMETER Experiment Name: Zm_Drought_Roots_P Parameter: Plant Line Value: 35A19
  misc_feature: MA Experiment 108689 PARAMETER Experiment Name: Zm_Drought_Roots_P Parameter: Timepoint (hr) Value: 24
  misc_feature: MA Experiment 108689 PARAMETER Experiment Name: Zm_Drought_Roots_P Parameter: Tissue Value: Roots
  misc_feature: MA Experiment 108689 PARAMETER Experiment Name: Zm_Drought_Roots_P Parameter: Treatment Value: Drought vs. No Drought
  misc_feature: MA Experiment ID: 20000478 Result: Up-regulated in Transcription
  misc_feature: MA Experiment 20000478 PARAMETER Experiment Name: Zm_5mM_SA_P Parameter: Age (day) Value: 11
  misc_feature: MA Experiment 20000478 PARAMETER Experiment Name: Zm_5mM_SA_P Parameter: Organism Value: Zea mays
  misc_feature: MA Experiment 20000478 PARAMETER Experiment Name: Zm_5mM_SA_P Parameter: Plant Line Value: 35A19
  misc_feature: MA Experiment 20000478 PARAMETER Experiment Name: Zm_5mM_SA_P Parameter: Timepoint (hr) Value: 72
  misc_feature: MA Experiment 20000478 PARAMETER Experiment Name: Zm_5mM_SA_P Parameter: Tissue Value: Aerial
  misc_feature: MA Experiment 20000478 PARAMETER Experiment Name: Zm_5mM_SA_P Parameter: Treatment Value: 5mM SA vs. No Treatment
  misc_feature: MA Experiment ID: 20000479 Result: Up-regulated in Transcription
  misc_feature: MA Experiment 20000479 PARAMETER Experiment Name: Zm_Drought_P Parameter: Age (day) Value: 10
  misc_feature: MA Experiment 20000479 PARAMETER Experiment Name: Zm_Drought_P Parameter: Organism Value: Zea mays
  misc_feature: MA Experiment 20000479 PARAMETER Experiment Name: Zm_Drought_P Parameter: Plant Line Value: 35A19
  misc_feature: MA Experiment 20000479 PARAMETER Experiment Name: Zm_Drought_P Parameter: Timepoint (hr) Value: 48
  misc_feature: MA Experiment 20000479 PARAMETER Experiment Name: Zm_Drought_P Parameter: Tissue Value: Aerial
  misc_feature: MA Experiment 20000479 PARAMETER Experiment Name: Zm_Drought_P Parameter: Treatment Value: Drought vs. No Drought
  misc_feature: MA Experiment ID: 20000534 Result: Up-regulated in Transcription
  misc_feature: MA Experiment 20000534 PARAMETER Experiment Name: Zm_Hybrid_Pollen_P Parameter: Age (day) Value: 8
  misc_feature: MA Experiment 20000534 PARAMETER Experiment Name: Zm_Hybrid_Pollen_P Parameter: Organism Value: Zea mays
  misc_feature: MA Experiment 20000534 PARAMETER Experiment Name: Zm_Hybrid_Pollen_P Parameter: Plant Line Value: 35A19
  misc_feature: MA Experiment 20000534 PARAMETER Experiment Name: Zm_Hybrid_Pollen_P Parameter: Tissue Value: Pollen vs. Aerial
gcacgagaccattacctagaacatcctaatcgaaaaattacggacacacgggcaccccgtctcctcttttttctctctgtctcctcaccaaagaaccgcagctaggaacggctcgccacagaagaacgtacggctatgaagacgaggcgcggtgcctgctactcctgccatgcggcgccgggcgagggcccggaggtgcaacgccggaagaggcgcaggacggcggccgaggcatcgccggcggctgccgaagatccaggtgtccgcctgggcgccagagacatgttcgaggatctgcccgacgatctcgtcgtctccatactgagggacgtcgccgcgtccgccggctcgccggccgatctcgccggcgccatgctcacgtgcaagagattcagggagctagtagcgcggagcaaggtggtggtgctcgcgcgggcgtcgccgcggtgcctctcggtgcgcgccaaggcctggtcggacgaggcgcaccggttcctgcagcgctgcgccgacgccggcaacctcgaagcctgctaccttctcggcatgattcggttctactgcctggggagccgcggctcgggcgcggcgctgatggcggcggcggcggtgggcgggcaccgcgaggcgctgtactcgctggccgtgatccagttcaacggcagcggcggcgggaaggacgaccgcgacctccgcgccggagccgcgctgtgcgcgcgcgcggcggcgcggggncacgtgnacgcgctccgngagctggggcactgnctgcaggacggctacggcgtgcgccggtccgtgctggacgggcggngcctnctcatnnaggcaaacgcgcgcgagctcgcggccgcctcggcggcgcacccgtgcctncttctgagcgacttggggtgccacgccggcgaggcgcacgcggccaaccggttcctggtggactggttcgcgtcgcggccgctgggcttgacgcccggcggcaacggcaacggcagcgccgggacggcgggctcggcggaggaggacggcgttggcggtctccggctgtgctcgcaggcgctgtgcgggcggcccgagacgcggcggcacgagttcaggcggtgctcggtgtgcggcgtggtgaactactgctcccgcgcgtgccaggcgctgcactggaggatggcgcacaaggcggagtgcacgcccatggaccggtggctcgacgcggtgcagcccaacgccatcgccaatgcggacgcggcggccccggcgccgtgacgttctccgttactatatatgtcagttagcggccggccgtttctctgttttgccttttgcgtcgttctctgaacctgcgtacgtacatggtttgttggcaaatgctgatgtaacgttcttctggcgcgggcgatacgtagaacataggcagtgaaatttttt

SEQ ID NO: 4634 - protein, 373 aa, Zea mays subsp. mays
  peptide (1)..(373): Ceres Seq. ID no. 12383194
  misc_feature (309)..(348): Pfam Name: MYND finger Pfam Description: MYND finger
  misc_feature (239)..(355): Homolog of NCBI NO: 19386803 NR Description: OJ1485_B09.11 [Oryza sativa (japonica
  misc_feature (2)..(356): Homolog of NCBI NO: 18408746 NR Description: F-box protein family; protein id: At1g67340.1, by cDNA: gi_16209725, supported by cDNA: gi_20260405 [Arabidopsis
  misc_feature (1)..(243): Homolog of NCBI NO: 19386803 NR Description: OJ1485_B09.11 [Oryza sativa (japonica
  misc_feature (51)..(357): Homolog of NCBI NO: 15240674 NR Description: putative protein; protein id: At5g50450.1, by cDNA: gi_20466553 [Arabidopsis thaliana] gb|AAB95234.1~gene_id:MXI22.17~strong similarity to unknown
  misc_feature (200)..(200): Xaa is any aa, unknown or other
  misc_feature (203)..(203): Xaa is any aa, unknown or other
  misc_feature (206)..(206): Xaa is any aa, unknown or other
  misc_feature (211)..(211): Xaa is any aa, unknown or other
  misc_feature (227)..(227): Xaa is any aa, unknown or other
  misc_feature (228)..(228): Xaa is any aa, unknown or other
  misc_feature (230)..(230): Xaa is any aa, unknown or other
  misc_feature (231)..(231): Xaa is any aa, unknown or other
  misc_feature (247)..(247): Xaa is any aa, unknown or other
MKTRRGACYSCHAAPGEGPEVQRRKRRRTAAEASPAAAEDPGVRLGARDMFEDLPDDLVVSILRDVAASAGSPADLAGAMLTCKRFRELVARSKVVVLARASPRCLSVRAKAWSDEAHRFLQRCADAGNLEACYLLGMIRFYCLGSRGSGAALMAAAAVGGHREALYSLAVIQFNGSGGGKDDRDLRAGAALCARAAARXHVXALXELGHXLQDGYGVRRSVLDGRXXLXXANARELAAASAAHPCXLLSDLGCHAGEAHAANRFLVDWFASRPLGLTPGGNGNGSAGTAGSAEEDGVGGLRLCSQALCGRPETRRHEFRRCSVCGVVNYCSRACQALHWRMAHKAECTPMDRWLDAVQPNAIANADAAAPAP

SEQ ID NO: 4635 - protein, 324 aa, Zea mays subsp. mays
  peptide (1)..(324): Ceres Seq. ID no. 12383195
  misc_feature (260)..(299): Pfam Name: MYND finger Pfam Description: MYND finger
  misc_feature (1)..(194): Homolog of NCBI NO: 19386803 NR Description: OJ1485_B09.11 [Oryza sativa (japonica
  misc_feature (190)..(306): Homolog of NCBI NO: 19386803 NR Description: OJ1485_B09.11 [Oryza sativa (japonica
  misc_feature (1)..(307): Homolog of NCBI NO: 18408746 NR Description: F-box protein family; protein id: At1g67340.1, by cDNA: gi_16209725, supported by cDNA: gi_20260405 [Arabidopsis
  misc_feature (2)..(308): Homolog of NCBI NO: 15240674 NR Description: putative protein; protein id: At5g50450.1, by cDNA: gi_20466553 [Arabidopsis thaliana] gb|AAB95234.1~gene_id:MXI22.17~strong similarity to unknown
  misc_feature (151)..(151): Xaa is any aa, unknown or other
  misc_feature (154)..(154): Xaa is any aa, unknown or other
  misc_feature (157)..(157): Xaa is any aa, unknown or other
  misc_feature (162)..(162): Xaa is any aa, unknown or other
  misc_feature (178)..(178): Xaa is any aa, unknown or other
  misc_feature (179)..(179): Xaa is any aa, unknown or other
  misc_feature (181)..(181): Xaa is any aa, unknown or other
  misc_feature (182)..(182): Xaa is any aa, unknown or other
  misc_feature (198)..(198): Xaa is any aa, unknown or other
MFEDLPDDLVVSILRDVAASAGSPADLAGAMLTCKRFRELVARSKVVVLARASPRCLSVRAKAWSDEAHRFLQRCADAGNLEACYLLGMIRFYCLGSRGSGAALMAAAAVGGHREALYSLAVIQFNGSGGGKDDRDLRAGAALCARAAARXHVXALXELGHXLQDGYGVRRSVLDGRXXLXXANARELAAASAAHPCXLLSDLGCHAGEAHAANRFLVDWFASRPLGLTPGGNGNGSAGTAGSAEEDGVGGLRLCSQALCGRPETRRHEFRRCSVCGVVNYCSRACQALHWRMAHKAECTPMDRWLDAVQPNAIANADAAAPAP

SEQ ID NO: 4636 - protein, 294 aa, Zea mays subsp. mays
  peptide (1)..(294): Ceres Seq. ID no. 12383196
  misc_feature (230)..(269): Pfam Name: MYND finger Pfam Description: MYND finger
  misc_feature (1)..(164): Homolog of NCBI NO: 19386803 NR Description: OJ1485_B09.11 [Oryza sativa (japonica
  misc_feature (160)..(276): Homolog of NCBI NO: 19386803 NR Description: OJ1485_B09.11 [Oryza sativa (japonica
  misc_feature (1)..(277): Homolog of NCBI NO: 18408746 NR Description: F-box protein family; protein id: At1g67340.1, by cDNA: gi_16209725, supported by cDNA: gi_20260405 [Arabidopsis
  misc_feature (1)..(278): Homolog of NCBI NO: 15240674 NR Description: putative protein; protein id: At5g50450.1, by cDNA: gi_20466553 [Arabidopsis thaliana] gb|AAB95234.1~gene_id:MXI22.17~strong similarity to unknown
  misc_feature (121)..(121): Xaa is any aa, unknown or other
  misc_feature (124)..(124): Xaa is any aa, unknown or other
  misc_feature (127)..(127): Xaa is any aa, unknown or other
  misc_feature (132)..(132): Xaa is any aa, unknown or other
  misc_feature (148)..(148): Xaa is any aa, unknown or other
  misc_feature (149)..(149): Xaa is any aa, unknown or other
  misc_feature (151)..(151): Xaa is any aa, unknown or other
  misc_feature (152)..(152): Xaa is any aa, unknown or other
  misc_feature (168)..(168): Xaa is any aa, unknown or other
MLTCKRFRELVARSKVVVLARASPRCLSVRAKAWSDEAHRFLQRCADAGNLEACYLLGMIRFYCLGSRGSGAALMAAAAVGGHREALYSLAVIQFNGSGGGKDDRDLRAGAALCARAAARXHVXALXELGHXLQDGYGVRRSVLDGRXXLXXANARELAAASAAHPCXLLSDLGCHAGEAHAANRFLVDWFASRPLGLTPGGNGNGSAGTAGSAEEDGVGGLRLCSQALCGRPETRRHEFRRCSVCGVVNYCSRACQALHWRMAHKAECTPMDRWLDAVQPNAIANADAAAPAP

SEQ ID NO: 4637 - DNA, 1364 bp, Zea mays subsp. mays
  misc_feature (1)..(1364): Ceres Seq. ID no. 12346003
  misc_feature: MA Experiment ID: 108529 Result: Up-regulated in Transcription
  misc_feature: MA Experiment 108529 PARAMETER Experiment Name: Zm_Imbibed_Seeds_P Parameter: Age (day) Value: 5 vs. 2
  misc_feature: MA Experiment 108529 PARAMETER Experiment Name: Zm_Imbibed_Seeds_P Parameter: Organism Value: Zea mays
  misc_feature: MA Experiment 108529 PARAMETER Experiment Name: Zm_Imbibed_Seeds_P Parameter: Plant Line Value: 35A19
  misc_feature: MA Experiment 108529 PARAMETER Experiment Name: Zm_Imbibed_Seeds_P Parameter: Tissue Value: Roots vs. Embryo
  misc_feature: MA Experiment ID: 108535 Result: Down-regulated in Transcription
  misc_feature: MA Experiment 108535 PARAMETER Experiment Name: Zm_Meristem_P Parameter: Age (day) Value: 8
  misc_feature: MA Experiment 108535 PARAMETER Experiment Name: Zm_Meristem_P Parameter: Organism Value: Zea mays
  misc_feature: MA Experiment 108535 PARAMETER Experiment Name: Zm_Meristem_P Parameter: Plant Line Value: 35A19
  misc_feature: MA Experiment 108535 PARAMETER Experiment Name: Zm_Meristem_P Parameter: Tissue Value: Root Meristem vs. Above Root Meristem
  misc_feature: MA Experiment ID: 108543 Result: Up-regulated in Transcription
  misc_feature: MA Experiment ID: 108546 Result: Up-regulated in Transcription
  misc_feature: MA Experiment 108546 PARAMETER Experiment Name: Zm_Imbibed_Seeds_P Parameter: Age (day) Value: 3 vs. 2
  misc_feature: MA Experiment 108546 PARAMETER Experiment Name: Zm_Imbibed_Seeds_P Parameter: Organism Value: Zea mays
  misc_feature: MA Experiment 108546 PARAMETER Experiment Name: Zm_Imbibed_Seeds_P Parameter: Plant Line Value: 35A19
  misc_feature: MA Experiment 108546 PARAMETER Experiment Name: Zm_Imbibed_Seeds_P Parameter: Tissue Value: Roots vs. Embryo
  misc_feature: MA Experiment ID: 20000492 Result: Down-regulated in Transcription
  misc_feature: MA Experiment 20000492 PARAMETER Experiment Name: Zm_Hybrid_Seed_Dev_P Parameter: DAP Value: 12
  misc_feature: MA Experiment 20000492 PARAMETER Experiment Name: Zm_Hybrid_Seed_Dev_P Parameter: Organism Value: Zea mays
  misc_feature: MA Experiment 20000492 PARAMETER Experiment Name: Zm_Hybrid_Seed_Dev_P Parameter: Plant Line Value: 35A19
  misc_feature: MA Experiment 20000492 PARAMETER Experiment Name: Zm_Hybrid_Seed_Dev_P Parameter: Tissue Value: Fert Kernel vs. Unfert Floret
  misc_feature: MA Experiment ID: 20000535 Result: Down-regulated in Transcription
  misc_feature: MA Experiment 20000535 PARAMETER Experiment Name: Zm_Hybrid_Seed_Dev_P Parameter: DAP Value: 30 vs. 12
  misc_feature: MA Experiment 20000535 PARAMETER Experiment Name: Zm_Hybrid_Seed_Dev_P Parameter: Organism Value: Zea mays
  misc_feature: MA Experiment 20000535 PARAMETER Experiment Name: Zm_Hybrid_Seed_Dev_P Parameter: Plant Line Value: 35A19
  misc_feature: MA Experiment 20000535 PARAMETER Experiment Name: Zm_Hybrid_Seed_Dev_P Parameter: Tissue Value: Embryo vs. Unfert Floret
gaaaaaaagaaccgcgagacgcaagccagcaacaacgccgtggaagatgcggtgatcgaggtcgggccagtcgagacgttcctgaatcagatcctgaacgagaagccgatgcgtttcagctccgagcaactggcggcctgcacccggaactactcgtcggagctgggatccggcggctacggcacggtctacaagggtgagctcccgaacggcctgctggtggccgtgaaggtgctcaaggtgtccatgaacaagaaggtgcaggaggcgttcatggcggagatcggcactataggccggacgtaccacgtgcacctcgtccgcctctacggcttctgcttcgacgcgaacaccaaggcactagtctacgagtatttggagaaggggtcgctggagaagtacctttactacggcgacgtggagtgcagcacgagcacgggcaaaaggcttgagtggggaacgctgcacggcatcgccgtcggcacggcgaaggggatcaggtacctgcacgaggagtgccagcagcggatcgtgcactacgacatcaagccggccaacatcctgctcacggccgatgacaccccgaaggtggccgacttcgggctggcacgactgggcgagcgcgaggacacgcacatgtcgctgaccggcggcggccgcgggacgcccgggtacgcggcgccggagctgtggatggcgctgccggcgtcggagaagtgcgacgtgtacagcttcgggatggtgctgttcgagatcctggggcagcgcaggaactacgacccctgccggggcgagagcagagagtggttcccgagatgggtgtgggagaggtacgagcagggtgagattgagtacgtcgtgtcgtgcgatgggatcggggaggcggacatggagaaggcagagatcatgtgcaaggtggcgctgtggtgcgtgcagttccagccggcggcgcggccgacgatgagcagcgtggtgcggatgctggagggggagatgccgattgtcccgcctgtgaacccattccactacgtcatggacagcagcagtggctcaactagctcggggctgtggagtgacacataccaaagtagcagagagaccattggcattgccatagacagtgagctatcggttagccctattgccaagtcgacttgattgtaagatgatgatcggactcatatgttgatgttgatgaaatcctgtactgtttgcttattataaacaaaaaaaggctgaggtttgtaaattagcatcatgcataagaatcaaagatatgcgagttgagtggattagtgtggtgtggcacatgtaggctatccctggctaataagctaagtaccgaaagatagagggcttgtttg

SEQ ID NO: 4638 - protein, 385 aa, Zea mays subsp. mays
  peptide (1)..(385): Ceres Seq. ID no. 12346004
  misc_feature (2)..(385): Homolog of NCBI NO: 39545728 NR Description: OSJNBa0071I13.6 [Oryza sativa (japonica
  misc_feature (2)..(385): Homolog of NCBI NO: 38343972 NR Description: OSJNBb0022F16.11 [Oryza sativa (japonica
  misc_feature (16)..(355): Homolog of NCBI NO: 38343974 NR Description: OSJNBb0022F16.13 [Oryza sativa (japonica
  misc_feature (16)..(367): Homolog of NCBI NO: 38343973 NR Description: OSJNBb0022F16.12 [Oryza sativa (japonica
  misc_feature (14)..(381): Homolog of NCBI NO: 34393334 NR Description: S-receptor kinase PK3 precursor-like protein
  misc_feature (14)..(286): Homolog of NCBI NO: 33146505 NR Description: receptor-like kinase TAK33-like protein [Oryza
  misc_feature (292)..(379): Homolog of NCBI NO: 33146505 NR Description: receptor-like kinase TAK33-like protein [Oryza
  misc_feature (16)..(374): Homolog of NCBI NO: 7434406 NR Description: S-receptor kinase homolog F10M6.60 - Arabidopsis
  misc_feature (16)..(374): Homolog of NCBI NO: 22329085 NR Description: S-receptor kinase -like protein; protein id:
  misc_feature (24)..(341): Homolog of NCBI NO: 34895252 NR Description: putative receptor kinase [Oryza sativa (japonica group)] >gi|11034602|dbj|BAB17126.1| putative receptor kinase
EKKNRETQASNNAVEDAVIEVGPVETFLNQILNEKPMRFSSEQLAACTRNYSSELGSGGYGTVYKGELPNGLLVAVKVLKVSMNKKVQEAFMAEIGTIGRTYHVHLVRLYGFCFDANTKALVYEYLEKGSLEKYLYYGDVECSTSTGKRLEWGTLHGIAVGTAKGIRYLHEECQQRIVHYDIKPANILLTADDTPKVADFGLARLGEREDTHMSLTGGGRGTPGYAAPELWMALPASEKCDVYSFGMVLFEILGQRRNYDPCRGESREWFPRWVWERYEQGEIEYVVSCDGIGEADMEKAEIMCKVALWCVQFQPAARPTMSSVVRMLEGEMPIVPPVNPFHYVMDSSSGSTSSGLWSDTYQSSRETIGIAIDSELSVSPIAKST

SEQ ID NO: 4639 - protein, 349 aa, Zea mays subsp. mays
  peptide (1)..(349): Ceres Seq. ID no. 12346005
  misc_feature (1)..(349): Homolog of NCBI NO: 39545728 NR Description: OSJNBa0071I13.6 [Oryza sativa (japonica
  misc_feature (1)..(349): Homolog of NCBI NO: 38343972 NR Description: OSJNBb0022F16.11 [Oryza sativa (japonica
  misc_feature (1)..(319): Homolog of NCBI NO: 38343974 NR Description: OSJNBb0022F16.13 [Oryza sativa (japonica
  misc_feature (1)..(331): Homolog of NCBI NO: 38343973 NR Description: OSJNBb0022F16.12 [Oryza sativa (japonica
  misc_feature (1)..(345): Homolog of NCBI NO: 34393334 NR Description: S-receptor kinase PK3 precursor-like protein
  misc_feature (1)..(250): Homolog of NCBI NO: 33146505 NR Description: receptor-like kinase TAK33-like protein [Oryza
  misc_feature (256)..(343): Homolog of NCBI NO: 33146505 NR Description: receptor-like kinase TAK33-like protein [Oryza
  misc_feature (1)..(338): Homolog of NCBI NO: 7434406 NR Description: S-receptor kinase homolog F10M6.60 - Arabidopsis
  misc_feature (1)..(338): Homolog of NCBI NO: 22329085 NR Description: S-receptor kinase -like protein; protein id:
  misc_feature (1)..(305): Homolog of NCBI NO: 34895252 NR Description: putative receptor kinase [Oryza sativa (japonica group)] >gi|11034602|dbj|BAB17126.1| putative receptor kinase
MRFSSEQLAACTRNYSSELGSGGYGTVYKGELPNGLLVAVKVLKVSMNKKVQEAFMAEIGTIGRTYHVHLVRLYGFCFDANTKALVYEYLEKGSLEKYLYYGDVECSTSTGKRLEWGTLHGIAVGTAKGIRYLHEECQQRIVHYDIKPANILLTADDTPKVADFGLARLGEREDTHMSLTGGGRGTPGYAAPELWMALPASEKCDVYSFGMVLFEILGQRRNYDPCRGESREWFPRWVWERYEQGEIEYVVSCDGIGEADMEKAEIMCKVALWCVQFQPAARPTMSSVVRMLEGEMPIVPPVNPFHYVMDSSSGSTSSGLWSDTYQSSRETIGIAIDSELSVSPIAKST

SEQ ID NO: 4640 - protein, 303 aa, Zea mays subsp. mays
  peptide (1)..(303): Ceres Seq. ID no. 12346006
  misc_feature (1)..(303): Homolog of NCBI NO: 39545728 NR Description: OSJNBa0071I13.6 [Oryza sativa (japonica
  misc_feature (1)..(303): Homolog of NCBI NO: 38343972 NR Description: OSJNBb0022F16.11 [Oryza sativa (japonica
  misc_feature (1)..(273): Homolog of NCBI NO: 38343974 NR Description: OSJNBb0022F16.13 [Oryza sativa (japonica
  misc_feature (1)..(285): Homolog of NCBI NO: 38343973 NR Description: OSJNBb0022F16.12 [Oryza sativa (japonica
  misc_feature (1)..(299): Homolog of NCBI NO: 34393334 NR Description: S-receptor kinase PK3 precursor-like protein
  misc_feature (1)..(204): Homolog of NCBI NO: 33146505 NR Description: receptor-like kinase TAK33-like protein [Oryza
  misc_feature (210)..(297): Homolog of NCBI NO: 33146505 NR Description: receptor-like kinase TAK33-like protein [Oryza
  misc_feature (1)..(292): Homolog of NCBI NO: 7434406 NR Description: S-receptor kinase homolog F10M6.60 - Arabidopsis
  misc_feature (1)..(292): Homolog of NCBI NO: 22329085 NR Description: S-receptor kinase -like protein; protein id:
  misc_feature (1)..(259): Homolog of NCBI NO: 34895252 NR Description: putative receptor kinase [Oryza sativa (japonica group)] >gi|11034602|dbj|BAB17126.1| putative receptor kinase
MNKKVQEAFMAEIGTIGRTYHVHLVRLYGFCFDANTKALVYEYLEKGSLEKYLYYGDVECSTSTGKRLEWGTLHGIAVGTAKGIRYLHEECQQRIVHYDIKPANILLTADDTPKVADFGLARLGEREDTHMSLTGGGRGTPGYAAPELWMALPASEKCDVYSFGMVLFEILGQRRNYDPCRGESREWFPRWVWERYEQGEIEYVVSCDGIGEADMEKAEIMCKVALWCVQFQPAARPTMSSVVRMLEGEMPIVPPVNPFHYVMDSSSGSTSSGLWSDTYQSSRETIGIAIDSELSVSPIAKST

SEQ ID NO: 4641 - DNA, 1180 bp, Zea mays subsp. mays
  misc_feature (1)..(1180): Ceres Seq. ID no. 12363224
  misc_feature: MA Experiment ID: 108535 Result: Down-regulated in Transcription
  misc_feature: MA Experiment 108535 PARAMETER Experiment Name: Zm_Meristem_P Parameter: Age (day) Value: 8
  misc_feature: MA Experiment 108535 PARAMETER Experiment Name: Zm_Meristem_P Parameter: Organism Value: Zea mays
  misc_feature: MA Experiment 108535 PARAMETER Experiment Name: Zm_Meristem_P Parameter: Plant Line Value: 35A19
  misc_feature: MA Experiment 108535 PARAMETER Experiment Name: Zm_Meristem_P Parameter: Tissue Value: Root Meristem vs. Above Root Meristem
  misc_feature: MA Experiment ID: 108543 Result: Up-regulated in Transcription
  misc_feature: MA Experiment ID: 108687 Result: Down-regulated in Transcription
  misc_feature: MA Experiment 108687 PARAMETER Experiment Name: Zm_Embryos-Flowers__P Parameter: Tissue Value: Embryo vs. Aerial+
  misc_feature: MA Experiment ID: 20000477 Result: Down-regulated in Transcription
  misc_feature: MA Experiment 20000477 PARAMETER Experiment Name: Zm_5mM_SA_P Parameter: Age (day) Value: 10
  misc_feature: MA Experiment 20000477 PARAMETER Experiment Name: Zm_5mM_SA_P Parameter: Organism Value: Zea mays
  misc_feature: MA Experiment 20000477 PARAMETER Experiment Name: Zm_5mM_SA_P Parameter: Plant Line Value: 35A19
  misc_feature: MA Experiment 20000477 PARAMETER Experiment Name: Zm_5mM_SA_P Parameter: Timepoint (hr) Value: 48
  misc_feature: MA Experiment 20000477 PARAMETER Experiment Name: Zm_5mM_SA_P Parameter: Tissue Value: Aerial
  misc_feature: MA Experiment 20000477 PARAMETER Experiment Name: Zm_5mM_SA_P Parameter: Treatment Value: 5mM SA vs. No Treatment
  misc_feature: MA Experiment ID: 20000478 Result: Down-regulated in Transcription
  misc_feature: MA Experiment 20000478 PARAMETER Experiment Name: Zm_5mM_SA_P Parameter: Age (day) Value: 11
  misc_feature: MA Experiment 20000478 PARAMETER Experiment Name: Zm_5mM_SA_P Parameter: Organism Value: Zea mays
  misc_feature: MA Experiment 20000478 PARAMETER Experiment Name: Zm_5mM_SA_P Parameter: Plant Line Value: 35A19
  misc_feature: MA Experiment 20000478 PARAMETER Experiment Name: Zm_5mM_SA_P Parameter: Timepoint (hr) Value: 72
  misc_feature: MA Experiment 20000478 PARAMETER Experiment Name: Zm_5mM_SA_P Parameter: Tissue Value: Aerial
  misc_feature: MA Experiment 20000478 PARAMETER Experiment Name: Zm_5mM_SA_P Parameter: Treatment Value: 5mM SA vs. No Treatment
  misc_feature: MA Experiment ID: 20000479 Result: Down-regulated in Transcription
  misc_feature: MA Experiment 20000479 PARAMETER Experiment Name: Zm_Drought_P Parameter: Age (day) Value: 10
  misc_feature: MA Experiment 20000479 PARAMETER Experiment Name: Zm_Drought_P Parameter: Organism Value: Zea mays
  misc_feature: MA Experiment 20000479 PARAMETER Experiment Name: Zm_Drought_P Parameter: Plant Line Value: 35A19
  misc_feature: MA Experiment 20000479 PARAMETER Experiment Name: Zm_Drought_P Parameter: Timepoint (hr) Value: 48
  misc_feature: MA Experiment 20000479 PARAMETER Experiment Name: Zm_Drought_P Parameter: Tissue Value: Aerial
  misc_feature: MA Experiment 20000479 PARAMETER Experiment Name: Zm_Drought_P Parameter: Treatment Value: Drought vs. No Drought
  misc_feature: MA Experiment ID: 20000492 Result: Down-regulated in Transcription
  misc_feature: MA Experiment 20000492 PARAMETER Experiment Name: Zm_Hybrid_Seed_Dev_P Parameter: DAP Value: 12
  misc_feature: MA Experiment 20000492 PARAMETER Experiment Name: Zm_Hybrid_Seed_Dev_P Parameter: Organism Value: Zea mays
  misc_feature: MA Experiment 20000492 PARAMETER Experiment Name: Zm_Hybrid_Seed_Dev_P Parameter: Plant Line Value: 35A19
  misc_feature: MA Experiment 20000492 PARAMETER Experiment Name: Zm_Hybrid_Seed_Dev_P Parameter: Tissue Value: Fert Kernel vs. Unfert Floret
  misc_feature: MA Experiment ID: 20000535 Result: Down-regulated in Transcription
  misc_feature: MA Experiment 20000535 PARAMETER Experiment Name: Zm_Hybrid_Seed_Dev_P Parameter: DAP Value: 30 vs. 12
  misc_feature: MA Experiment 20000535 PARAMETER Experiment Name: Zm_Hybrid_Seed_Dev_P Parameter: Organism Value: Zea mays
  misc_feature: MA Experiment 20000535 PARAMETER Experiment Name: Zm_Hybrid_Seed_Dev_P Parameter: Plant Line Value: 35A19
  misc_feature: MA Experiment 20000535 PARAMETER Experiment Name: Zm_Hybrid_Seed_Dev_P Parameter: Tissue Value: Embryo vs. Unfert Floret
gcacgagaccattacctagaacatcctaatcaaaaaaaggggcggcattcagtgattcagccgccagtcccgctcgtctctgccaagtcccgcgcgctcgagcatcgatcagccgctggcgccgcgacgagcgacgacgccgcgccagtcgcgcgcagatggccgccgtctcgctcctgcgagccgcggcgctcgggctggttgtcctcgcgtcggcgctgccgtcggctcggccgtggagcaaggagggtcacgtgctcacatgccaaatcgcgcagggtctgctggagcctgacgccgcgcacgccgtgcggaacctgctcccggacgacgccggcggcgacctgtccggcgctgtgcgtgtggccggaccaggtgaggcactggtacaggtacatgtggacgggcccgctccacttcatcgacacccctgacgaggcctgcagcttcgactactcgagggactgccacggccccgacggcgccaaggacatgtgcgtcgccggcgccatcgccaacttcacgtcccagctgctgcactacaggcacggcagcgccgacaggagatacaacctgactgaagcccttctgttcctgtcgcacttcatgggagatgttcatcagccaatgcacgtggggttcaccagcgaccaaggcggcaactccatagagctgcggtggttccggcacaaatccaacctccaccacgtgtgggacagggagatcatacagacggctctcgccgacttctacggcaaggacatggacgccttccgcaagcagctcgagcacaacctcaccaagggtacctggtccgacgatgtatcggcttggacagactgccaagacctctcgtcttgcccaaccaagtacgcgaccgagagcataggcctggcgtgcaaatgggcgtacagcggcgtccgcgaaggggagacactgtccgacgactactttgactcgaggctgccgatcgtgtcgcggcggatcgcgcagggcggggtgcggctggccatgttcctcaaccggatcttcggcgcgcacaaccgcgacgtgccgccgccgtcttcttgattgatggatggacccgatcccgatctgcctgtcgcgtcacagactcgaagtctaatctaatccatgtggttgtagtgtctttgcttctttttaagtaaataagtaattc

SEQ ID NO: 4642 - protein, 356 aa, Zea mays subsp. mays
  peptide (1)..(356): Ceres Seq. ID no. 12363225
  misc_feature (118)..(355): Homolog of NCBI NO: 3551956 NR Description: senescence-associated protein 6 [Hemerocallis
  misc_feature (118)..(346): Homolog of NCBI NO: 3242447 NR Description: endonuclease [Zinnia elegans]
  misc_feature (118)..(346): Homolog of NCBI NO: 7229711 NR Description: CEL I mismatch endonuclease [Apium graveolens]
  misc_feature (88)..(344): Homolog of NCBI NO: 15220307 NR Description: bifunctional nuclease bfn1; protein id: supported by cDNA: 643., supported by cDNA: gi_14532783, by cDNA: gi_19310736 [Arabidopsis thaliana]
  misc_feature (88)..(344): Homolog of NCBI NO: 4099831 NR Description: bifunctional nuclease bfn1 [Arabidopsis thaliana]
  misc_feature (233)..(355): Homolog of NCBI NO: 39545743 NR Description: OSJNBb0034I13.4 [Oryza sativa (japonica
  misc_feature (118)..(143): Homolog of NCBI NO: 39545743 NR Description: OSJNBb0034I13.4 [Oryza sativa (japonica
  misc_feature (188)..(208): Homolog of NCBI NO: 39545743 NR Description: OSJNBb0034I13.4 [Oryza sativa (japonica
  misc_feature (118)..(345): Homolog of NCBI NO: 15221343 NR Description: putative bifunctional nuclease; protein id: supported by cDNA: 256130. [Arabidopsis thaliana]
  misc_feature (118)..(345): Homolog of NCBI NO: 21554516 NR Description: putative bifunctional nuclease [Arabidopsis
ARDHYLEHPNQKKGRHSVIQPPVPLVSAKSRALEHRSAAGAATSDDAAPVARRWPPSRSCEPRRSGWLSSRRRCRRLGRGARRVTCSHAKSRRVCWSLTPRTPCGTCSRTTPAATCPALCVWPDQVRHWYRYMWTGPLHFIDTPDEACSFDYSRDCHGPDGAKDMCVAGAIANFTSQLLHYRHGSADRRYNLTEALLFLSHFMGDVHQPMHVGFTSDQGGNSIELRWFRHKSNLHHVWDREIIQTALADFYGKDMDAFRKQLEHNLTKGTWSDDVSAWTDCQDLSSCPTKYATESIGLACKWAYSGVREGETLSDDYFDSRLPIVSRRIAQGGVRLAMFLNRIFGAHNRDVPPPSS

SEQ ID NO: 4643 - protein, 224 aa, Zea mays subsp. mays
  peptide (1)..(224): Ceres Seq. ID no. 12363226
  misc_feature (1)..(223): Homolog of NCBI NO: 3551956 NR Description: senescence-associated protein 6 [Hemerocallis
  misc_feature (1)..(214): Homolog of NCBI NO: 3242447 NR Description: endonuclease [Zinnia elegans]
  misc_feature (1)..(214): Homolog of NCBI NO: 7229711 NR Description: CEL I mismatch endonuclease [Apium graveolens]
  misc_feature (1)..(212): Homolog of NCBI NO: 15220307 NR Description: bifunctional nuclease bfn1; protein id: supported by cDNA: 643., supported by cDNA: gi_14532783, by cDNA: gi_19310736 [Arabidopsis thaliana]
  misc_feature (1)..(212): Homolog of NCBI NO: 4099831 NR Description: bifunctional nuclease bfn1 [Arabidopsis thaliana]
  misc_feature (101)..(223): Homolog of NCBI NO: 39545743 NR Description: OSJNBb0034I13.4 [Oryza sativa (japonica
  misc_feature (1)..(11): Homolog of NCBI NO: 39545743 NR Description: OSJNBb0034I13.4 [Oryza sativa (japonica
  misc_feature (56)..(76): Homolog of NCBI NO: 39545743 NR Description: OSJNBb0034I13.4 [Oryza sativa (japonica
  misc_feature (1)..(213): Homolog of NCBI NO: 15221343 NR Description: putative bifunctional nuclease; protein id: supported by cDNA: 256130. [Arabidopsis thaliana]
  misc_feature (1)..(213): Homolog of NCBI NO: 21554516 NR Description: putative bifunctional nuclease [Arabidopsis
MWTGPLHFIDTPDEACSFDYSRDCHGPDGAKDMCVAGAIANFTSQLLHYRHGSADRRYNLTEALLFLSHFMGDVHQPMHVGFTSDQGGNSIELRWFRHKSNLHHVWDREIIQTALADFYGKDMDAFRKQLEHNLTKGTWSDDVSAWTDCQDLSSCPTKYATESIGLACKWAYSGVREGETLSDDYFDSRLPIVSRRIAQGGVRLAMFLNRIFGAHNRDVPPPSS

SEQ ID NO: 4644 - protein, 192 aa, Zea mays subsp. mays
  peptide (1)..(192): Ceres Seq. ID no. 12363227
  misc_feature (1)..(191): Homolog of NCBI NO: 3551956 NR Description: senescence-associated protein 6 [Hemerocallis
  misc_feature (1)..(182): Homolog of NCBI NO: 3242447 NR Description: endonuclease [Zinnia elegans]
  misc_feature (1)..(182): Homolog of NCBI NO: 7229711 NR Description: CEL I mismatch endonuclease [Apium graveolens]
  misc_feature (1)..(180): Homolog of NCBI NO: 15220307 NR Description: bifunctional nuclease bfn1; protein id: supported by cDNA: 643., supported by cDNA: gi_14532783, by cDNA: gi_19310736 [Arabidopsis thaliana]
  misc_feature (1)..(180): Homolog of NCBI NO: 4099831 NR Description: bifunctional nuclease bfn1 [Arabidopsis thaliana]
  misc_feature (69)..(191): Homolog of NCBI NO: 39545743 NR Description: OSJNBb0034I13.4 [Oryza sativa (japonica
  misc_feature (24)..(44): Homolog of NCBI NO: 39545743 NR Description: OSJNBb0034I13.4 [Oryza sativa (japonica
  misc_feature (1)..(181): Homolog of NCBI NO: 15221343 NR Description: putative bifunctional nuclease; protein id: supported by cDNA: 256130. [Arabidopsis thaliana]
  misc_feature (1)..(181): Homolog of NCBI NO: 21554516 NR Description: putative bifunctional nuclease [Arabidopsis
  misc_feature (1)..(181): Homolog of NCBI NO: 4099833 NR Description: bifunctional nuclease [Zinnia elegans]
MCVAGAIANFTSQLLHYRHGSADRRYNLTEALLFLSHFMGDVHQPMHVGFTSDQGGNSIELRWFRHKSNLHHVWDREIIQTALADFYGKDMDAFRKQLEHNLTKGTWSDDVSAWTDCQDLSSCPTKYATESIGLACKWAYSGVREGETLSDDYFDSRLPIVSRRIAQGGVRLAMFLNRIFGAHNRDVPPPSS

SEQ ID NO: 4645 - DNA, 683 bp, Zea mays subsp. mays
  misc_feature (1)..(683): Ceres Seq. ID no. 12346028
  misc_feature: MA Experiment ID: 108528 Result: Down-regulated in Transcription
  misc_feature: MA Experiment 108528 PARAMETER Experiment Name: Zm_Imbibed_Seeds_P Parameter: Age (day) Value: 5 vs. 2
  misc_feature: MA Experiment 108528 PARAMETER Experiment Name: Zm_Imbibed_Seeds_P Parameter: Organism Value: Zea mays
  misc_feature: MA Experiment 108528 PARAMETER Experiment Name: Zm_Imbibed_Seeds_P Parameter: Plant Line Value: 35A19
  misc_feature: MA Experiment 108528 PARAMETER Experiment Name: Zm_Imbibed_Seeds_P Parameter: Tissue Value: Aerial vs. Embryo
  misc_feature: MA Experiment ID: 108529 Result: Down-regulated in Transcription
  misc_feature: MA Experiment 108529 PARAMETER Experiment Name: Zm_Imbibed_Seeds_P Parameter: Age (day) Value: 5 vs. 2
  misc_feature: MA Experiment 108529 PARAMETER Experiment Name: Zm_Imbibed_Seeds_P Parameter: Organism Value: Zea mays
  misc_feature: MA Experiment 108529 PARAMETER Experiment Name: Zm_Imbibed_Seeds_P Parameter: Plant Line Value: 35A19
  misc_feature: MA Experiment 108529 PARAMETER Experiment Name: Zm_Imbibed_Seeds_P Parameter: Tissue Value: Roots vs. Embryo
  misc_feature: MA Experiment ID: 108530 Result: Down-regulated in Transcription
  misc_feature: MA Experiment 108530 PARAMETER Experiment Name: Zm_Imbibed_Seeds_P Parameter: Age (day) Value: 6 vs. 2
  misc_feature: MA Experiment 108530 PARAMETER Experiment Name: Zm_Imbibed_Seeds_P Parameter: Organism Value: Zea mays
  misc_feature: MA Experiment 108530 PARAMETER Experiment Name: Zm_Imbibed_Seeds_P Parameter: Plant Line Value: 35A19
  misc_feature: MA Experiment 108530 PARAMETER Experiment Name: Zm_Imbibed_Seeds_P Parameter: Tissue Value: Aerial vs. Embryo
  misc_feature: MA Experiment ID: 108535 Result: Down-regulated in Transcription
  misc_feature: MA Experiment 108535 PARAMETER Experiment Name: Zm_Meristem_P Parameter: Age (day) Value: 8
  misc_feature: MA Experiment 108535 PARAMETER Experiment Name: Zm_Meristem_P Parameter: Organism Value: Zea mays
  misc_feature: MA Experiment 108535 PARAMETER Experiment Name: Zm_Meristem_P Parameter: Plant Line Value: 35A19
  misc_feature: MA Experiment 108535 PARAMETER Experiment Name: Zm_Meristem_P Parameter: Tissue Value: Root Meristem vs. Above Root Meristem
  misc_feature: MA Experiment ID: 108536 Result: Up-regulated in Transcription
  misc_feature: MA Experiment 108536 PARAMETER Experiment Name: Zm_Meristem_P Parameter: Age (day) Value: 8
  misc_feature: MA Experiment 108536 PARAMETER Experiment Name: Zm_Meristem_P Parameter: Organism Value: Zea mays
  misc_feature: MA Experiment 108536 PARAMETER Experiment Name: Zm_Meristem_P Parameter: Plant Line Value: 35A19
  misc_feature: MA Experiment 108536 PARAMETER Experiment Name: Zm_Meristem_P Parameter: Tissue Value: Shoot Meristem vs. Above Shoot Meristem
  misc_feature: MA Experiment ID: 108543 Result: Down-regulated in Transcription
  misc_feature: MA Experiment ID: 108544 Result: Down-regulated in Transcription
  misc_feature: MA Experiment ID: 108547 Result: Down-regulated in Transcription
  misc_feature: MA Experiment 108547 PARAMETER Experiment Name: Zm_Imbibed_Seeds_P Parameter: Age (day) Value: 4 vs. 2
  misc_feature: MA Experiment 108547 PARAMETER Experiment Name: Zm_Imbibed_Seeds_P Parameter: Organism Value: Zea mays
  misc_feature: MA Experiment 108547 PARAMETER Experiment Name: Zm_Imbibed_Seeds_P Parameter: Plant Line Value: 35A19
  misc_feature: MA Experiment 108547 PARAMETER Experiment Name: Zm_Imbibed_Seeds_P Parameter: Tissue Value: Aerial vs. Embryo
  misc_feature: MA Experiment ID: 108599 Result: Up-regulated in Transcription
  misc_feature: MA Experiment 108599 PARAMETER Experiment Name: Zm_RT1_P Parameter: Age (day) Value: 11
  misc_feature: MA Experiment 108599 PARAMETER Experiment Name: Zm_RT1_P Parameter: Organism Value: Zea mays
  misc_feature: MA Experiment 108599 PARAMETER Experiment Name: Zm_RT1_P Parameter: Plant Line Value: rt1 mut vs. rt1 wt
  misc_feature: MA Experiment 108599 PARAMETER Experiment Name: Zm_RT1_P Parameter: Tissue Value: Roots
  misc_feature: MA Experiment ID: 108688 Result: Down-regulated in Transcription
  misc_feature: MA Experiment 108688 PARAMETER Experiment Name: Zm_Embryos-Flowers__P Parameter: Tissue Value: Immature Flowers vs. Aerial+
  misc_feature: MA Experiment ID: 20000492 Result: Up-regulated in Transcription
  misc_feature: MA Experiment 20000492 PARAMETER Experiment Name: Zm_Hybrid_Seed_Dev_P Parameter: DAP Value: 12
  misc_feature: MA Experiment 20000492 PARAMETER Experiment Name: Zm_Hybrid_Seed_Dev_P Parameter: Organism Value: Zea mays
  misc_feature: MA Experiment 20000492 PARAMETER Experiment Name: Zm_Hybrid_Seed_Dev_P Parameter: Plant Line Value: 35A19
  misc_feature: MA Experiment 20000492 PARAMETER Experiment Name: Zm_Hybrid_Seed_Dev_P Parameter: Tissue Value: Fert Kernel vs. Unfert Floret
  misc_feature: MA Experiment ID: 20000535 Result: Up-regulated in Transcription
  misc_feature: MA Experiment 20000535 PARAMETER Experiment Name: Zm_Hybrid_Seed_Dev_P Parameter: DAP Value: 30 vs. 12
  misc_feature: MA Experiment 20000535 PARAMETER Experiment Name: Zm_Hybrid_Seed_Dev_P Parameter: Organism Value: Zea mays
  misc_feature: MA Experiment 20000535 PARAMETER Experiment Name: Zm_Hybrid_Seed_Dev_P Parameter: Plant Line Value: 35A19
  misc_feature: MA Experiment 20000535 PARAMETER Experiment Name: Zm_Hybrid_Seed_Dev_P Parameter: Tissue Value: Embryo vs. Unfert Floret
acgcatccgcgaaatccaagagcagcagcagcagcagaccaagatcgagggagggaggaagacagacagacagacagagagatggagcggatgagctcgtcggtgcagtcctgggtggaggaacacaagctctcgtccatcggagccgtgtgggcgacggcggtgggcgcgtccgtggcgtacagccggcggagggcgccggcgcgggccacgagcctgcgcctcatccacgccaggatgcacgcccaggcgctcacgctcgccgtgctcgggggagccgcgctcgcgcaccgctattacggcagcagcgagaggaggcagaggcaggaggacctggactacggcttcaaatcccagctgccgccggccaccgacgccgagggcaacgagaacgagcgctggagctggtagtggcagggcagactagcagtgagtgaccagtgagccttcagatgcatacatcagatcagagagaaggaaggaagagggacaataaatagattaattagtactagtagcaataataataattgcatgcctgtttgccaatcaatgatacatgacgtggcgcctgatcctgttcgtcacggcccataaacccaggaagcagctagcccatgtatgtgtggcctgttatgcgttaccgtacttcgttttcactcgttaatagtactctagatttc

SEQ ID NO: 4646 - protein, 144 aa, Zea mays subsp. mays
  peptide (1)..(144): Ceres Seq. ID no. 12346029
ASAKSKSSSSSRPRSREGGRQTDRQRDGADELVGAVLGGGTQALVHRSRVGDGGGRVRGVQPAEGAGAGHEPAPHPRQDARPGAHARRARGSRARAPLLRQQREEAEAGGPGLRLQIPAAAGHRRRGQRERALELVVAGQTSSE

SEQ ID NO: 4647 - protein, 136 aa, Zea mays subsp. mays
  peptide (1)..(136): Ceres Seq. ID no. 12346030
  misc_feature (33)..(94): Pfam Name: Hypoxia induced protein conserved region Pfam Description: Hypoxia induced protein conserved region
  misc_feature (33)..(100): Homolog of NCBI NO: 15241035 NR Description: putative protein; protein id: At5g27760.1, by cDNA: 108472. [Arabidopsis thaliana] unknown [Arabidopsis thaliana] >gi|28393673|gb|AAO42249.1|
  misc_feature (27)..(108): Homolog of NCBI NO: 15230007 NR Description: unknown protein; protein id: At3g05550.1 thaliana] >gi|6714455|gb|AAF26142.1|AC011620_18 unknown protein
  misc_feature (28)..(67): Homolog of NCBI NO: 3282394 NR Description: anaerobically inducible early gene 2 [Oryza
THPRNPRAAAAADQDRGREEDRQTDREMERMSSSVQSWVEEHKLSSIGAVWATAVGASVAYSRRRAPARATSLRLIHARMHAQALTLAVLGGAALAHRYYGSSERRQRQEDLDYGFKSQLPPATDAEGNENERWSW

SEQ ID NO: 4648 - protein, 109 aa, Zea mays subsp. mays
  peptide (1)..(109): Ceres Seq. ID no. 12346031
  misc_feature (6)..(67): Pfam Name: Hypoxia induced protein conserved region Pfam Description: Hypoxia induced protein conserved region
  misc_feature (6)..(73): Homolog of NCBI NO: 15241035 NR Description: putative protein; protein id: At5g27760.1, by cDNA: 108472. [Arabidopsis thaliana] unknown [Arabidopsis thaliana] >gi|28393673|gb|AAO42249.1|
  misc_feature (1)..(81): Homolog of NCBI NO: 15230007 NR Description: unknown protein; protein id: At3g05550.1 thaliana] >gi|6714455|gb|AAF26142.1|AC011620_18 unknown protein
  misc_feature (1)..(40): Homolog of NCBI NO: 3282394 NR Description: anaerobically inducible early gene 2 [Oryza
MERMSSSVQSWVEEHKLSSIGAVWATAVGASVAYSRRRAPARATSLRLIHARMHAQALTLAVLGGAALAHRYYGSSERRQRQEDLDYGFKSQLPPATDAEGNENERWSW

SEQ ID NO: 4649 - DNA, 1448 bp, Zea mays subsp. mays
  misc_feature (1)..(1448): Ceres Seq. ID no. 12373281
  misc_feature: MA Experiment ID: 108556 Result: Down-regulated in Transcription
  misc_feature: MA Experiment 108556 PARAMETER Experiment Name: Zm_Drought_P Parameter: Age (day) Value: 9
  misc_feature: MA Experiment 108556 PARAMETER Experiment Name: Zm_Drought_P Parameter: Organism Value: Zea mays
  misc_feature: MA Experiment 108556 PARAMETER Experiment Name: Zm_Drought_P Parameter: Plant Line Value: 35A19
  misc_feature: MA Experiment 108556 PARAMETER Experiment Name: Zm_Drought_P Parameter: Timepoint (hr) Value: 24
  misc_feature: MA Experiment 108556 PARAMETER Experiment Name: Zm_Drought_P Parameter: Tissue Value: Aerial
  misc_feature: MA Experiment 108556 PARAMETER Experiment Name: Zm_Drought_P Parameter: Treatment Value: Drought vs. No Drought
  misc_feature: MA Experiment ID: 20000535 Result: Down-regulated in Transcription
  misc_feature: MA Experiment 20000535 PARAMETER Experiment Name: Zm_Hybrid_Seed_Dev_P Parameter: DAP Value: 30 vs. 12
  misc_feature: MA Experiment 20000535 PARAMETER Experiment Name: Zm_Hybrid_Seed_Dev_P Parameter: Organism Value: Zea mays
  misc_feature: MA Experiment 20000535 PARAMETER Experiment Name: Zm_Hybrid_Seed_Dev_P Parameter: Plant Line Value: 35A19
  misc_feature: MA Experiment 20000535 PARAMETER Experiment Name: Zm_Hybrid_Seed_Dev_P Parameter: Tissue Value: Embryo vs. Unfert Floret
atatccccgcagtttctagctcgattccccaaccgccgtgcttccgctctcgcaccgcgtcttccttgttcgtgtgctccttcctcagacccaggctcttcccgagtccgaatccgagtctgagatccagatccgcgctcagatccatcgctggggggcgccatgaacccgacgcgccccgcgcaggcgtcgttccgcgaccgtaccaacgagttccgcgccgcagttgagagcgcgcgccgccacgctgcaccttcctcgtcgtcggcccccaccgcggcgagcagcagctctaccgggtccctcgacgggatgatctcggccacgtcggctcgctcggagttcaacaaccgcgcgtccaagatcgggctcgggatccaccagacctcccagaagctagcccgccttgccaaattggcaaagagaacgtctgtttttgatgatcctacattagagattcaagagctgacctcagttatcaaaaaggatatcacggctttgaatactgctgtcgtagacctacaagctctctgcaattcacaaaatgagagtggcagtctctccaaggacacaacaaaccattccactacagtcgtggacaaccttaaaaatcgtctgatgagtgcaacaaaagaatttaaagaagttcttaccatgcgaaccgagaatttgaaggttcatgaaaatagaaggcaaatattttcttcgtcagctgcaaaggatgagtcaaatccattcatccgtcaacgaccccttgttgctagggatccatcggagtcctctgtgcccccagcaccatgggccagcgactctgcatctaccccactattccagaggaagaagactaatggagatcatggagcatcatcatcatctcagcctttcgtgcagcagcagcaattggcagtacaacaggacagttacatgcagagcagagctgaagctctacaaaatgtggaatcaacaatccatgagctgagcaacatctttacacagttggcaaccatggtttctcaacagggagagctagcaatcagaatcgacgagaacatggaggaaaccgtggctaacgtggagggagcgcagggccagctcctgaagtacctcaacagcatttcgtccaacaggtggctgatgatgaagatattctttgtgctgatggtgttcctcatgatcttcatattcttcgtcgcttgaccttctgcaatcattctgcccgagacgctctggctgctaaacgcatagcattcttttatttttaactcatactacaccgtgtacacaattttcacccatggatgatgagcagagtcgttcacccttttgtggtcatgtaaatcgggaggagttccagtacttaagtttactcttgattggtaatatctccactgtatttgatgtatcagtatgctgaacagtaatagtaataggcaggtggtagcagtgtt

SEQ ID NO: 4650 - protein, 344 aa, Zea mays subsp. mays
  peptide (1)..(344): Ceres Seq. ID no. 12373282
  misc_feature (257)..(319): Pfam Name: SNARE domain Pfam Description: SNARE domain
  misc_feature (1)..(344): Homolog of NCBI NO: 34906154 NR Description: putative t-SNARE SED5 [Oryza sativa (japonica
  misc_feature (5)..(344): Homolog of NCBI NO: 30687459 NR Description: syntaxin of plants SYP32 [Arabidopsis thaliana]
  misc_feature (9)..(344): Homolog of NCBI NO: 15239228 NR Description: syntaxin SYP31; protein id: At5g05760.1, by cDNA: gi_15809833, supported by cDNA: gi_17978872, supported cDNA: gi_2981438 [Arabidopsis thaliana]
  misc_feature (9)..(344): Homolog of NCBI NO: 2981439 NR Description: syntaxin of plants 31 [Arabidopsis thaliana]
  misc_feature (10)..(340): Homolog of NCBI NO: 40747582 NR Description: hypothetical protein AN9526.2 [Aspergillus
  misc_feature (10)..(340): Homolog of NCBI NO: 32490453 NR Description: syntaxin homologue [Aspergillus oryzae]
  misc_feature (40)..(344): Homolog of NCBI NO: 20148780 NR Description: syntaxin 5 [Phytophthora sojae]
  misc_feature (11)..(344): Homolog of NCBI NO: 28829569 NR Description: similar to syntaxin 5 [Schizosaccharomyces pombe]
  misc_feature (59)..(344): Homolog of NCBI NO: 542593 NR Description: SED5 protein - fruit fly (Drosophila (fragment) >gi|467559|emb|CAA55064.1| SED5 [Drosophila >gi|7287964|gb|AAF45002.1|AE003406_207 symbol=Sed5;
  misc_feature (59)..(344): Homolog of NCBI NO: 24584581 NR Description: Syntaxin 5 CG4214-PA
MNPTRPAQASFRDRTNEFRAAVESARRHAAPSSSSAPTAASSSSTGSLDGMISATSARSEFNNRASKIGLGIHQTSQKLARLAKLAKRTSVFDDPTLEIQELTSVIKKDITALNTAVVDLQALCNSQNESGSLSKDTTNHSTTVVDNLKNRLMSATKEFKEVLTMRTENLKVHENRRQIFSSSAAKDESNPFIRQRPLVARDPSESSVPPAPWASDSASTPLFQRKKTNGDHGASSSSQPFVQQQQLAVQQDSYMQSRAEALQNVESTIHELSNIFTQLATMVSQQGELAIRIDENMEETVANVEGAQGQLLKYLNSISSNRWLMMKIFFVLMVFLMIFIFFVA

SEQ ID NO: 4651 - protein, 294 aa, Zea mays subsp. mays
  peptide (1)..(294): Ceres Seq. ID no. 12373283
  misc_feature (207)..(269): Pfam Name: SNARE domain Pfam Description: SNARE domain
  misc_feature (1)..(294): Homolog of NCBI NO: 34906154 NR Description: putative t-SNARE SED5 [Oryza sativa (japonica
  misc_feature (1)..(294): Homolog of NCBI NO: 30687459 NR Description: syntaxin of plants SYP32 [Arabidopsis thaliana]
  misc_feature (1)..(294): Homolog of NCBI NO: 15239228 NR Description: syntaxin SYP31; protein id: At5g05760.1, by cDNA: gi_15809833, supported by cDNA: gi_17978872, supported cDNA: gi_2981438 [Arabidopsis thaliana]
  misc_feature (1)..(294): Homolog of NCBI NO: 2981439 NR Description: syntaxin of plants 31 [Arabidopsis thaliana]
  misc_feature (1)..(290): Homolog of NCBI NO: 40747582 NR Description: hypothetical protein AN9526.2 [Aspergillus
  misc_feature (1)..(290): Homolog of NCBI NO: 32490453 NR Description: syntaxin homologue [Aspergillus oryzae]
  misc_feature (1)..(294): Homolog of NCBI NO: 20148780 NR Description: syntaxin 5 [Phytophthora sojae]
  misc_feature (1)..(294): Homolog of NCBI NO: 28829569 NR Description: similar to syntaxin 5 [Schizosaccharomyces pombe]
  misc_feature (9)..(294): Homolog of NCBI NO: 542593 NR Description: SED5 protein - fruit fly (Drosophila (fragment) >gi|467559|emb|CAA55064.1| SED5 [Drosophila >gi|7287964|gb|AAF45002.1|AE003406_207 symbol=Sed5;
  misc_feature (9)..(294): Homolog of NCBI NO: 24584581 NR Description: Syntaxin 5 CG4214-PA
MISATSARSEFNNRASKIGLGIHQTSQKLARLAKLAKRTSVFDDPTLEIQELTSVIKKDITALNTAVVDLQALCNSQNESGSLSKDTTNHSTTVVDNLKNRLMSATKEFKEVLTMRTENLKVHENRRQIFSSSAAKDESNPFIRQRPLVARDPSESSVPPAPWASDSASTPLFQRKKTNGDHGASSSSQPFVQQQQLAVQQDSYMQSRAEALQNVESTIHELSNIFTQLATMVSQQGELAIRIDENMEETVANVEGAQGQLLKYLNSISSNRWLMMKIFFVLMVFLMIFIFFVA

SEQ ID NO: 4652 - protein, 192 aa, Zea mays subsp. mays
  peptide (1)..(192): Ceres Seq. ID no. 12373284
  misc_feature (105)..(167): Pfam Name: SNARE domain Pfam Description: SNARE domain
  misc_feature (1)..(192): Homolog of NCBI NO: 34906154 NR Description: putative t-SNARE SED5 [Oryza sativa (japonica
  misc_feature (1)..(192): Homolog of NCBI NO: 30687459 NR Description: syntaxin of plants SYP32 [Arabidopsis thaliana]
  misc_feature (1)..(192): Homolog of NCBI NO: 15239228 NR Description: syntaxin SYP31; protein id: At5g05760.1, by cDNA: gi_15809833, supported by cDNA: gi_17978872, supported cDNA: gi_2981438 [Arabidopsis thaliana]
  misc_feature (1)..(192): Homolog of NCBI NO: 2981439 NR Description: syntaxin of plants 31 [Arabidopsis thaliana]
  misc_feature (1)..(188): Homolog of NCBI NO: 40747582 NR Description: hypothetical protein AN9526.2 [Aspergillus
  misc_feature (1)..(188): Homolog of NCBI NO: 32490453 NR Description: syntaxin homologue [Aspergillus oryzae]
  misc_feature (1)..(192): Homolog of NCBI NO: 20148780 NR Description: syntaxin 5 [Phytophthora sojae]
  misc_feature (1)..(192): Homolog of NCBI NO: 28829569 NR Description: similar to syntaxin 5 [Schizosaccharomyces pombe]
  misc_feature (1)..(192): Homolog of NCBI NO: 542593 NR Description: SED5 protein - fruit fly (Drosophila (fragment) >gi|467559|emb|CAA55064.1| SED5 [Drosophila >gi|7287964|gb|AAF45002.1|AE003406_207 symbol=Sed5;
  misc_feature (1)..(192): Homolog of NCBI NO: 24584581 NR Description: Syntaxin 5 CG4214-PA
MSATKEFKEVLTMRTENLKVHENRRQIFSSSAAKDESNPFIRQRPLVARDPSESSVPPAPWASDSASTPLFQRKKTNGDHGASSSSQPFVQQQQLAVQQDSYMQSRAEALQNVESTIHELSNIFTQLATMVSQQGELAIRIDENMEETVANVEGAQGQLLKYLNSISSNRWLMMKIFFVLMVFLMIFIFFVA

SEQ ID NO: 4653 - DNA, 1974 bp, Zea mays subsp. mays
  misc_feature (1)..(1974): Ceres Seq. ID no. 12356209
  misc_feature: MA Experiment ID: 108599 Result: Down-regulated in Transcription
  misc_feature: MA Experiment 108599 PARAMETER Experiment Name: Zm_RT1_P Parameter: Age (day) Value: 11
  misc_feature: MA Experiment 108599 PARAMETER Experiment Name: Zm_RT1_P Parameter: Organism Value: Zea mays
  misc_feature: MA Experiment 108599 PARAMETER Experiment Name: Zm_RT1_P Parameter: Plant Line Value: rt1 mut vs. rt1 wt
  misc_feature: MA Experiment 108599 PARAMETER Experiment Name: Zm_RT1_P Parameter: Tissue Value: Roots
atgccattccgtggtcccgaacgacgccctcgctcgtgcactctctggtctctttctcttcgcctgaccctgagcacagcgccacagacacaacaacctcggactcgggagtacgtgtagctaggcccgatcggtcgagactgagtgcctgccgtgccgagacaggatgaccaaagccaaactggccttctggctcggatggattgctctcctgcaaggctgcatggtgaaatcatctctcccgtacgagtacgactactctgcaagcatcgagtgcttgccggagccgctggagccgcagtacggcgggggcgtcctccgcaacgccgacttcagcgcgggcctgcggggctggtccgccttcggctacggcagcatcgccgagagcacgtcggcggcgggcaacgggttcgccgtcgcgctcaaccggacgcggccgtaccagagcgtcagccagaaggtgtacctgcaggccgacacgcactacaccctctccgcgtggttgcaggtcagcgacggaggcgccgacgtgcgggccgtcgtcaagaccgtcggtgacttcgtccacgccggcggcggcgtcgccaaggccgggtgctggtccatgctcaagggcggcctcaccgccgcgtcttcgggtcctgccgagctctacttcgagagcaacgctacggtggacctgtgggtggacagcgtctcgctcaagcccttctccaaggacgagtggacggcgcaccgcgccgagtccgtgtccgcggcgcgcaagaaggcggtgaggctccaggcgacggactccgcggggaatccgctggagggcgcggcggtgtccctggacgcggtccggaccaacttcccgctgggcgcggccgtgagccggtacatcctcaccaactcggcgtaccagacgtggttcgcgtcccggttcgcggtggccaccttcgagaacgagatgaagtggtacagcacggagcctgcgccgggccaagaggactacacggtcccggacgccatgatggcgttcgccaagtccaacggcatcgccgtgcgcggccacaacgtgttctgggaccagcccagccagcagccccggtgggtgcagtcgctgccgtacccgcagctgctggcggcggcgtcgcgccgcatccgctccgtagtgtcgcgctacgccggccaggtcatcggctgggacgtcgtcaacgagaacctgcacttcaacttctacgagggccgcttcggctgggacgcgtccaccgccttctacgccgccgcgcgcctgctggacgccggctccgcgctcatgttcatgaacgagttcaacaccgtggagcagccgggcgacatggccgcgctgccggcgaggtacctgcagcgcctgcagcagatcatcgccgcctacccggagaacggcgccgggatggccatcggcctcgagggccacttcaccaccaaccccaacatcccgtacatgcgcgccgccctcgacaccctcgcccaggccggcatccccgtctggctcaccgaggtcgacgtcgcgccgggcccgtcgcaggcgcagcacctcgaggaggtgctgcgcgaggcgtacgcgcacccggcggtgcaggggatcgtcatctggtcggcgtggcggcccgaggggtgctacgtcatgtgcctcaccgacaacagcttcaacaacctgccgcagggggacgtcgtggaccgcctcatcgccgagtggcgggcgactccgcgggccggctccacggacgcgcagggctacttcgaggccgagctcgtccacggcgagtataaggtcaccgtcagccacccggcgctcaacagctccatctcccggagcgtcaaggtggagctgggctcagggagtgaccactacttcattgacatgcaggtctagaccaactggttcatcagttgctaggtgtaatgtaatgtaagattacctgctgttgtcacagaactgtgaaagcttag

SEQ ID NO: 4654 - protein, 576 aa, Zea mays subsp. mays
  peptide (1)..(576): Ceres Seq. ID no. 12356210
  misc_feature (220)..(515): Pfam Name: Glycosyl hydrolase family 10 Pfam Description: Glycosyl hydrolase family 10
  misc_feature (42)..(576): Homolog of NCBI NO: 37533262 NR Description: putative 1,4-beta-xylanase [Oryza sativa
  misc_feature (30)..(556): Homolog of NCBI NO: 7485619 NR Description: hypothetical protein F17I5.30 - Arabidopsis >gi|3297808|emb|CAA19866.1| putative protein [Arabidopsis >gi|7270333|emb|CAB80101.1| putative protein [Arabidopsis
  misc_feature (37)..(569): Homolog of NCBI NO: 15235131 NR Description: glycosyl hydrolase family 10; protein id:
  misc_feature (29)..(568): Homolog of NCBI NO: 23429644 NR Description: endoxylanase [Carica papaya]
  misc_feature (44)..(576): Homolog of NCBI NO: 37533260 NR Description: putative 1,4-beta-xylanase [Oryza sativa
  misc_feature (22)..(556): Homolog of NCBI NO: 30689830 NR Description: glycosyl hydrolase family 10 [Arabidopsis
  misc_feature (5)..(576): Homolog of NCBI NO: 40363757 NR Description: putative 1,4-beta-xylanase [Triticum aestivum]
  misc_feature (35)..(561): Homolog of NCBI NO: 15235134 NR Description: glycosyl hydrolase family 10; protein id:
  misc_feature (1)..(561): Homolog of NCBI NO: 22329138 NR Description: glycosyl hydrolase family 10; protein id: [Arabidopsis thaliana] >gi|27754330|gb|AAO22618.1| putative
  misc_feature (147)..(355): Homolog of NCBI NO: 22329142 NR Description: glycosyl hydrolase family 10; protein id:
MTKAKLAFWLGWIALLQGCMVKSSLPYEYDYSASIECLPEPLEPQYGGGVLRNADFSAGLRGWSAFGYGSIAESTSAAGNGFAVALNRTRPYQSVSQKVYLQADTHYTLSAWLQVSDGGADVRAVVKTVGDFVHAGGGVAKAGCWSMLKGGLTAASSGPAELYFESNATVDLWVDSVSLKPFSKDEWTAHRAESVSAARKKAVRLQATDSAGNPLEGAAVSLDAVRTNFPLGAAVSRYILTNSAYQTWFASRFAVATFENEMKWYSTEPAPGQEDYTVPDAMMAFAKSNGIAVRGHNVFWDQPSQQPRWVQSLPYPQLLAAASRRIRSVVSRYAGQVIGWDVVNENLHFNFYEGRFGWDASTAFYAAARLLDAGSALMFMNEFNTVEQPGDMAALPARYLQRLQQIIAAYPENGAGMAIGLEGHFTTNPNIPYMRAALDTLAQAGIPVWLTEVDVAPGPSQAQHLEEVLREAYAHPAVQGIVIWSAWRPEGCYVMCLTDNSFNNLPQGDVVDRLIAEWRATPRAGSTDAQGYFEAELVHGEYKVTVSHPALNSSISRSVKVELGSGSDHYFIDMQV

SEQ ID NO: 4655 - protein, 557 aa, Zea mays subsp. mays
  peptide (1)..(557): Ceres Seq. ID no. 12356211
  misc_feature (201)..(496): Pfam Name: Glycosyl hydrolase family 10 Pfam Description: Glycosyl hydrolase family 10
  misc_feature (10)..(549): Homolog of NCBI NO: 23429644 NR Description: endoxylanase [Carica papaya]
  misc_feature (1)..(557): Homolog of NCBI NO: 40363757 NR Description: putative 1,4-beta-xylanase [Triticum aestivum]
  misc_feature (25)..(557): Homolog of NCBI NO: 37533260 NR Description: putative 1,4-beta-xylanase [Oryza sativa
  misc_feature (3)..(537): Homolog of NCBI NO: 30689830 NR Description: glycosyl hydrolase family 10 [Arabidopsis
  misc_feature (23)..(557): Homolog of NCBI NO: 37533262 NR Description: putative 1,4-beta-xylanase [Oryza sativa
  misc_feature (11)..(537): Homolog of NCBI NO: 7485619 NR Description: hypothetical protein F17I5.30 - Arabidopsis >gi|3297808|emb|CAA19866.1| putative protein [Arabidopsis >gi|7270333|emb|CAB80101.1| putative protein [Arabidopsis
  misc_feature (18)..(550): Homolog of NCBI NO: 15235131 NR Description: glycosyl hydrolase family 10; protein id:
  misc_feature (16)..(542): Homolog of NCBI NO: 15235134 NR Description: glycosyl hydrolase family 10; protein id:
  misc_feature (1)..(542): Homolog of NCBI NO: 22329138 NR Description: glycosyl hydrolase family 10; protein id: [Arabidopsis thaliana] >gi|27754330|gb|AAO22618.1| putative
  misc_feature (128)..(336): Homolog of NCBI NO: 22329142 NR Description: glycosyl hydrolase family 10; protein id:
MVKSSLPYEYDYSASIECLPEPLEPQYGGGVLRNADFSAGLRGWSAFGYGSIAESTSAAGNGFAVALNRTRPYQSVSQKVYLQADTHYTLSAWLQVSDGGADVRAVVKTVGDFVHAGGGVAKAGCWSMLKGGLTAASSGPAELYFESNATVDLWVDSVSLKPFSKDEWTAHRAESVSAARKKAVRLQATDSAGNPLEGAAVSLDAVRTNFPLGAAVSRYILTNSAYQTWFASRFAVATFENEMKWYSTEPAPGQEDYTVPDAMMAFAKSNGIAVRGHNVFWDQPSQQPRWVQSLPYPQLLAAASRRIRSVVSRYAGQVIGWDVVNENLHFNFYEGRFGWDASTAFYAAARLLDAGSALMFMNEFNTVEQPGDMAALPARYLQRLQQIIAAYPENGAGMAIGLEGHFTTNPNIPYMRAALDTLAQAGIPVWLTEVDVAPGPSQAQHLEEVLREAYAHPAVQGIVIWSAWRPEGCYVMCLTDNSFNNLPQGDVVDRLIAEWRATPRAGSTDAQGYFEAELVHGEYKVTVSHPALNSSISRSVKVELGSGSDHYFIDMQV

SEQ ID NO: 4656 - protein, 430 aa, Zea mays subsp. mays
  peptide (1)..(430): Ceres Seq. ID no. 12356212
  misc_feature (74)..(369): Pfam Name: Glycosyl hydrolase family 10 Pfam Description: Glycosyl hydrolase family 10
  misc_feature (1)..(422): Homolog of NCBI NO: 23429644 NR Description: endoxylanase [Carica papaya]
  misc_feature (1)..(430): Homolog of NCBI NO: 40363757 NR Description: putative 1,4-beta-xylanase [Triticum aestivum]
  misc_feature (1)..(430): Homolog of NCBI NO: 37533260 NR Description: putative 1,4-beta-xylanase [Oryza sativa
  misc_feature (1)..(410): Homolog of NCBI NO: 30689830 NR Description: glycosyl hydrolase family 10 [Arabidopsis
  misc_feature (1)..(430): Homolog of NCBI NO: 37533262 NR Description: putative 1,4-beta-xylanase [Oryza sativa
  misc_feature (1)..(410): Homolog of NCBI NO: 7485619 NR Description: hypothetical protein F17I5.30 - Arabidopsis >gi|3297808|emb|CAA19866.1| putative protein [Arabidopsis >gi|7270333|emb|CAB80101.1| putative protein [Arabidopsis
  misc_feature (1)..(423): Homolog of NCBI NO: 15235131 NR Description: glycosyl hydrolase family 10; protein id:
  misc_feature (1)..(415): Homolog of NCBI NO: 15235134 NR Description: glycosyl hydrolase family 10; protein id:
  misc_feature (1)..(415): Homolog of NCBI NO: 22329138 NR Description: glycosyl hydrolase family 10; protein id: [Arabidopsis thaliana] >gi|27754330|gb|AAO22618.1| putative
  misc_feature (1)..(209): Homolog of NCBI NO: 22329142 NR Description: glycosyl hydrolase family 10; protein id:
MLKGGLTAASSGPAELYFESNATVDLWVDSVSLKPFSKDEWTAHRAESVSAARKKAVRLQATDSAGNPLEGAAVSLDAVRTNFPLGAAVSRYILTNSAYQTWFASRFAVATFENEMKWYSTEPAPGQEDYTVPDAMMAFAKSNGIAVRGHNVFWDQPSQQPRWVQSLPYPQLLAAASRRIRSVVSRYAGQVIGWDVVNENLHFNFYEGRFGWDASTAFYAAARLLDAGSALMFMNEFNTVEQPGDMAALPARYLQRLQQIIAAYPENGAGMAIGLEGHFTTNPNIPYMRAALDTLAQAGIPVWLTEVDVAPGPSQAQHLEEVLREAYAHPAVQGIVIWSAWRPEGCYVMCLTDNSFNNLPQGDVVDRLIAEWRATPRAGSTDAQGYFEAELVHGEYKVTVSHPALNSSISRSVKVELGSGSDHYFIDMQV

SEQ ID NO: 4657 - DNA, 1648 bp, Zea mays subsp. mays
  misc_feature (1)..(1648): Ceres Seq. ID no. 12352702
  misc_feature: MA Experiment ID: 108527 Result: Down-regulated in Transcription
  misc_feature: MA Experiment 108527 PARAMETER Experiment Name: Zm_5mM_NO_P Parameter: Age (day) Value: 8
  misc_feature: MA Experiment 108527 PARAMETER Experiment Name: Zm_5mM_NO_P Parameter: Organism Value: Zea mays
  misc_feature: MA Experiment 108527 PARAMETER Experiment Name: Zm_5mM_NO_P Parameter: Plant Line Value: 35A19
  misc_feature: MA Experiment 108527 PARAMETER Experiment Name: Zm_5mM_NO_P Parameter: Timepoint (hr) Value: 6
  misc_feature: MA Experiment 108527 PARAMETER Experiment Name: Zm_5mM_NO_P Parameter: Tissue Value: Aerial
  misc_feature: MA Experiment 108527 PARAMETER Experiment Name: Zm_5mM_NO_P Parameter: Treatment Value: 5mM NO vs. No Treatment
  misc_feature: MA Experiment ID: 108530 Result: Up-regulated in Transcription
  misc_feature: MA Experiment 108530 PARAMETER Experiment Name: Zm_Imbibed_Seeds_P Parameter: Age (day) Value: 6 vs. 2
  misc_feature: MA Experiment 108530 PARAMETER Experiment Name: Zm_Imbibed_Seeds_P Parameter: Organism Value: Zea mays
  misc_feature: MA Experiment 108530 PARAMETER Experiment Name: Zm_Imbibed_Seeds_P Parameter: Plant Line Value: 35A19
  misc_feature: MA Experiment 108530 PARAMETER Experiment Name: Zm_Imbibed_Seeds_P Parameter: Tissue Value: Aerial vs. Embryo
  misc_feature: MA Experiment ID: 108547 Result: Up-regulated in Transcription
  misc_feature: MA Experiment 108547 PARAMETER Experiment Name: Zm_Imbibed_Seeds_P Parameter: Age (day) Value: 4 vs. 2
  misc_feature: MA Experiment 108547 PARAMETER Experiment Name: Zm_Imbibed_Seeds_P Parameter: Organism Value: Zea mays
  misc_feature: MA Experiment 108547 PARAMETER Experiment Name: Zm_Imbibed_Seeds_P Parameter: Plant Line Value: 35A19
  misc_feature: MA Experiment 108547 PARAMETER Experiment Name: Zm_Imbibed_Seeds_P Parameter: Tissue Value: Aerial vs. Embryo
gtcctgcagtctccatggccgccgcagtcgacaccgcggccgtggcgggcgcgaccgggaggctcagggtgttcttcctgccctccttcatccggggacacctcatcccgcagaccgacatggcgtgccgcgtcgccgcggcaaggcccgcggaggtggaggcgaccgtggtcgtgacgccggccaacgcggccctcatcgcgccgaccgtggcgcgcgccgcggccgccggccacgccgtgcgcgtgctctgctacccgttcccggacgtcggcctcggggagggcgtggagtgcctcgccaccgccaccgcgcgcgacgcgtggcgcgtctaccgcgccatggaggtggtgcagccgtcccacgagtcgctgctccgggaccaccgccccgacgccatcgtcgccgacgtgccgttctggtggaccaccggtgtcgccgccgagctcggggtgccgcgcctcacgttccaccctgtcggaatcttcgctctgctcgccatgaacagcctgttcaccatacggcccgacatcatcggccgggccagctccgacgccgctgggacggtgctgtccgtgccgggcttgcccgggaaggagatcacgatcccggtgtccgagctcccgaccttcttggtccaggacgaccacctctccaaggcgtggcagcggatgagggcgtgccagctcactggcttcggcgtcatcgtcaacaccttcgccgacctggagcagccctactgcgaggaattcagccgcgtggaggcgcgccgcgcctacttcgtcgggcccctgggaaagccatcgcgctccaccatgcaccgcggcggcagcggcaacgcggactgcctgagctggttgtccaccaaaccgagccggtcggtagtgttcgtctgcttcgggagctgggccgagttctcagcgactcagacaagagagctcgccctggggctcgaggcgtcgaaccagccattcctgtgggttgtccgctccaatgactccagcgatgaccagtgggcaccggagggctgggagcagcgcgtcgccaaccgtggcctggtcgtccacggatgggccccgcagctggccgttctggcccacccgtcggtgggcgcgttcgtgacgcactgcggttggaactcggtcctcgaagccgcgtccgccggcgtgccggtgctcacgtggccgttagtgttcgagcagttcatcaacgagcggctggccaccgaggtggccgccttcggcgtgcgcctgtgggacggcggcaggcgcagcgagagggccgaggatgcggagatcgtgccggcggaggcgatcgcgcgggccgtggccggtttcatggaaggcggagagcagcgcgacaagttgaacgccagggccggggaactagcggagcgcgcgcgcgccgctgtcagtgaggacgggtcgtcgtggcgtgacataaaccgcctgatcgatgatctcctgcaggcgagagcgtcagggctgccacaaatgaattccgtccagcttgagtgatttaaattattctacacagacattgtacgcaaatgcaaggctaaaaataaagagtgaagttaaggtggtgtttggttcatctaaatgtaacgtaaatagtttacatgggtaatggataccgctaattttgt

SEQ ID NO: 4658 - protein, 504 aa, Zea mays subsp. mays
  peptide (1)..(504): Ceres Seq. ID no. 12352703
  misc_feature (23)..(487): Pfam Name: UDP-glucoronosyl and UDP-glucosyl transferase Pfam Description: UDP-glucoronosyl and UDP-glucosyl transferase
  misc_feature (10)..(498): Homolog of NCBI NO: 30017585 NR Description: putative immediate-early salicylate-induced
  misc_feature (5)..(493): Homolog of NCBI NO: 30103010 NR Description: putative immediate-early salicylate-induced
  misc_feature (21)..(493): Homolog of NCBI NO: 15290056 NR Description: putative glucosyltransferase IS5a,
  misc_feature (20)..(487): Homolog of NCBI NO: 27530875 NR Description: anthocyanin 3'-glucosyltransferase [Gentiana
  misc_feature (19)..(494): Homolog of NCBI NO: 7433906 NR Description: glucosyltransferase IS5a (EC 2.4.1.-),
  misc_feature (19)..(494): Homolog of NCBI NO: 13492674 NR Description: phenylpropanoid:glucosyltransferase 1 [Nicotiana
  misc_feature (19)..(494): Homolog of NCBI NO: 7433905 NR Description: glucosyltransferase IS10a (EC 2.4.1.-),
  misc_feature (19)..(494): Homolog of NCBI NO: 13492676 NR Description: phenylpropanoid:glucosyltransferase 2 [Nicotiana
  misc_feature (19)..(487): Homolog of NCBI NO: 5763524 NR Description: UDP-glucose: flavonoid 7-O-glucosyltransferase
  misc_feature (24)..(491): Homolog of NCBI NO: 7433911 NR Description: probable glucosyltransferase twi1 (EC 2.4.1.-) - (fragment) >gi|1359905|emb|CAA59450.1| homologous to
PAVSMAAAVDTAAVAGATGRLRVFFLPSFIRGHLIPQTDMACRVAAARPAEVEATVVVTPANAALIAPTVARAAAAGHAVRVLCYPFPDVGLGEGVECLATATARDAWRVYRAMEVVQPSHESLLRDHRPDAIVADVPFWWTTGVAAELGVPRLTFHPVGIFALLAMNSLFTIRPDIIGRASSDAAGTVLSVPGLPGKEITIPVSELPTFLVQDDHLSKAWQRMRACQLTGFGVIVNTFADLEQPYCEEFSRVEARRAYFVGPLGKPSRSTMHRGGSGNADCLSWLSTKPSRSVVFVCFGSWAEFSATQTRELALGLEASNQPFLWVVRSNDSSDDQWAPEGWEQRVANRGLVVHGWAPQLAVLAHPSVGAFVTHCGWNSVLEAASAGVPVLTWPLVFEQFINERLATEVAAFGVRLWDGGRRSERAEDAEIVPAEAIARAVAGFMEGGEQRDKLNARAGELAERARAAVSEDGSSWRDINRLIDDLLQARASGLPQMNSVQLE

SEQ ID NO: 4659 - protein, 500 aa, Zea mays subsp. mays
  peptide (1)..(500): Ceres Seq. ID no. 12352704
  misc_feature (19)..(483): Pfam Name: UDP-glucoronosyl and UDP-glucosyl transferase Pfam Description: UDP-glucoronosyl and UDP-glucosyl transferase
  misc_feature (6)..(494): Homolog of NCBI NO: 30017585 NR Description: putative immediate-early salicylate-induced
  misc_feature (1)..(489): Homolog of NCBI NO: 30103010 NR Description: putative immediate-early salicylate-induced
  misc_feature (17)..(489): Homolog of NCBI NO: 15290056 NR Description: putative glucosyltransferase IS5a,
  misc_feature (16)..(483): Homolog of NCBI NO: 27530875 NR Description: anthocyanin 3'-glucosyltransferase [Gentiana
  misc_feature (15)..(490): Homolog of NCBI NO: 7433906 NR Description: glucosyltransferase IS5a (EC 2.4.1.-),
  misc_feature (15)..(490): Homolog of NCBI NO: 13492674 NR Description: phenylpropanoid:glucosyltransferase 1 [Nicotiana
  misc_feature (15)..(490): Homolog of NCBI NO: 7433905 NR Description: glucosyltransferase IS10a (EC 2.4.1.-),
  misc_feature (15)..(490): Homolog of NCBI NO: 13492676 NR Description: phenylpropanoid:glucosyltransferase 2 [Nicotiana
  misc_feature (15)..(483): Homolog of NCBI NO: 5763524 NR Description: UDP-glucose: flavonoid 7-O-glucosyltransferase
  misc_feature (20)..(487): Homolog of NCBI NO: 7433911 NR Description: probable glucosyltransferase twi1 (EC 2.4.1.-) - (fragment) >gi|1359905|emb|CAA59450.1| homologous to
MAAAVDTAAVAGATGRLRVFFLPSFIRGHLIPQTDMACRVAAARPAEVEATVVVTPANAALIAPTVARAAAAGHAVRVLCYPFPDVGLGEGVECLATATARDAWRVYRAMEVVQPSHESLLRDHRPDAIVADVPFWWTTGVAAELGVPRLTFHPVGIFALLAMNSLFTIRPDIIGRASSDAAGTVLSVPGLPGKEITIPVSELPTFLVQDDHLSKAWQRMRACQLTGFGVIVNTFADLEQPYCEEFSRVEARRAYFVGPLGKPSRSTMHRGGSGNADCLSWLSTKPSRSVVFVCFGSWAEFSATQTRELALGLEASNQPFLWVVRSNDSSDDQWAPEGWEQRVANRGLVVHGWAPQLAVLAHPSVGAFVTHCGWNSVLEAASAGVPVLTWPLVFEQFINERLATEVAAFGVRLWDGGRRSERAEDAEIVPAEAIARAVAGFMEGGEQRDKLNARAGELAERARAAVSEDGSSWRDINRLIDDLLQARASGLPQMNSVQLE

SEQ ID NO: 4660 - protein, 465 aa, Zea mays subsp. mays
  peptide (1)..(465): Ceres Seq. ID no. 12352705
  misc_feature (1)..(448): Pfam Name: UDP-glucoronosyl and UDP-glucosyl transferase Pfam Description: UDP-glucoronosyl and UDP-glucosyl transferase
  misc_feature (1)..(459): Homolog of NCBI NO: 30017585 NR Description: putative immediate-early salicylate-induced
  misc_feature (1)..(454): Homolog of NCBI NO: 30103010 NR Description: putative immediate-early salicylate-induced
  misc_feature (1)..(454): Homolog of NCBI NO: 15290056 NR Description: putative glucosyltransferase IS5a,
  misc_feature (1)..(448): Homolog of NCBI NO: 27530875 NR Description: anthocyanin 3'-glucosyltransferase [Gentiana
  misc_feature (1)..(455): Homolog of NCBI NO: 7433906 NR Description: glucosyltransferase IS5a (EC 2.4.1.-),
  misc_feature (1)..(455): Homolog of NCBI NO: 13492674 NR Description: phenylpropanoid:glucosyltransferase 1 [Nicotiana
  misc_feature (1)..(455): Homolog of NCBI NO: 7433905 NR Description: glucosyltransferase IS10a (EC 2.4.1.-),
  misc_feature (1)..(455): Homolog of NCBI NO: 13492676 NR Description: phenylpropanoid:glucosyltransferase 2 [Nicotiana
  misc_feature (1)..(448): Homolog of NCBI NO: 5763524 NR Description: UDP-glucose: flavonoid 7-O-glucosyltransferase
  misc_feature (1)..(452): Homolog of NCBI NO: 7433911 NR Description: probable glucosyltransferase twi1 (EC 2.4.1.-) - (fragment) >gi|1359905|emb|CAA59450.1| homologous to
MACRVAAARPAEVEATVVVTPANAALIAPTVARAAAAGHAVRVLCYPFPDVGLGEGVECLATATARDAWRVYRAMEVVQPSHESLLRDHRPDAIVADVPFWWTTGVAAELGVPRLTFHPVGIFALLAMNSLFTIRPDIIGRASSDAAGTVLSVPGLPGKEITIPVSELPTFLVQDDHLSKAWQRMRACQLTGFGVIVNTFADLEQPYCEEFSRVEARRAYFVGPLGKPSRSTMHRGGSGNADCLSWLSTKPSRSVVFVCFGSWAEFSATQTRELALGLEASNQPFLWVVRSNDSSDDQWAPEGWEQRVANRGLVVHGWAPQLAVLAHPSVGAFVTHCGWNSVLEAASAGVPVLTWPLVFEQFINERLATEVAAFGVRLWDGGRRSERAEDAEIVPAEAIARAVAGFMEGGEQRDKLNARAGELAERARAAVSEDGSSWRDINRLIDDLLQARASGLPQMNSVQLE

SEQ ID NO: 4661 - DNA, 1578 bp, Zea mays subsp. mays
  misc_feature (1)..(1578): Ceres Seq. ID no. 13492685
  misc_feature: MA Experiment ID: 20000108 Result: Up-regulated in Transcription
  misc_feature: MA Experiment 20000108 PARAMETER Experiment Name: Zm_Root-Tips_P Parameter: Age (day) Value: 12
  misc_feature: MA Experiment 20000108 PARAMETER Experiment Name: Zm_Root-Tips_P Parameter: Organism Value: Zea mays
  misc_feature: MA Experiment 20000108 PARAMETER Experiment Name: Zm_Root-Tips_P Parameter: Tissue Value: Root tips vs. Root mid region    35
  misc_feature: MA Experiment 20000108 PARAMETER Experiment Name: Zm_Root-Tips_P Parameter: Tissue Value: Root tips vs. Root mid region   Sequence Listing-Misc Features (4)
  misc_feature: MA Experiment ID: 20000492 Result: Up-regulated in Transcription
  misc_feature: MA Experiment 20000492 PARAMETER Experiment Name: Zm_Hybrid_Seed_Dev_P Parameter: DAP Value: 12
  misc_feature: MA Experiment 20000492 PARAMETER Experiment Name: Zm_Hybrid_Seed_Dev_P Parameter: Organism Value: Zea mays
  misc_feature: MA Experiment 20000492 PARAMETER Experiment Name: Zm_Hybrid_Seed_Dev_P Parameter: Plant Line Value: 35A19
  misc_feature: MA Experiment 20000492 PARAMETER Experiment Name: Zm_Hybrid_Seed_Dev_P Parameter: Tissue Value: Fert Kernel vs. Unfert Floret
attcgatcgcctcacccgaagcacatcccgtcgcatcccatcccactaccacccatctcgtcgtccgccgattcgatccggttcttccaacccaggggcagtgatggcgacgaagaggagcgtgggcaccctcggcgaggcggatctgaaggggaagaaggtgttcgtgcgcgccgacctcaacgtcccgctcgacgatgcccagaagatcaccgacgacacccgcatccgcgcctccgtccccaccatcaagttcctcctcgagaagggcgccaaggtcatcctcgccagccacctgggtcgtccaaaaggtgtcaccccaaagtacagcttgaagcctcttgttccacgcttgtctgagctccttggagttgaagtcgtgatggccaatgattgcattggtgaggaagtcgagaagttggctgccgctttgccagaaggtggagttctgctcctagagaatgttagattctacaaggaggaagagaagaacgaacctgagtttgctaagaagcttgcatctgttgctgacctttatgtcaatgatgcttttggcacggcacacagagctcatgcttcaaccgaaggagttaccaagtatttgaagcctgctgttgctggcttcctcatgcagaaggaacttgactaccttgttggagctgttgccaacccaaagaagccatttgccgccattgttggtggatccaaggtctcaactaagattggtgtcattgagtcgttgctggcgaaggtcgatatcctcatccttggtggtggtatgatctacacattttacaaggcacagggatattctgttggaaaatctctcgtggaagaggataaactcgagctcgcaacttctcttattgagaaggcgaaggcaaagggggtttctcttttgcttcccactgatattgtagtagcggacaagtttgcagccgatgctgagagcaagattgtccctgccactgctatccctgatgactggatgggtcttgatgttggccctgatgccaccaaaacattcgacgaagcattggacaccaccaagactgttatttggaacggccccatgggagtgtttgagttccagaagtttgcagctggcaccgaggcgattgccaagaagctagctgagcttacaaccacgaagggtgtcactaccatcatcggcggtggcgactctgtcgctgctgtcgagaaggctgggctggccgacaagatgagccacatttcgaccggcggcggtgcgagcttggaactcttggaaggcaagactctacctggtgtccttgccctcgatgacgcctagatccgctgctgctgctgctactcaggttctgccagctttgcgtgtcatcttgtttcggaccttggtgtagcactgcaaggctaaggtttactcctccacacatggactttcgaggataggcttgccaccgtgttttgctagatgagtcgtgaaataagcttttacttcctcgctgctgtgggtgaagtgactggaattcggaaatttggaactaacaaaaccccccgtggatttgtatgatacgttttgttcgacagtttgcgtcc

SEQ ID NO: 4662 - protein, 436 aa, Zea mays subsp. mays
  peptide (1)..(436): Ceres Seq. ID no. 13492686
  misc_feature (37)..(436): Pfam Name: Phosphoglycerate kinase Pfam Description: Phosphoglycerate kinase
  misc_feature (37)..(436): Pfam Name: Phosphoglycerate kinase Pfam Description: Phosphoglycerate kinase
  misc_feature (35)..(436): Homolog of NCBI NO: 129916 NR Description: Phosphoglycerate kinase, cytosolic
  misc_feature (35)..(436): Homolog of NCBI NO: 21536853 NR Description: phosphoglycerate kinase, putative [Arabidopsis
  misc_feature (35)..(436): Homolog of NCBI NO: 15219412 NR Description: phosphoglycerate kinase -related [Arabidopsis
  misc_feature (35)..(436): Homolog of NCBI NO: 3738257 NR Description: cytosolic phosphoglycerate kinase 1 [Populus
  misc_feature (35)..(436): Homolog of NCBI NO: 2499498 NR Description: Phosphoglycerate kinase, cytosolic
  misc_feature (35)..(436): Homolog of NCBI NO: 21536853 NR Description: phosphoglycerate kinase, putative [Arabidopsis
  misc_feature (35)..(436): Homolog of NCBI NO: 3738257 NR Description: cytosolic phosphoglycerate kinase 1 [Populus
  misc_feature (24)..(435): Homolog of NCBI NO: 3738261 NR Description: chloroplast phosphoglycerate kinase [Populus
  misc_feature (28)..(436): Homolog of NCBI NO: 7434544 NR Description: phosphoglycerate kinase (EC 2.7.2.3) precursor,
  misc_feature (35)..(436): Homolog of NCBI NO: 3738259 NR Description: cytosolic phosphoglycerate kinase 1 [Populus
  misc_feature (35)..(436): Homolog of NCBI NO: 29124969 NR Description: 3-phosphoglycerate kinase [Populus tremuloides]
  misc_feature (35)..(436): Homolog of NCBI NO: 9230771 NR Description: cytosolic phosphoglycerate kinase [Pisum sativum]
  misc_feature (35)..(436): Homolog of NCBI NO: 2499498 NR Description: Phosphoglycerate kinase, cytosolic
  misc_feature (35)..(436): Homolog of NCBI NO: 15219412 NR Description: phosphoglycerate kinase -related [Arabidopsis
  misc_feature (35)..(436): Homolog of NCBI NO: 129916 NR Description: Phosphoglycerate kinase, cytosolic
  misc_feature (35)..(436): Homolog of NCBI NO: 9230771 NR Description: cytosolic phosphoglycerate kinase [Pisum sativum]
  misc_feature (35)..(436): Homolog of NCBI NO: 29124969 NR Description: 3-phosphoglycerate kinase [Populus tremuloides]
  misc_feature (35)..(436): Homolog of NCBI NO: 3738259 NR Description: cytosolic phosphoglycerate kinase 1 [Populus
  misc_feature (28)..(436): Homolog of NCBI NO: 7434544 NR Description: phosphoglycerate kinase (EC 2.7.2.3) precursor,
  misc_feature (24)..(435): Homolog of NCBI NO: 3738261 NR Description: chloroplast phosphoglycerate kinase [Populus
FDRLTRSTSRRIPSHYHPSRRPPIRSGSSNPGAVMATKRSVGTLGEADLKGKKVFVRADLNVPLDDAQKITDDTRIRASVPTIKFLLEKGAKVILASHLGRPKGVTPKYSLKPLVPRLSELLGVEVVMANDCIGEEVEKLAAALPEGGVLLLENVRFYKEEEKNEPEFAKKLASVADLYVNDAFGTAHRAHASTEGVTKYLKPAVAGFLMQKELDYLVGAVANPKKPFAAIVGGSKVSTKIGVIESLLAKVDILILGGGMIYTFYKAQGYSVGKSLVEEDKLELATSLIEKAKAKGVSLLLPTDIVVADKFAADAESKIVPATAIPDDWMGLDVGPDATKTFDEALDTTKTVIWNGPMGVFEFQKFAAGTEAIAKKLAELTTTKGVTTIIGGGDSVAAVEKAGLADKMSHISTGGGASLELLEGKTLPGVLALDDA

SEQ ID NO: 4663 - protein, 402 aa, Zea mays subsp. mays
  peptide (1)..(402): Ceres Seq. ID no. 13492687
  misc_feature (3)..(402): Pfam Name: Phosphoglycerate kinase Pfam Description: Phosphoglycerate kinase
  misc_feature (3)..(402): Pfam Name: Phosphoglycerate kinase Pfam Description: Phosphoglycerate kinase
  misc_feature (1)..(402): Homolog of NCBI NO: 129916 NR Description: Phosphoglycerate kinase, cytosolic
  misc_feature (1)..(402): Homolog of NCBI NO: 21536853 NR Description: phosphoglycerate kinase, putative [Arabidopsis
  misc_feature (1)..(402): Homolog of NCBI NO: 15219412 NR Description: phosphoglycerate kinase -related [Arabidopsis
  misc_feature (1)..(402): Homolog of NCBI NO: 3738257 NR Description: cytosolic phosphoglycerate kinase 1 [Populus
  misc_feature (1)..(402): Homolog of NCBI NO: 2499498 NR Description: Phosphoglycerate kinase, cytosolic
  misc_feature (1)..(402): Homolog of NCBI NO: 21536853 NR Description: phosphoglycerate kinase, putative [Arabidopsis
  misc_feature (1)..(402): Homolog of NCBI NO: 3738257 NR Description: cytosolic phosphoglycerate kinase 1 [Populus
  misc_feature (1)..(401): Homolog of NCBI NO: 3738261 NR Description: chloroplast phosphoglycerate kinase [Populus
  misc_feature (1)..(402): Homolog of NCBI NO: 7434544 NR Description: phosphoglycerate kinase (EC 2.7.2.3) precursor,
  misc_feature (1)..(402): Homolog of NCBI NO: 3738259 NR Description: cytosolic phosphoglycerate kinase 1 [Populus
  misc_feature (1)..(402): Homolog of NCBI NO: 29124969 NR Description: 3-phosphoglycerate kinase [Populus tremuloides]
  misc_feature (1)..(402): Homolog of NCBI NO: 9230771 NR Description: cytosolic phosphoglycerate kinase [Pisum sativum]
  misc_feature (1)..(402): Homolog of NCBI NO: 2499498 NR Description: Phosphoglycerate kinase, cytosolic
  misc_feature (1)..(402): Homolog of NCBI NO: 15219412 NR Description: phosphoglycerate kinase -related [Arabidopsis
  misc_feature (1)..(402): Homolog of NCBI NO: 129916 NR Description: Phosphoglycerate kinase, cytosolic
  misc_feature (1)..(402): Homolog of NCBI NO: 9230771 NR Description: cytosolic phosphoglycerate kinase [Pisum sativum]
  misc_feature (1)..(402): Homolog of NCBI NO: 29124969 NR Description: 3-phosphoglycerate kinase [Populus tremuloides]
  misc_feature (1)..(402): Homolog of NCBI NO: 3738259 NR Description: cytosolic phosphoglycerate kinase 1 [Populus
  misc_feature (1)..(402): Homolog of NCBI NO: 7434544 NR Description: phosphoglycerate kinase (EC 2.7.2.3) precursor,
  misc_feature (1)..(401): Homolog of NCBI NO: 3738261 NR Description: chloroplast phosphoglycerate kinase [Populus
MATKRSVGTLGEADLKGKKVFVRADLNVPLDDAQKITDDTRIRASVPTIKFLLEKGAKVILASHLGRPKGVTPKYSLKPLVPRLSELLGVEVVMANDCIGEEVEKLAAALPEGGVLLLENVRFYKEEEKNEPEFAKKLASVADLYVNDAFGTAHRAHASTEGVTKYLKPAVAGFLMQKELDYLVGAVANPKKPFAAIVGGSKVSTKIGVIESLLAKVDILILGGGMIYTFYKAQGYSVGKSLVEEDKLELATSLIEKAKAKGVSLLLPTDIVVADKFAADAESKIVPATAIPDDWMGLDVGPDATKTFDEALDTTKTVIWNGPMGVFEFQKFAAGTEAIAKKLAELTTTKGVTTIIGGGDSVAAVEKAGLADKMSHISTGGGASLELLEGKTLPGVLALDDA

SEQ ID NO: 4664 - protein, 309 aa, Zea mays subsp. mays
  peptide (1)..(309): Ceres Seq. ID no. 13492688
  misc_feature (1)..(309): Pfam Name: Phosphoglycerate kinase Pfam Description: Phosphoglycerate kinase
  misc_feature (1)..(309): Pfam Name: Phosphoglycerate kinase Pfam Description: Phosphoglycerate kinase
  misc_feature (1)..(309): Homolog of NCBI NO: 129916 NR Description: Phosphoglycerate kinase, cytosolic
  misc_feature (1)..(309): Homolog of NCBI NO: 21536853 NR Description: phosphoglycerate kinase, putative [Arabidopsis
  misc_feature (1)..(309): Homolog of NCBI NO: 15219412 NR Description: phosphoglycerate kinase -related [Arabidopsis
  misc_feature (1)..(309): Homolog of NCBI NO: 3738257 NR Description: cytosolic phosphoglycerate kinase 1 [Populus
  misc_feature (1)..(309): Homolog of NCBI NO: 2499498 NR Description: Phosphoglycerate kinase, cytosolic
  misc_feature (1)..(309): Homolog of NCBI NO: 21536853 NR Description: phosphoglycerate kinase, putative [Arabidopsis
  misc_feature (1)..(309): Homolog of NCBI NO: 3738257 NR Description: cytosolic phosphoglycerate kinase 1 [Populus
  misc_feature (1)..(308): Homolog of NCBI NO: 3738261 NR Description: chloroplast phosphoglycerate kinase [Populus
  misc_feature (1)..(309): Homolog of NCBI NO: 7434544 NR Description: phosphoglycerate kinase (EC 2.7.2.3) precursor,
  misc_feature (1)..(309): Homolog of NCBI NO: 3738259 NR Description: cytosolic phosphoglycerate kinase 1 [Populus
  misc_feature (1)..(309): Homolog of NCBI NO: 29124969 NR Description: 3-phosphoglycerate kinase [Populus tremuloides]
  misc_feature (1)..(309): Homolog of NCBI NO: 9230771 NR Description: cytosolic phosphoglycerate kinase [Pisum sativum]
  misc_feature (1)..(309): Homolog of NCBI NO: 2499498 NR Description: Phosphoglycerate kinase, cytosolic
  misc_feature (1)..(309): Homolog of NCBI NO: 15219412 NR Description: phosphoglycerate kinase -related [Arabidopsis
  misc_feature (1)..(309): Homolog of NCBI NO: 129916 NR Description: Phosphoglycerate kinase, cytosolic
  misc_feature (1)..(309): Homolog of NCBI NO: 9230771 NR Description: cytosolic phosphoglycerate kinase [Pisum sativum]
  misc_feature (1)..(309): Homolog of NCBI NO: 29124969 NR Description: 3-phosphoglycerate kinase [Populus tremuloides]
  misc_feature (1)..(309): Homolog of NCBI NO: 3738259 NR Description: cytosolic phosphoglycerate kinase 1 [Populus
  misc_feature (1)..(309): Homolog of NCBI NO: 7434544 NR Description: phosphoglycerate kinase (EC 2.7.2.3) precursor,
  misc_feature (1)..(308): Homolog of NCBI NO: 3738261 NR Description: chloroplast phosphoglycerate kinase [Populus
MANDCIGEEVEKLAAALPEGGVLLLENVRFYKEEEKNEPEFAKKLASVADLYVNDAFGTAHRAHASTEGVTKYLKPAVAGFLMQKELDYLVGAVANPKKPFAAIVGGSKVSTKIGVIESLLAKVDILILGGGMIYTFYKAQGYSVGKSLVEEDKLELATSLIEKAKAKGVSLLLPTDIVVADKFAADAESKIVPATAIPDDWMGLDVGPDATKTFDEALDTTKTVIWNGPMGVFEFQKFAAGTEAIAKKLAELTTTKGVTTIIGGGDSVAAVEKAGLADKMSHISTGGGASLELLEGKTLPGVLALDDA

SEQ ID NO: 4665 - DNA, 1191 bp, Zea mays subsp. mays
  misc_feature (1)..(1191): Ceres Seq. ID no. 13492990
  misc_feature: MA Experiment ID: 108527 Result: Up-regulated in Transcription
  misc_feature: MA Experiment 108527 PARAMETER Experiment Name: Zm_5mM_NO_P Parameter: Age (day) Value: 8
  misc_feature: MA Experiment 108527 PARAMETER Experiment Name: Zm_5mM_NO_P Parameter: Organism Value: Zea mays
  misc_feature: MA Experiment 108527 PARAMETER Experiment Name: Zm_5mM_NO_P Parameter: Plant Line Value: 35A19
  misc_feature: MA Experiment 108527 PARAMETER Experiment Name: Zm_5mM_NO_P Parameter: Timepoint (hr) Value: 6
  misc_feature: MA Experiment 108527 PARAMETER Experiment Name: Zm_5mM_NO_P Parameter: Tissue Value: Aerial
  misc_feature: MA Experiment 108527 PARAMETER Experiment Name: Zm_5mM_NO_P Parameter: Treatment Value: 5mM NO vs. No Treatment
  misc_feature: MA Experiment ID: 108528 Result: Down-regulated in Transcription
  misc_feature: MA Experiment 108528 PARAMETER Experiment Name: Zm_Imbibed_Seeds_P Parameter: Age (day) Value: 5 vs. 2
  misc_feature: MA Experiment 108528 PARAMETER Experiment Name: Zm_Imbibed_Seeds_P Parameter: Organism Value: Zea mays
  misc_feature: MA Experiment 108528 PARAMETER Experiment Name: Zm_Imbibed_Seeds_P Parameter: Plant Line Value: 35A19
  misc_feature: MA Experiment 108528 PARAMETER Experiment Name: Zm_Imbibed_Seeds_P Parameter: Tissue Value: Aerial vs. Embryo
  misc_feature: MA Experiment ID: 108530 Result: Down-regulated in Transcription
  misc_feature: MA Experiment 108530 PARAMETER Experiment Name: Zm_Imbibed_Seeds_P Parameter: Age (day) Value: 6 vs. 2
  misc_feature: MA Experiment 108530 PARAMETER Experiment Name: Zm_Imbibed_Seeds_P Parameter: Organism Value: Zea mays
  misc_feature: MA Experiment 108530 PARAMETER Experiment Name: Zm_Imbibed_Seeds_P Parameter: Plant Line Value: 35A19
  misc_feature: MA Experiment 108530 PARAMETER Experiment Name: Zm_Imbibed_Seeds_P Parameter: Tissue Value: Aerial vs. Embryo
  misc_feature: MA Experiment ID: 108535 Result: Up-regulated in Transcription
  misc_feature: MA Experiment 108535 PARAMETER Experiment Name: Zm_Meristem_P Parameter: Age (day) Value: 8
  misc_feature: MA Experiment 108535 PARAMETER Experiment Name: Zm_Meristem_P Parameter: Organism Value: Zea mays
  misc_feature: MA Experiment 108535 PARAMETER Experiment Name: Zm_Meristem_P Parameter: Plant Line Value: 35A19
  misc_feature: MA Experiment 108535 PARAMETER Experiment Name: Zm_Meristem_P Parameter: Tissue Value: Root Meristem vs. Above Root Meristem
  misc_feature: MA Experiment ID: 108536 Result: Down-regulated in Transcription
  misc_feature: MA Experiment 108536 PARAMETER Experiment Name: Zm_Meristem_P Parameter: Age (day) Value: 8
  misc_feature: MA Experiment 108536 PARAMETER Experiment Name: Zm_Meristem_P Parameter: Organism Value: Zea mays
  misc_feature: MA Experiment 108536 PARAMETER Experiment Name: Zm_Meristem_P Parameter: Plant Line Value: 35A19
  misc_feature: MA Experiment 108536 PARAMETER Experiment Name: Zm_Meristem_P Parameter: Tissue Value: Shoot Meristem vs. Above Shoot Meristem
  misc_feature: MA Experiment ID: 108544 Result: Down-regulated in Transcription
  misc_feature: MA Experiment ID: 108545 Result: Down-regulated in Transcription
  misc_feature: MA Experiment 108545 PARAMETER Experiment Name: Zm_Imbibed_Seeds_P Parameter: Age (day) Value: 3 vs. 2
  misc_feature: MA Experiment 108545 PARAMETER Experiment Name: Zm_Imbibed_Seeds_P Parameter: Organism Value: Zea mays
  misc_feature: MA Experiment 108545 PARAMETER Experiment Name: Zm_Imbibed_Seeds_P Parameter: Plant Line Value: 35A19
  misc_feature: MA Experiment 108545 PARAMETER Experiment Name: Zm_Imbibed_Seeds_P Parameter: Tissue Value: Aerial vs. Embryo
  misc_feature: MA Experiment ID: 108547 Result: Down-regulated in Transcription
  misc_feature: MA Experiment 108547 PARAMETER Experiment Name: Zm_Imbibed_Seeds_P Parameter: Age (day) Value: 4 vs. 2
  misc_feature: MA Experiment 108547 PARAMETER Experiment Name: Zm_Imbibed_Seeds_P Parameter: Organism Value: Zea mays
  misc_feature: MA Experiment 108547 PARAMETER Experiment Name: Zm_Imbibed_Seeds_P Parameter: Plant Line Value: 35A19
  misc_feature: MA Experiment 108547 PARAMETER Experiment Name: Zm_Imbibed_Seeds_P Parameter: Tissue Value: Aerial vs. Embryo
  misc_feature: MA Experiment ID: 108559 Result: Up-regulated in Transcription
  misc_feature: MA Experiment 108559 PARAMETER Experiment Name: Zm_5mM_NO_P Parameter: Age (day) Value: 8
  misc_feature: MA Experiment 108559 PARAMETER Experiment Name: Zm_5mM_NO_P Parameter: Organism Value: Zea mays
  misc_feature: MA Experiment 108559 PARAMETER Experiment Name: Zm_5mM_NO_P Parameter: Plant Line Value: 35A19
  misc_feature: MA Experiment 108559 PARAMETER Experiment Name: Zm_5mM_NO_P Parameter: Timepoint (hr) Value: 12
  misc_feature: MA Experiment 108559 PARAMETER Experiment Name: Zm_5mM_NO_P Parameter: Tissue Value: Aerial
  misc_feature: MA Experiment 108559 PARAMETER Experiment Name: Zm_5mM_NO_P Parameter: Treatment Value: 5mM NO vs. No Treatment
  misc_feature: MA Experiment ID: 108689 Result: Down-regulated in Transcription
  misc_feature: MA Experiment 108689 PARAMETER Experiment Name: Zm_Drought_Roots_P Parameter: Age (day) Value: 9
  misc_feature: MA Experiment 108689 PARAMETER Experiment Name: Zm_Drought_Roots_P Parameter: Organism Value: Zea mays
  misc_feature: MA Experiment 108689 PARAMETER Experiment Name: Zm_Drought_Roots_P Parameter: Plant Line Value: 35A19
  misc_feature: MA Experiment 108689 PARAMETER Experiment Name: Zm_Drought_Roots_P Parameter: Timepoint (hr) Value: 24
  misc_feature: MA Experiment 108689 PARAMETER Experiment Name: Zm_Drought_Roots_P Parameter: Tissue Value: Roots
  misc_feature: MA Experiment 108689 PARAMETER Experiment Name: Zm_Drought_Roots_P Parameter: Treatment Value: Drought vs. No Drought
  misc_feature: MA Experiment ID: 20000478 Result: Down-regulated in Transcription
  misc_feature: MA Experiment 20000478 PARAMETER Experiment Name: Zm_5mM_SA_P Parameter: Age (day) Value: 11
  misc_feature: MA Experiment 20000478 PARAMETER Experiment Name: Zm_5mM_SA_P Parameter: Organism Value: Zea mays
  misc_feature: MA Experiment 20000478 PARAMETER Experiment Name: Zm_5mM_SA_P Parameter: Plant Line Value: 35A19
  misc_feature: MA Experiment 20000478 PARAMETER Experiment Name: Zm_5mM_SA_P Parameter: Timepoint (hr) Value: 72
  misc_feature: MA Experiment 20000478 PARAMETER Experiment Name: Zm_5mM_SA_P Parameter: Tissue Value: Aerial
  misc_feature: MA Experiment 20000478 PARAMETER Experiment Name: Zm_5mM_SA_P Parameter: Treatment Value: 5mM SA vs. No Treatment
  misc_feature: MA Experiment ID: 20000479 Result: Down-regulated in Transcription
  misc_feature: MA Experiment 20000479 PARAMETER Experiment Name: Zm_Drought_P Parameter: Age (day) Value: 10
  misc_feature: MA Experiment 20000479 PARAMETER Experiment Name: Zm_Drought_P Parameter: Organism Value: Zea mays
  misc_feature: MA Experiment 20000479 PARAMETER Experiment Name: Zm_Drought_P Parameter: Plant Line Value: 35A19
  misc_feature: MA Experiment 20000479 PARAMETER Experiment Name: Zm_Drought_P Parameter: Timepoint (hr) Value: 48
  misc_feature: MA Experiment 20000479 PARAMETER Experiment Name: Zm_Drought_P Parameter: Tissue Value: Aerial
  misc_feature: MA Experiment 20000479 PARAMETER Experiment Name: Zm_Drought_P Parameter: Treatment Value: Drought vs. No Drought
  misc_feature: MA Experiment ID: 20000532 Result: Up-regulated in Transcription
  misc_feature: MA Experiment 20000532 PARAMETER Experiment Name: Zm_0.001percent_MeJA_P Parameter: Age (day) Value: 10
  misc_feature: MA Experiment 20000532 PARAMETER Experiment Name: Zm_0.001percent_MeJA_P Parameter: Organism Value: Zea mays
  misc_feature: MA Experiment 20000532 PARAMETER Experiment Name: Zm_0.001percent_MeJA_P Parameter: Plant Line Value: 35A19
  misc_feature: MA Experiment 20000532 PARAMETER Experiment Name: Zm_0.001percent_MeJA_P Parameter: Timepoint (hr) Value: 48
  misc_feature: MA Experiment 20000532 PARAMETER Experiment Name: Zm_0.001percent_MeJA_P Parameter: Tissue Value: Aerial
  misc_feature: MA Experiment 20000532 PARAMETER Experiment Name: Zm_0.001percent_MeJA_P Parameter: Treatment Value: 0.001percent MeJA vs. No Treatment
  misc_feature: MA Experiment ID: 20000533 Result: Up-regulated in Transcription
  misc_feature: MA Experiment 20000533 PARAMETER Experiment Name: Zm_0.001percent_MeJA_P Parameter: Age (day) Value: 11
  misc_feature: MA Experiment 20000533 PARAMETER Experiment Name: Zm_0.001percent_MeJA_P Parameter: Organism Value: Zea mays
  misc_feature: MA Experiment 20000533 PARAMETER Experiment Name: Zm_0.001percent_MeJA_P Parameter: Plant Line Value: 35A19
  misc_feature: MA Experiment 20000533 PARAMETER Experiment Name: Zm_0.001percent_MeJA_P Parameter: Timepoint (hr) Value: 72
  misc_feature: MA Experiment 20000533 PARAMETER Experiment Name: Zm_0.001percent_MeJA_P Parameter: Tissue Value: Aerial
  misc_feature: MA Experiment 20000533 PARAMETER Experiment Name: Zm_0.001percent_MeJA_P Parameter: Treatment Value: 0.001percent MeJA vs. No Treatment
  misc_feature: MA Experiment ID: 20000626 Result: Up-regulated in Transcription
  misc_feature: MA Experiment 20000626 PARAMETER Experiment Name: Zm_Herbicide-Treatments_P Parameter: Timepoint (hr) Value: 12
  misc_feature: MA Experiment 20000626 PARAMETER Experiment Name: Zm_Herbicide-Treatments_P Parameter: Tissue Value: Aerial
  misc_feature: MA Experiment 20000626 PARAMETER Experiment Name: Zm_Herbicide-Treatments_P Parameter: Treatment Value: Roundup vs. No Treatment
cttccagttcgcaagggtttcccagccaaagaaccagcatcctggttgtgaaaatggggggtgtgcgtagctacttcttcatcatcgccgccgcggtcgttgccgtcgtcctcgcgcttctcccggccggcgccacaggtgccggcctcaaggtcggcttctacagcaagacatgcccgtcggcggagtccctggtgcagcaggcggtggctgccgccttcaagaacaacagcggcatcgccgccggcctcatccgcctgcacttccatgactgcttcgtcaggggctgcgacggctcggtgctgatcgactcgacggcgaacaacacggcggagaaggacgcggtcccgaacaacccgagcctgcggggcttcgaggtcatcgacgccgccaagaaggcggtggaggcacggtgccccaagacggtgtcctgcgccgacatcctggcgttcgcggcgcgggacagcatcgcgctggcggggaacaacctgacgtacaaggtccccgcggggcggcgcgacgggcgggtgtccagggacacggacgccaacagcaacctcccctcgccgctctccaccgccgccgagctcgtcggcaacttcacgcgcaagaacctcaccgccgaggacatggtggtgctctccggcgcgcacaccgtcggccgctcccactgctcctccttcaccaaccgcctctacggcttcagcaacgccagcgacgtcgaccccaccatcagctccgcctacgccctcctgctgcgggccatctgcccgtccaacaccagccagttcttccccaacaccaccaccgacatggacctcatcacgcccgcgctgctcgacaacaggtactacgtcggcctcgccaacaacctcggcctcttcacgtccgaccaggctctgctcaccaacgccacgctcaagaagtccgtcgacgccttcgtcaagagcgaaagcgcgtggaagaccaagttcgccaagtccatggtcaagatgggcaatatcgacgtgctcacgggcaccaagggggagatcaggctcaactgcagggtcatcaacagcggcagcagcagctctggattattccagcttcacacggcaaccgcctctgacgaggaattcgcccacgttgcaactaactagcagctactatatctctatccgtagaggatctagtgatctactgctaccc

SEQ ID NO: 4666 - protein, 379 aa, Zea mays subsp. mays
  peptide (1)..(379): Ceres Seq. ID no. 13492991
  misc_feature (65)..(316): Pfam Name: Peroxidase Pfam Description: Peroxidase
  misc_feature (34)..(371): Homolog of NCBI NO: 34894766 NR Description: putative peroxidase [Oryza sativa (japonica >gi|13366004|dbj|BAB39281.1| putative peroxidase [Oryza sativa
  misc_feature (36)..(357): Homolog of NCBI NO: 12056452 NR Description: peroxidase [Zea mays]
  misc_feature (32)..(374): Homolog of NCBI NO: 34894752 NR Description: putative peroxidase [Oryza sativa (japonica >gi|13365997|dbj|BAB39274.1| putative peroxidase [Oryza sativa
  misc_feature (27)..(358): Homolog of NCBI NO: 34894758 NR Description: putative peroxidase [Oryza sativa (japonica >gi|13366000|dbj|BAB39277.1| putative peroxidase [Oryza sativa
  misc_feature (32)..(358): Homolog of NCBI NO: 34894760 NR Description: putative peroxidase [Oryza sativa (japonica >gi|13366001|dbj|BAB39278.1| putative peroxidase [Oryza sativa
  misc_feature (28)..(357): Homolog of NCBI NO: 34894748 NR Description: putative peroxidase [Oryza sativa (japonica >gi|22535694|dbj|BAC10867.1| putative peroxidase [Oryza sativa
  misc_feature (40)..(378): Homolog of NCBI NO: 12056448 NR Description: peroxidase [Zea mays]
  misc_feature (47)..(352): Homolog of NCBI NO: 4760700 NR Description: peroxidase 1 [Scutellaria baicalensis]
  misc_feature (16)..(352): Homolog of NCBI NO: 7453849 NR Description: peroxidase prx12 precursor [Spinacia oleracea]
  misc_feature (14)..(350): Homolog of NCBI NO: 37536450 NR Description: putative peroxidase [Oryza sativa (japonica >gi|18057099|gb|AAL58122.1| putative peroxidase [Oryza sativa
SSSQGFPSQRTSILVVKMGGVRSYFFIIAAAVVAVVLALLPAGATGAGLKVGFYSKTCPSAESLVQQAVAAAFKNNSGIAAGLIRLHFHDCFVRGCDGSVLIDSTANNTAEKDAVPNNPSLRGFEVIDAAKKAVEARCPKTVSCADILAFAARDSIALAGNNLTYKVPAGRRDGRVSRDTDANSNLPSPLSTAAELVGNFTRKNLTAEDMVVLSGAHTVGRSHCSSFTNRLYGFSNASDVDPTISSAYALLLRAICPSNTSQFFPNTTTDMDLITPALLDNRYYVGLANNLGLFTSDQALLTNATLKKSVDAFVKSESAWKTKFAKSMVKMGNIDVLTGTKGEIRLNCRVINSGSSSSGLFQLHTATASDEEFAHVATN

SEQ ID NO: 4667 - protein, 362 aa, Zea mays subsp. mays
  peptide (1)..(362): Ceres Seq. ID no. 13492992
  misc_feature (48)..(299): Pfam Name: Peroxidase Pfam Description: Peroxidase
  misc_feature (17)..(354): Homolog of NCBI NO: 34894766 NR Description: putative peroxidase [Oryza sativa (japonica >gi|13366004|dbj|BAB39281.1| putative peroxidase [Oryza sativa
  misc_feature (19)..(340): Homolog of NCBI NO: 12056452 NR Description: peroxidase [Zea mays]
  misc_feature (15)..(357): Homolog of NCBI NO: 34894752 NR Description: putative peroxidase [Oryza sativa (japonica >gi|13365997|dbj|BAB39274.1| putative peroxidase [Oryza sativa
  misc_feature (10)..(341): Homolog of NCBI NO: 34894758 NR Description: putative peroxidase [Oryza sativa (japonica >gi|13366000|dbj|BAB39277.1| putative peroxidase [Oryza sativa
  misc_feature (15)..(341): Homolog of NCBI NO: 34894760 NR Description: putative peroxidase [Oryza sativa (japonica >gi|13366001|dbj|BAB39278.1| putative peroxidase [Oryza sativa
  misc_feature (11)..(340): Homolog of NCBI NO: 34894748 NR Description: putative peroxidase [Oryza sativa (japonica >gi|22535694|dbj|BAC10867.1| putative peroxidase [Oryza sativa
  misc_feature (23)..(361): Homolog of NCBI NO: 12056448 NR Description: peroxidase [Zea mays]
  misc_feature (30)..(335): Homolog of NCBI NO: 4760700 NR Description: peroxidase 1 [Scutellaria baicalensis]
  misc_feature (1)..(335): Homolog of NCBI NO: 7453849 NR Description: peroxidase prx12 precursor [Spinacia oleracea]
  misc_feature (1)..(333): Homolog of NCBI NO: 37536450 NR Description: putative peroxidase [Oryza sativa (japonica >gi|18057099|gb|AAL58122.1| putative peroxidase [Oryza sativa
MGGVRSYFFIIAAAVVAVVLALLPAGATGAGLKVGFYSKTCPSAESLVQQAVAAAFKNNSGIAAGLIRLHFHDCFVRGCDGSVLIDSTANNTAEKDAVPNNPSLRGFEVIDAAKKAVEARCPKTVSCADILAFAARDSIALAGNNLTYKVPAGRRDGRVSRDTDANSNLPSPLSTAAELVGNFTRKNLTAEDMVVLSGAHTVGRSHCSSFTNRLYGFSNASDVDPTISSAYALLLRAICPSNTSQFFPNTTTDMDLITPALLDNRYYVGLANNLGLFTSDQALLTNATLKKSVDAFVKSESAWKTKFAKSMVKMGNIDVLTGTKGEIRLNCRVINSGSSSSGLFQLHTATASDEEFAHVATN

SEQ ID NO: 4668 - DNA, 1212 bp, Zea mays subsp. mays
  misc_feature (1)..(1212): Ceres Seq. ID no. 12349007
  misc_feature: MA Experiment ID: 20000492 Result: Up-regulated in Transcription
  misc_feature: MA Experiment 20000492 PARAMETER Experiment Name: Zm_Hybrid_Seed_Dev_P Parameter: DAP Value: 12
  misc_feature: MA Experiment 20000492 PARAMETER Experiment Name: Zm_Hybrid_Seed_Dev_P Parameter: Organism Value: Zea mays
  misc_feature: MA Experiment 20000492 PARAMETER Experiment Name: Zm_Hybrid_Seed_Dev_P Parameter: Plant Line Value: 35A19
  misc_feature: MA Experiment 20000492 PARAMETER Experiment Name: Zm_Hybrid_Seed_Dev_P Parameter: Tissue Value: Fert Kernel vs. Unfert Floret
aacggtcgcgagagtgaaggcaaggaaaaacacccaaacggccaaaccccaggaagccccgtcggaccctacagaccctaaccctagcgctcccgacgcgccgcggagcgatggcgatggacgcggagcggcggcaggcggagctgatcgcgcagttctccgctcaggcggcggcgctttcgtccgcgccccagctcgccgcgctggtgcttgaggccacctcccacccggccctcttcgccttctccgagctcctcaccctcccggccctctccaagctcactggcacgcagtacgcgtcgtcactggacttgctccggctcttcgcctacggtaccctgaatgactacaagagtaattctggattccttccagcactgttgcctgaccaggtccgaaagctaaagcagctcagcgtgctaactctggcagagtcaactaagatactaccgtatgatcagctcatgcaagagttagacgtttcaaatgtaagagaactcgaagatttcctaatcaatgagtgcatgtattcgggtatcgttagaggcaaactggatcagctgagaaggtgctttgaggtacaatttgcagctggaagagatcttacacctgatcagctaaagaacatgatagagactttgtctgattggttgggaacatcagatagactgttgcatcaaattcaggagaaaatcaagtgggctgacacaatgagtgaggtgaacaagaagcaccagaaagaatttgaagacagagtggaagaggccaaaaaatcaatcaagcaggcagacattgacttacgggggcatgacgagtttctctctgaatctggaggaataatggattttgaagaggaccgcgtccgaccaaaaaggaggaggcaaccaccggcgtagtttcaattagcccttaccaatctctcccagaatgggacctgctgataccttgattgagacattttgacgccggagttgagtaaactttgtacatctgtcgtgtgatgcctccactgtagcgagtctgtttattttgccttctggtcttggtggggacgtacaaggccaaacctaggcgttatgttgcatttatttggtagtaaatggcccatggaagaaataacgttgttatgattatggcactgggttattctcaagtgtactgaacgataacagaagcacctctgttaaatgatgattgactcgaggcttgctg

SEQ ID NO: 4669 - protein, 261 aa, Zea mays subsp. mays
  peptide (1)..(261): Ceres Seq. ID no. 12349008
  misc_feature (66)..(159): Pfam Name: PCI domain Pfam Description: PCI domain
  misc_feature (3)..(259): Homolog of NCBI NO: 18378920 NR Description: COP9 complex subunit, FUS5; protein id: supported by cDNA: 40042., supported by cDNA: gi_13937160, by cDNA: gi_18056670 [Arabidopsis thaliana]
  misc_feature (3)..(223): Homolog of NCBI NO: 30678240 NR Description: COP9 complex subunit, FUS5 [Arabidopsis thaliana]
  misc_feature (1)..(224): Homolog of NCBI NO: 37589772 NR Description: Unknown (protein for IMAGE:4786730) [Danio rerio]
  misc_feature (6)..(224): Homolog of NCBI NO: 12232385 NR Description: COP9 constitutive photomorphogenic homolog
  misc_feature (6)..(224): Homolog of NCBI NO: 15215085 NR Description: Similar to COP9 (constitutive photomorphogenic),
  misc_feature (6)..(224): Homolog of NCBI NO: 34877558 NR Description: similar to Cops7b protein [Rattus norvegicus]
  misc_feature (6)..(224): Homolog of NCBI NO: 27764886 NR Description: COP9 (constitutive photomorphogenic) homolog, expressed [Mus musculus] >gi|26349105|dbj|BAC38192.1| unnamed
  misc_feature (6)..(224): Homolog of NCBI NO: 3309176 NR Description: COP9 complex subunit 7b [Mus musculus]
  misc_feature (18)..(229): Homolog of NCBI NO: 31239493 NR Description: ENSANGP00000011626 [Anopheles gambiae]
  misc_feature (7)..(224): Homolog of NCBI NO: 34858454 NR Description: similar to COP9 complex subunit 7a; COP9 photomorphogenic, Arabidopsis, homolog) subunit 7A [Rattus
MAMDAERRQAELIAQFSAQAAALSSAPQLAALVLEATSHPALFAFSELLTLPALSKLTGTQYASSLDLLRLFAYGTLNDYKSNSGFLPALLPDQVRKLKQLSVLTLAESTKILPYDQLMQELDVSNVRELEDFLINECMYSGIVRGKLDQLRRCFEVQFAAGRDLTPDQLKNMIETLSDWLGTSDRLLHQIQEKIKWADTMSEVNKKHQKEFEDRVEEAKKSIKQADIDLRGHDEFLSESGGIMDFEEDRVRPKRRRQPPA

SEQ ID NO: 4670 - protein, 259 aa, Zea mays subsp. mays
  peptide (1)..(259): Ceres Seq. ID no. 12349009
  misc_feature (64)..(157): Pfam Name: PCI domain Pfam Description: PCI domain
  misc_feature (4)..(222): Homolog of NCBI NO: 12232385 NR Description: COP9 constitutive photomorphogenic homolog
  misc_feature (4)..(222): Homolog of NCBI NO: 15215085 NR Description: Similar to COP9 (constitutive photomorphogenic),
  misc_feature (4)..(222): Homolog of NCBI NO: 34877558 NR Description: similar to Cops7b protein [Rattus norvegicus]
  misc_feature (4)..(222): Homolog of NCBI NO: 27764886 NR Description: COP9 (constitutive photomorphogenic) homolog, expressed [Mus musculus] >gi|26349105|dbj|BAC38192.1| unnamed
  misc_feature (1)..(221): Homolog of NCBI NO: 30678240 NR Description: COP9 complex subunit, FUS5 [Arabidopsis thaliana]
  misc_feature (1)..(222): Homolog of NCBI NO: 37589772 NR Description: Unknown (protein for IMAGE:4786730) [Danio rerio]
  misc_feature (1)..(257): Homolog of NCBI NO: 18378920 NR Description: COP9 complex subunit, FUS5; protein id: supported by cDNA: 40042., supported by cDNA: gi_13937160, by cDNA: gi_18056670 [Arabidopsis thaliana]
  misc_feature (4)..(222): Homolog of NCBI NO: 3309176 NR Description: COP9 complex subunit 7b [Mus musculus]
  misc_feature (16)..(227): Homolog of NCBI NO: 31239493 NR Description: ENSANGP00000011626 [Anopheles gambiae]
  misc_feature (5)..(222): Homolog of NCBI NO: 34858454 NR Description: similar to COP9 complex subunit 7a; COP9 photomorphogenic, Arabidopsis, homolog) subunit 7A [Rattus
MDAERRQAELIAQFSAQAAALSSAPQLAALVLEATSHPALFAFSELLTLPALSKLTGTQYASSLDLLRLFAYGTLNDYKSNSGFLPALLPDQVRKLKQLSVLTLAESTKILPYDQLMQELDVSNVRELEDFLINECMYSGIVRGKLDQLRRCFEVQFAAGRDLTPDQLKNMIETLSDWLGTSDRLLHQIQEKIKWADTMSEVNKKHQKEFEDRVEEAKKSIKQADIDLRGHDEFLSESGGIMDFEEDRVRPKRRRQPPA

SEQ ID NO: 4671 - protein, 143 aa, Zea mays subsp. mays
  peptide (1)..(143): Ceres Seq. ID no. 12349010
  misc_feature (1)..(141): Homolog of NCBI NO: 18378920 NR Description: COP9 complex subunit, FUS5; protein id: supported by cDNA: 40042., supported by cDNA: gi_13937160, by cDNA: gi_18056670 [Arabidopsis thaliana]
  misc_feature (1)..(105): Homolog of NCBI NO: 30678240 NR Description: COP9 complex subunit, FUS5 [Arabidopsis thaliana]
  misc_feature (1)..(106): Homolog of NCBI NO: 37589772 NR Description: Unknown (protein for IMAGE:4786730) [Danio rerio]
  misc_feature (1)..(106): Homolog of NCBI NO: 12232385 NR Description: COP9 constitutive photomorphogenic homolog
  misc_feature (1)..(106): Homolog of NCBI NO: 15215085 NR Description: Similar to COP9 (constitutive photomorphogenic),
  misc_feature (1)..(106): Homolog of NCBI NO: 34877558 NR Description: similar to Cops7b protein [Rattus norvegicus]
  misc_feature (1)..(106): Homolog of NCBI NO: 27764886 NR Description: COP9 (constitutive photomorphogenic) homolog, expressed [Mus musculus] >gi|26349105|dbj|BAC38192.1| unnamed
  misc_feature (1)..(106): Homolog of NCBI NO: 3309176 NR Description: COP9 complex subunit 7b [Mus musculus]
  misc_feature (1)..(111): Homolog of NCBI NO: 31239493 NR Description: ENSANGP00000011626 [Anopheles gambiae]
  misc_feature (1)..(106): Homolog of NCBI NO: 34858454 NR Description: similar to COP9 complex subunit 7a; COP9 photomorphogenic, Arabidopsis, homolog) subunit 7A [Rattus
MQELDVSNVRELEDFLINECMYSGIVRGKLDQLRRCFEVQFAAGRDLTPDQLKNMIETLSDWLGTSDRLLHQIQEKIKWADTMSEVNKKHQKEFEDRVEEAKKSIKQADIDLRGHDEFLSESGGIMDFEEDRVRPKRRRQPPA

SEQ ID NO: 4672 - DNA, 1725 bp, Zea mays subsp. mays
  misc_feature (1)..(1725): Ceres Seq. ID no. 13577779
  misc_feature: MA Experiment ID: 108540 Result: Down-regulated in Transcription
  misc_feature: MA Experiment 108540 PARAMETER Experiment Name: Zm_20percent_PEG_P Parameter: Age (day) Value: 8
  misc_feature: MA Experiment 108540 PARAMETER Experiment Name: Zm_20percent_PEG_P Parameter: Organism Value: Zea mays
  misc_feature: MA Experiment 108540 PARAMETER Experiment Name: Zm_20percent_PEG_P Parameter: Plant Line Value: 35A19
  misc_feature: MA Experiment 108540 PARAMETER Experiment Name: Zm_20percent_PEG_P Parameter: Timepoint (hr) Value: 6
  misc_feature: MA Experiment 108540 PARAMETER Experiment Name: Zm_20percent_PEG_P Parameter: Tissue Value: Aerial
  misc_feature: MA Experiment 108540 PARAMETER Experiment Name: Zm_20percent_PEG_P Parameter: Treatment Value: 20percent PEG vs. No Treatment
  misc_feature: MA Experiment ID: 108544 Result: Down-regulated in Transcription
  misc_feature: MA Experiment ID: 108556 Result: Down-regulated in Transcription
  misc_feature: MA Experiment 108556 PARAMETER Experiment Name: Zm_Drought_P Parameter: Age (day) Value: 9
  misc_feature: MA Experiment 108556 PARAMETER Experiment Name: Zm_Drought_P Parameter: Organism Value: Zea mays
  misc_feature: MA Experiment 108556 PARAMETER Experiment Name: Zm_Drought_P Parameter: Plant Line Value: 35A19
  misc_feature: MA Experiment 108556 PARAMETER Experiment Name: Zm_Drought_P Parameter: Timepoint (hr) Value: 24
  misc_feature: MA Experiment 108556 PARAMETER Experiment Name: Zm_Drought_P Parameter: Tissue Value: Aerial
  misc_feature: MA Experiment 108556 PARAMETER Experiment Name: Zm_Drought_P Parameter: Treatment Value: Drought vs. No Drought
  misc_feature: MA Experiment ID: 20000477 Result: Down-regulated in Transcription
  misc_feature: MA Experiment 20000477 PARAMETER Experiment Name: Zm_5mM_SA_P Parameter: Age (day) Value: 10
  misc_feature: MA Experiment 20000477 PARAMETER Experiment Name: Zm_5mM_SA_P Parameter: Organism Value: Zea mays
  misc_feature: MA Experiment 20000477 PARAMETER Experiment Name: Zm_5mM_SA_P Parameter: Plant Line Value: 35A19
  misc_feature: MA Experiment 20000477 PARAMETER Experiment Name: Zm_5mM_SA_P Parameter: Timepoint (hr) Value: 48
  misc_feature: MA Experiment 20000477 PARAMETER Experiment Name: Zm_5mM_SA_P Parameter: Tissue Value: Aerial
  misc_feature: MA Experiment 20000477 PARAMETER Experiment Name: Zm_5mM_SA_P Parameter: Treatment Value: 5mM SA vs. No Treatment
  misc_feature: MA Experiment ID: 20000478 Result: Down-regulated in Transcription
  misc_feature: MA Experiment 20000478 PARAMETER Experiment Name: Zm_5mM_SA_P Parameter: Age (day) Value: 11
  misc_feature: MA Experiment 20000478 PARAMETER Experiment Name: Zm_5mM_SA_P Parameter: Organism Value: Zea mays
  misc_feature: MA Experiment 20000478 PARAMETER Experiment Name: Zm_5mM_SA_P Parameter: Plant Line Value: 35A19
  misc_feature: MA Experiment 20000478 PARAMETER Experiment Name: Zm_5mM_SA_P Parameter: Timepoint (hr) Value: 72
  misc_feature: MA Experiment 20000478 PARAMETER Experiment Name: Zm_5mM_SA_P Parameter: Tissue Value: Aerial
  misc_feature: MA Experiment 20000478 PARAMETER Experiment Name: Zm_5mM_SA_P Parameter: Treatment Value: 5mM SA vs. No Treatment
  misc_feature: MA Experiment ID: 20000479 Result: Down-regulated in Transcription
  misc_feature: MA Experiment 20000479 PARAMETER Experiment Name: Zm_Drought_P Parameter: Age (day) Value: 10
  misc_feature: MA Experiment 20000479 PARAMETER Experiment Name: Zm_Drought_P Parameter: Organism Value: Zea mays
  misc_feature: MA Experiment 20000479 PARAMETER Experiment Name: Zm_Drought_P Parameter: Plant Line Value: 35A19
  misc_feature: MA Experiment 20000479 PARAMETER Experiment Name: Zm_Drought_P Parameter: Timepoint (hr) Value: 48
  misc_feature: MA Experiment 20000479 PARAMETER Experiment Name: Zm_Drought_P Parameter: Tissue Value: Aerial
  misc_feature: MA Experiment 20000479 PARAMETER Experiment Name: Zm_Drought_P Parameter: Treatment Value: Drought vs. No Drought
  misc_feature: MA Experiment ID: 20000492 Result: Up-regulated in Transcription
  misc_feature: MA Experiment 20000492 PARAMETER Experiment Name: Zm_Hybrid_Seed_Dev_P Parameter: DAP Value: 12
  misc_feature: MA Experiment 20000492 PARAMETER Experiment Name: Zm_Hybrid_Seed_Dev_P Parameter: Organism Value: Zea mays
  misc_feature: MA Experiment 20000492 PARAMETER Experiment Name: Zm_Hybrid_Seed_Dev_P Parameter: Plant Line Value: 35A19
  misc_feature: MA Experiment 20000492 PARAMETER Experiment Name: Zm_Hybrid_Seed_Dev_P Parameter: Tissue Value: Fert Kernel vs. Unfert Floret
  misc_feature: MA Experiment ID: 20000632 Result: Down-regulated in Transcription
  misc_feature: MA Experiment 20000632 PARAMETER Experiment Name: Zm_Herbicide-Treatments_P Parameter: Timepoint (hr) Value: 4
  misc_feature: MA Experiment 20000632 PARAMETER Experiment Name: Zm_Herbicide-Treatments_P Parameter: Tissue Value: Aerial
  misc_feature: MA Experiment 20000632 PARAMETER Experiment Name: Zm_Herbicide-Treatments_P Parameter: Treatment Value: Glean vs. No Treatment
  misc_feature: MA Experiment ID: 20000633 Result: Down-regulated in Transcription
  misc_feature: MA Experiment 20000633 PARAMETER Experiment Name: Zm_Herbicide-Treatments_P Parameter: Timepoint (hr) Value: 4
  misc_feature: MA Experiment 20000633 PARAMETER Experiment Name: Zm_Herbicide-Treatments_P Parameter: Tissue Value: Aerial
  misc_feature: MA Experiment 20000633 PARAMETER Experiment Name: Zm_Herbicide-Treatments_P Parameter: Treatment Value: Trimec vs. No Treatment
  misc_feature: MA Experiment ID: 20001614 Result: Up-regulated in Transcription
  misc_feature: MA Experiment 20001614 PARAMETER Experiment Name: Zm_50ppm_KNO3_L-to-H_P Parameter: Age (day) Value: 21
  misc_feature: MA Experiment 20001614 PARAMETER Experiment Name: Zm_50ppm_KNO3_L-to-H_P Parameter: Organism Value: Zea mays
  misc_feature: MA Experiment 20001614 PARAMETER Experiment Name: Zm_50ppm_KNO3_L-to-H_P Parameter: Plant Line Value: 35A19
  misc_feature: MA Experiment 20001614 PARAMETER Experiment Name: Zm_50ppm_KNO3_L-to-H_P Parameter: Timepoint (hr) Value: 48
  misc_feature: MA Experiment 20001614 PARAMETER Experiment Name: Zm_50ppm_KNO3_L-to-H_P Parameter: Tissue Value: Roots
  misc_feature: MA Experiment 20001614 PARAMETER Experiment Name: Zm_50ppm_KNO3_L-to-H_P Parameter: Treatment Value: 50ppm KNO3 vs. 50ppm KCl
gaccgttgtgcttgcggcttcgctcgttcccctccaccactccgtctccttcctattgctgagtgcggcacccttgcctataataaaccccgccgcacgcccgcaccggagaagaaagctcccaagtcccaatccacgttcctcgccccctgccgctccggagagtcatggccaccgccgtttccacccccgcggacctgtcgcccacgcctgccccgagacggcggggccggccgccgaagaaccccgccccagccgaggccccaggcagcccggcggaccaagcggaggtgattggggactacgagcgcgagagggacgcgaggatccgggagaacatggagcggatgcagaagctcggcatcctcgacctcgcgcacaccctcagccactgcgccgccgcctcgggtctgggtaccggcagcgggcggtggcgccggaagcccgtggagccggggtctgctggtggggccagggtgaagcccgcgtcgccggcgccctcgcggagatcgctcaggttgaaggacgtggaaccggttacctatcgtgaaattgagccaaagaaagagaaacgctctgaaggtggcaaaactgttttaatggaggtgggagccaaggaagaaatatacactgaagagcatgacaagcttttgggtacatgcaacactccttggactctctttgttgatggttatggcaaagatggaaaacgcatttatgatcaagtgaggggtcaaacctgtcatcagtgccgtcagaagactcttggtcatcatacaagctgctgtaaatgccagattgtccaaggacagttctgtggagactgtttgtacatgaggtatggtgaaaatgtgttagaggttaagaagaatcctaactggatatgtccagtttgccgtggcatctgtaattgcagtctatgcagaactaagaaaggatggttccctactgggtctgcgtataggaaggcgatcggacttgggtacaaatctgtggcacactttctaattgcaacacatcgagcatcatcagtcaattcaagctcagtcgacaataacaagctgccgtttgctaaatctgaaacctcgtgcatttctgaccatgccaatgagagcccagaggatggagaaacgaccagcaaagctaagcagaacaaagcaactcgccgccgagtgaggaagagttctgatggcgacaacgatagcagaagtgggtccgtggtgacatctgactgccaggatgatcaagccaacaaggatgctgggtgtgtgactccgtcgtctaagccagcgtcaacgaagaggaagtacgttgaacgaagccctgactgcatcgcaagcaggctgcggtctcggctcaatatgccatgagcccatgaagatgtgatcaggatcatgtatctcttttactgcctgaccgcaggctctgtcccttcttgcgatgatgttgtggctctttcatctacaagcagttcatggtttgccagtaacgatgttctgcgcgagtaagaaggtgattgttatagtctcttgcgcagctgtgttaagagcttgaaactagactcagtcatgtgtagtatttgtaccattagtgccaactgtggtctctggcattagtgcctactgtggtttgtgagctatgagttgacgcgatagcctgtagctttaatgtacaattcatgatatgcaagtgaatatgttcattttcagctggaaagaaaaaagg

SEQ ID NO: 4673 - protein, 400 aa, Zea mays subsp. mays
  peptide (1)..(400): Ceres Seq. ID no. 13577780
  misc_feature (15)..(312): Homolog of NCBI NO: 30690864 NR Description: expressed protein [Arabidopsis thaliana]
  misc_feature (118)..(312): Homolog of NCBI NO: 25407788 NR Description: hypothetical protein AT4g37110 [imported] - thaliana >gi|4006866|emb|CAB16784.1| putative protein thaliana] >gi|7270660|emb|CAB80377.1| putative protein
  misc_feature (46)..(377): Homolog of NCBI NO: 15227848 NR Description: hypothetical protein [Arabidopsis thaliana]
  misc_feature (182)..(280): Homolog of NCBI NO: 11360288 NR Description: hypothetical protein DKFZp762L0311.1 - human
  misc_feature (1)..(280): Homolog of NCBI NO: 22122529 NR Description: hypothetical protein MGC11998 [Mus musculus]
  misc_feature (181)..(280): Homolog of NCBI NO: 15929382 NR Description: Unknown (protein for IMAGE:3829029) [Homo sapiens]
  misc_feature (182)..(280): Homolog of NCBI NO: 27651995 NR Description: transcription factor RAM2 splice variant b [Homo
  misc_feature (180)..(280): Homolog of NCBI NO: 15220539 NR Description: F12A21.9 [Arabidopsis thaliana]
  misc_feature (181)..(280): Homolog of NCBI NO: 22027514 NR Description: cell division cycle associated protein 7 isoform
  misc_feature (180)..(341): Homolog of NCBI NO: 9828631 NR Description: F1N21.9 [Arabidopsis thaliana]
MATAVSTPADLSPTPAPRRRGRPPKNPAPAEAPGSPADQAEVIGDYERERDARIRENMERMQKLGILDLAHTLSHCAAASGLGTGSGRWRRKPVEPGSAGGARVKPASPAPSRRSLRLKDVEPVTYREIEPKKEKRSEGGKTVLMEVGAKEEIYTEEHDKLLGTCNTPWTLFVDGYGKDGKRIYDQVRGQTCHQCRQKTLGHHTSCCKCQIVQGQFCGDCLYMRYGENVLEVKKNPNWICPVCRGICNCSLCRTKKGWFPTGSAYRKAIGLGYKSVAHFLIATHRASSVNSSSVDNNKLPFAKSETSCISDHANESPEDGETTSKAKQNKATRRRVRKSSDGDNDSRSGSVVTSDCQDDQANKDAGCVTPSSKPASTKRKYVERSPDCIASRLRSRLNMP

SEQ ID NO: 4674 - protein, 343 aa, Zea mays subsp. mays
  peptide (1)..(343): Ceres Seq. ID no. 13577781
  misc_feature (1)..(255): Homolog of NCBI NO: 30690864 NR Description: expressed protein [Arabidopsis thaliana]
  misc_feature (61)..(255): Homolog of NCBI NO: 25407788 NR Description: hypothetical protein AT4g37110 [imported] - thaliana >gi|4006866|emb|CAB16784.1| putative protein thaliana] >gi|7270660|emb|CAB80377.1| putative protein
  misc_feature (1)..(320): Homolog of NCBI NO: 15227848 NR Description: hypothetical protein [Arabidopsis thaliana]
  misc_feature (125)..(223): Homolog of NCBI NO: 11360288 NR Description: hypothetical protein DKFZp762L0311.1 - human
  misc_feature (1)..(223): Homolog of NCBI NO: 22122529 NR Description: hypothetical protein MGC11998 [Mus musculus]
  misc_feature (124)..(223): Homolog of NCBI NO: 15929382 NR Description: Unknown (protein for IMAGE:3829029) [Homo sapiens]
  misc_feature (125)..(223): Homolog of NCBI NO: 27651995 NR Description: transcription factor RAM2 splice variant b [Homo
  misc_feature (123)..(223): Homolog of NCBI NO: 15220539 NR Description: F12A21.9 [Arabidopsis thaliana]
  misc_feature (124)..(223): Homolog of NCBI NO: 22027514 NR Description: cell division cycle associated protein 7 isoform
  misc_feature (123)..(284): Homolog of NCBI NO: 9828631 NR Description: F1N21.9 [Arabidopsis thaliana]
MERMQKLGILDLAHTLSHCAAASGLGTGSGRWRRKPVEPGSAGGARVKPASPAPSRRSLRLKDVEPVTYREIEPKKEKRSEGGKTVLMEVGAKEEIYTEEHDKLLGTCNTPWTLFVDGYGKDGKRIYDQVRGQTCHQCRQKTLGHHTSCCKCQIVQGQFCGDCLYMRYGENVLEVKKNPNWICPVCRGICNCSLCRTKKGWFPTGSAYRKAIGLGYKSVAHFLIATHRASSVNSSSVDNNKLPFAKSETSCISDHANESPEDGETTSKAKQNKATRRRVRKSSDGDNDSRSGSVVTSDCQDDQANKDAGCVTPSSKPASTKRKYVERSPDCIASRLRSRLNMP

SEQ ID NO: 4675 - protein, 340 aa, Zea mays subsp. mays
  peptide (1)..(340): Ceres Seq. ID no. 13577782
  misc_feature (1)..(252): Homolog of NCBI NO: 30690864 NR Description: expressed protein [Arabidopsis thaliana]
  misc_feature (58)..(252): Homolog of NCBI NO: 25407788 NR Description: hypothetical protein AT4g37110 [imported] - thaliana >gi|4006866|emb|CAB16784.1| putative protein thaliana] >gi|7270660|emb|CAB80377.1| putative protein
  misc_feature (1)..(317): Homolog of NCBI NO: 15227848 NR Description: hypothetical protein [Arabidopsis thaliana]
  misc_feature (122)..(220): Homolog of NCBI NO: 11360288 NR Description: hypothetical protein DKFZp762L0311.1 - human
  misc_feature (1)..(220): Homolog of NCBI NO: 22122529 NR Description: hypothetical protein MGC11998 [Mus musculus]
  misc_feature (121)..(220): Homolog of NCBI NO: 15929382 NR Description: Unknown (protein for IMAGE:3829029) [Homo sapiens]
  misc_feature (122)..(220): Homolog of NCBI NO: 27651995 NR Description: transcription factor RAM2 splice variant b [Homo
  misc_feature (120)..(220): Homolog of NCBI NO: 15220539 NR Description: F12A21.9 [Arabidopsis thaliana]
  misc_feature (121)..(220): Homolog of NCBI NO: 22027514 NR Description: cell division cycle associated protein 7 isoform
  misc_feature (120)..(281): Homolog of NCBI NO: 9828631 NR Description: F1N21.9 [Arabidopsis thaliana]
MQKLGILDLAHTLSHCAAASGLGTGSGRWRRKPVEPGSAGGARVKPASPAPSRRSLRLKDVEPVTYREIEPKKEKRSEGGKTVLMEVGAKEEIYTEEHDKLLGTCNTPWTLFVDGYGKDGKRIYDQVRGQTCHQCRQKTLGHHTSCCKCQIVQGQFCGDCLYMRYGENVLEVKKNPNWICPVCRGICNCSLCRTKKGWFPTGSAYRKAIGLGYKSVAHFLIATHRASSVNSSSVDNNKLPFAKSETSCISDHANESPEDGETTSKAKQNKATRRRVRKSSDGDNDSRSGSVVTSDCQDDQANKDAGCVTPSSKPASTKRKYVERSPDCIASRLRSRLNMP

SEQ ID NO: 4676 - DNA, 1020 bp, Zea mays subsp. mays
  misc_feature (1)..(1020): Ceres Seq. ID no. 12566601
  misc_feature: MA Experiment ID: 108529 Result: Down-regulated in Transcription
  misc_feature: MA Experiment 108529 PARAMETER Experiment Name: Zm_Imbibed_Seeds_P Parameter: Age (day) Value: 5 vs. 2
  misc_feature: MA Experiment 108529 PARAMETER Experiment Name: Zm_Imbibed_Seeds_P Parameter: Organism Value: Zea mays
  misc_feature: MA Experiment 108529 PARAMETER Experiment Name: Zm_Imbibed_Seeds_P Parameter: Plant Line Value: 35A19
  misc_feature: MA Experiment 108529 PARAMETER Experiment Name: Zm_Imbibed_Seeds_P Parameter: Tissue Value: Roots vs. Embryo
  misc_feature: MA Experiment ID: 108535 Result: Up-regulated in Transcription
  misc_feature: MA Experiment 108535 PARAMETER Experiment Name: Zm_Meristem_P Parameter: Age (day) Value: 8
  misc_feature: MA Experiment 108535 PARAMETER Experiment Name: Zm_Meristem_P Parameter: Organism Value: Zea mays
  misc_feature: MA Experiment 108535 PARAMETER Experiment Name: Zm_Meristem_P Parameter: Plant Line Value: 35A19
  misc_feature: MA Experiment 108535 PARAMETER Experiment Name: Zm_Meristem_P Parameter: Tissue Value: Root Meristem vs. Above Root Meristem
agacacccatactgattcgctggcggcaggccgacggctacggagacggaagtggcgaccggttccggcgaggcgcaggcgacagataggggacagggcgaccatttctagcgaggcaggagcgcgggaagatccggaagctgcgatgtcgaagcggctgctgtcgcggctgctcggcatgttccaatcgcggacgcaggtgggcgtcgacaaggccggcaaccgctacttcacccgcgttgaggaggtcgacggcacaatgaaggagaggcgctgggtggagttcaagggcgcagaccaggactcgaccaccgttccagtcgagtggatttgctggctgaatggccaaaggaagaaagctccaacaccagaggaattggctgagctggaggcaagacgtgaacgtgtcaagcaaaacattcagcttctcaaaaagaaagaagaagaggaaagaaaaactggtatccaaccagtcaagaaaattgggaaagctgaatctccaaatctccaaagtttcgtgaagcagcagttctcgggtactcctccagatcagcagaaagttaacactctaggacctgaggataggcctaaggacacaactcatacagaagatgctacgacagacaatgagaggtatactgaaccaacgggaactggtgccactttcaagccagggacttggcagccaccaacatgaatgccaacatgaactttagaagatgaaggacggtgtaccggagcattttcctttcacctatctgtgtaacattttaacatttgctctgaaagaatcactagcctatgttccttctttcagatggttacccatctgatggagttatagccttaagttccttcttttagatgcttacccatctgatggagttataggtgatcgggggctcccacggtatgctgttttttttgtggctaaattgtcctctgtaatctttactgtgatagcaactgtaataaactggaccagtgttttgcttcagggctctcttagagacactgttc

SEQ ID NO: 4677 - protein, 231 aa, Zea mays subsp. mays
  peptide (1)..(231): Ceres Seq. ID no. 12566602
  misc_feature (52)..(231): Homolog of NCBI NO: 30687433 NR Description: NADH:ubiquinone oxidoreductase family thaliana] >gi|19347747|gb|AAL86298.1| unknown protein thaliana] >gi|22136740|gb|AAM91689.1| unknown protein
  misc_feature (64)..(197): Homolog of NCBI NO: 34854147 NR Description: hypothetical protein XP_342191 [Rattus norvegicus]
  misc_feature (52)..(203): Homolog of NCBI NO: 29789409 NR Description: hypothetical protein LOC91942 [Homo sapiens]
DTHTDSLAAGRRLRRRKWRPVPARRRRQIGDRATISSEAGAREDPEAAMSKRLLSRLLGMFQSRTQVGVDKAGNRYFTRVEEVDGTMKERRWVEFKGADQDSTTVPVEWICWLNGQRKKAPTPEELAELEARRERVKQNIQLLKKKEEEERKTGIQPVKKIGKAESPNLQSFVKQQFSGTPPDQQKVNTLGPEDRPKDTTHTEDATTDNERYTEPTGTGATFKPGTWQPPT

SEQ ID NO: 4678 - protein, 183 aa, Zea mays subsp. mays
  peptide (1)..(183): Ceres Seq. ID no. 12566603
  misc_feature (4)..(183): Homolog of NCBI NO: 30687433 NR Description: NADH:ubiquinone oxidoreductase family thaliana] >gi|19347747|gb|AAL86298.1| unknown protein thaliana] >gi|22136740|gb|AAM91689.1| unknown protein
  misc_feature (16)..(149): Homolog of NCBI NO: 34854147 NR Description: hypothetical protein XP_342191 [Rattus norvegicus]
  misc_feature (4)..(155): Homolog of NCBI NO: 29789409 NR Description: hypothetical protein LOC91942 [Homo sapiens]
MSKRLLSRLLGMFQSRTQVGVDKAGNRYFTRVEEVDGTMKERRWVEFKGADQDSTTVPVEWICWLNGQRKKAPTPEELAELEARRERVKQNIQLLKKKEEEERKTGIQPVKKIGKAESPNLQSFVKQQFSGTPPDQQKVNTLGPEDRPKDTTHTEDATTDNERYTEPTGTGATFKPGTWQPPT

SEQ ID NO: 4679 - protein, 172 aa, Zea mays subsp. mays
  peptide (1)..(172): Ceres Seq. ID no. 12566604
  misc_feature (1)..(172): Homolog of NCBI NO: 30687433 NR Description: NADH:ubiquinone oxidoreductase family thaliana] >gi|19347747|gb|AAL86298.1| unknown protein thaliana] >gi|22136740|gb|AAM91689.1| unknown protein
  misc_feature (5)..(138): Homolog of NCBI NO: 34854147 NR Description: hypothetical protein XP_342191 [Rattus norvegicus]
  misc_feature (1)..(144): Homolog of NCBI NO: 29789409 NR Description: hypothetical protein LOC91942 [Homo sapiens]
MFQSRTQVGVDKAGNRYFTRVEEVDGTMKERRWVEFKGADQDSTTVPVEWICWLNGQRKKAPTPEELAELEARRERVKQNIQLLKKKEEEERKTGIQPVKKIGKAESPNLQSFVKQQFSGTPPDQQKVNTLGPEDRPKDTTHTEDATTDNERYTEPTGTGATFKPGTWQPPT

SEQ ID NO: 4680 - DNA, 800 bp, Zea mays subsp. mays
  misc_feature (1)..(800): Ceres Seq. ID no. 12409878
  misc_feature: MA Experiment ID: 20000108 Result: Down-regulated in Transcription
  misc_feature: MA Experiment 20000108 PARAMETER Experiment Name: Zm_Root-Tips_P Parameter: Age (day) Value: 12
  misc_feature: MA Experiment 20000108 PARAMETER Experiment Name: Zm_Root-Tips_P Parameter: Organism Value: Zea mays
  misc_feature: MA Experiment 20000108 PARAMETER Experiment Name: Zm_Root-Tips_P Parameter: Tissue Value: Root tips vs. Root mid region    35
  misc_feature: MA Experiment 20000108 PARAMETER Experiment Name: Zm_Root-Tips_P Parameter: Tissue Value: Root tips vs. Root mid region   Sequence Listing-Misc Features (4)
ggtttctctgattctctccctcccttgccttcgtctccgcctccgtctttcctcaagaagtcgattcccttccccaagaacccaagcccctaccatgacaagctcctcctctccttcccgaaaggcgctgagcaagatcgcttgcaatcggctgcagaaggaactcgccgagtggcaactcagcccccctgctggattcaagcacaaggtctccgataacctacaaaggtgggtaattgaggtcactggagcggcgggcaccctttacgccggcgagacctaccagttgcaggttgacttccctgagcattatcctatggaggcacctcaggtcatttttctcaatccagcgccaatgcatccacacatctacagcaacgggcacatctgcttagatattttgtatgactcgtggtctccagcgatgaccgtgagctctgtctgtatcagtatcctgtctatgttgtctagttcgccagcaaagcaacgtccagtggacaatgaccgctatgtcaggaactgccgcaacgggaggtcgccgaaggagaccagatggtggttccatgacgacacggtgtaattgagcgcctgacagccttccttgctgtggtatatctcgtcaaggggagattggggatgatttaggcctatttgtaagcatccctctatcggattgcgaagcttaccttgctgtggtggtgtgttaaatgagttgcacacatgtgtcgagtctgagaatacatattaccatcatcaatgatataagtaatatagaataagcatgagtgtaccctgcctgc

SEQ ID NO: 4681 - protein, 192 aa, Zea mays subsp. mays
  peptide (1)..(192): Ceres Seq. ID no. 12409879
  misc_feature (32)..(192): Homolog of NCBI NO: 481811 NR Description: ubiquitin-conjugating enzyme UBC2-1 - Arabidopsis
  misc_feature (32)..(192): Homolog of NCBI NO: 18401461 NR Description: E2, ubiquitin-conjugating enzyme 15 (UBC15);
  misc_feature (32)..(192): Homolog of NCBI NO: 18422281 NR Description: E2, ubiquitin-conjugating enzyme 18 (UBC18); id: At5g42990.1, supported by cDNA: gi_16648721, supported by gi_20856299 [Arabidopsis thaliana] >gi|9758588|dbj|BAB09201.1|
  misc_feature (32)..(192): Homolog of NCBI NO: 18410856 NR Description: E2, ubiquitin-conjugating enzyme 16 (UBC16); id: At1g75440.1, supported by cDNA: gi_17529345, supported by
  misc_feature (32)..(192): Homolog of NCBI NO: 4090259 NR Description: ubiquitin-conjugating enzyme E2 [Pseudotsuga
  misc_feature (32)..(192): Homolog of NCBI NO: 2801444 NR Description: ubiquitin-conjugating enzyme 16 [Arabidopsis
  misc_feature (32)..(192): Homolog of NCBI NO: 18419831 NR Description: E2, ubiquitin-conjugating enzyme 17 (UBC17); id: At4g36410.1, supported by cDNA: 40968., supported by cDNA:
  misc_feature (32)..(161): Homolog of NCBI NO: 34897008 NR Description: putative ubiquitin-conjugating enzyme E2 [Oryza
  misc_feature (96)..(192): Homolog of NCBI NO: 25293670 NR Description: ubiquitin-conjugating enzyme 18 [imported] -
  misc_feature (32)..(133): Homolog of NCBI NO: 25293672 NR Description: protein F27F5.13 [imported] - Arabidopsis >gi|7767660|gb|AAF69157.1|AC007915_9 F27F5.13 [Arabidopsis
VSLILSLPCLRLRLRLSSRSRFPSPRTQAPTMTSSSSPSRKALSKIACNRLQKELAEWQLSPPAGFKHKVSDNLQRWVIEVTGAAGTLYAGETYQLQVDFPEHYPMEAPQVIFLNPAPMHPHIYSNGHICLDILYDSWSPAMTVSSVCISILSMLSSSPAKQRPVDNDRYVRNCRNGRSPKETRWWFHDDTV

SEQ ID NO: 4682 - protein, 161 aa, Zea mays subsp. mays
  peptide (1)..(161): Ceres Seq. ID no. 12409880
  misc_feature (1)..(161): Homolog of NCBI NO: 481811 NR Description: ubiquitin-conjugating enzyme UBC2-1 - Arabidopsis
  misc_feature (1)..(161): Homolog of NCBI NO: 18401461 NR Description: E2, ubiquitin-conjugating enzyme 15 (UBC15);
  misc_feature (1)..(161): Homolog of NCBI NO: 18422281 NR Description: E2, ubiquitin-conjugating enzyme 18 (UBC18); id: At5g42990.1, supported by cDNA: gi_16648721, supported by gi_20856299 [Arabidopsis thaliana] >gi|9758588|dbj|BAB09201.1|
  misc_feature (1)..(161): Homolog of NCBI NO: 18410856 NR Description: E2, ubiquitin-conjugating enzyme 16 (UBC16); id: At1g75440.1, supported by cDNA: gi_17529345, supported by
  misc_feature (1)..(161): Homolog of NCBI NO: 4090259 NR Description: ubiquitin-conjugating enzyme E2 [Pseudotsuga
  misc_feature (1)..(161): Homolog of NCBI NO: 2801444 NR Description: ubiquitin-conjugating enzyme 16 [Arabidopsis
  misc_feature (1)..(161): Homolog of NCBI NO: 18419831 NR Description: E2, ubiquitin-conjugating enzyme 17 (UBC17); id: At4g36410.1, supported by cDNA: 40968., supported by cDNA:
  misc_feature (1)..(130): Homolog of NCBI NO: 34897008 NR Description: putative ubiquitin-conjugating enzyme E2 [Oryza
  misc_feature (65)..(161): Homolog of NCBI NO: 25293670 NR Description: ubiquitin-conjugating enzyme 18 [imported] -
  misc_feature (1)..(102): Homolog of NCBI NO: 25293672 NR Description: protein F27F5.13 [imported] - Arabidopsis >gi|7767660|gb|AAF69157.1|AC007915_9 F27F5.13 [Arabidopsis
MTSSSSPSRKALSKIACNRLQKELAEWQLSPPAGFKHKVSDNLQRWVIEVTGAAGTLYAGETYQLQVDFPEHYPMEAPQVIFLNPAPMHPHIYSNGHICLDILYDSWSPAMTVSSVCISILSMLSSSPAKQRPVDNDRYVRNCRNGRSPKETRWWFHDDTV

SEQ ID NO: 4683 - DNA, 1748 bp, Zea mays subsp. mays
  misc_feature (1)..(1748): Ceres Seq. ID no. 12406975
  misc_feature: MA Experiment ID: 108535 Result: Up-regulated in Transcription
  misc_feature: MA Experiment 108535 PARAMETER Experiment Name: Zm_Meristem_P Parameter: Age (day) Value: 8
  misc_feature: MA Experiment 108535 PARAMETER Experiment Name: Zm_Meristem_P Parameter: Organism Value: Zea mays
  misc_feature: MA Experiment 108535 PARAMETER Experiment Name: Zm_Meristem_P Parameter: Plant Line Value: 35A19
  misc_feature: MA Experiment 108535 PARAMETER Experiment Name: Zm_Meristem_P Parameter: Tissue Value: Root Meristem vs. Above Root Meristem
  misc_feature: MA Experiment ID: 108543 Result: Up-regulated in Transcription
  misc_feature: MA Experiment ID: 108546 Result: Down-regulated in Transcription
  misc_feature: MA Experiment 108546 PARAMETER Experiment Name: Zm_Imbibed_Seeds_P Parameter: Age (day) Value: 3 vs. 2
  misc_feature: MA Experiment 108546 PARAMETER Experiment Name: Zm_Imbibed_Seeds_P Parameter: Organism Value: Zea mays
  misc_feature: MA Experiment 108546 PARAMETER Experiment Name: Zm_Imbibed_Seeds_P Parameter: Plant Line Value: 35A19
  misc_feature: MA Experiment 108546 PARAMETER Experiment Name: Zm_Imbibed_Seeds_P Parameter: Tissue Value: Roots vs. Embryo
  misc_feature: MA Experiment ID: 20000488 Result: Down-regulated in Transcription
  misc_feature: MA Experiment 20000488 PARAMETER Experiment Name: Zm_50mM_NH4NO3_L_to_H_P Parameter: Organism Value: Zea mays
  misc_feature: MA Experiment 20000488 PARAMETER Experiment Name: Zm_50mM_NH4NO3_L_to_H_P Parameter: Timepoint (hr) Value: 8
  misc_feature: MA Experiment 20000488 PARAMETER Experiment Name: Zm_50mM_NH4NO3_L_to_H_P Parameter: Tissue Value: Leaves
  misc_feature: MA Experiment 20000488 PARAMETER Experiment Name: Zm_50mM_NH4NO3_L_to_H_P Parameter: Treatment Value: 50mM NH4NO3 vs. 100mM Mannitol
gcacgagaccattacctagaacatcctaatcgaaaataaaaaagaggcgtggtagtgtacagtgtgagctgacagggacagtgcccaccaatggtccccttctcacggtcacgctagcagcagtagccctcccccatcaccgaggagagagaagcctgtcgccgcgcgaccgccccacatggctaccgcgctcggtggggagcccaaccccaccgccgacgccatggaggtcgaccctccgcgcgcctccgccgacgagaagcatgtcgccactattattgcggggggtagtgatgcagtgacaggccacataatatcgactacgattgggggaaagaatggtgaaccaaagaggaccatcagctatatggctgagcgagttgttggaactggatcgtttggggttgtcttccaggcaaaatgcattgagactggtgaaactgttgcaattaagaaggttctacaggacaaaagatacaagaatagggagttacaaataatgcgatcaattgaccattgcaatgtcatttccctgaagcattgtttcttctctaccacaagtagggatgaacttttccttaacttagtcatggagtttgttccagagtcactttatcgcgttctgaaacactacaaagacatgaagcagaggatgccccttatatatgttaaattgtatatgtaccagatattccggggactagcttatattcatactgtaccaggaatttgtcaccgagatattaagcctcagaatatcttggtggatcctctttcccaccaagtcaaggtttgtgacttcgggagtgctaaaatcttgattaaaggtgaagctaatatatcatatatatgctcacgctattatcgtgctcctgagctcatatttggtgcaactgaatacacaacatctattgatatatggtcagctggatgtgttcttgctgagcttcttcttagtcaaccattatttcctggggaaagtgctgtggaccagctggttgagattatcaaggttttgggcaccccaacacgagaggaaattcgttgtatgaatcccaactatacagaattcaagtttcctcagataaaagcatgtccatggcacaagatcttccacaagagaatgcctccagaagcaatagatcttgtttcccgtcttcttcagtattcgccgaatctgcgatgtagtgcacttgaggtgtgtgctcattcattctttgacgaattacgagaatcacatgcaagactccctaacggacgcccatttcctccactattcaactttaagcaggaactagcaaacgcaccaccggagcttgtcagcaggctattaccagagcatgctcgacggcattcaggattcggttccttatttgggagtggaccgtagcccgtaggaaaatctcgttttaatgttgggctgctgtacgccgtcagagggcaatctgcatatcccaaatctaagttttagaacctgaccatcttgtcgaaaagttaccagccttagaaaaacccgaggtggcctcttgtgtccatgttctgccagtagcggcacataatgctggggggatggttaggtgtaattgttaagcacagagggtaactgactgagctaatgtattttcacgtttcagtctgtatcgaacttgtacctgtgtaccctgtaccaatcgcagctgatgtaatcatgtaaatgcttctaaactacttcaagttatcatgatggccaattcgcaattttacagtgc

SEQ ID NO: 4684 - protein, 403 aa, Zea mays subsp. mays
  peptide (1)..(403): Ceres Seq. ID no. 12406976
  misc_feature (63)..(347): Pfam Name: Protein kinase domain Pfam Description: Protein kinase domain
  misc_feature (1)..(395): Homolog of NCBI NO: 7434281 NR Description: probable shaggy-like protein kinase etha (EC
  misc_feature (1)..(403): Homolog of NCBI NO: 15224593 NR Description: putative shaggy-like protein kinase dzeta; id: At2g30980.1, supported by cDNA: 36479., supported by cDNA: supported by cDNA: gi_20453107, supported by cDNA: gi_20465726
  misc_feature (1)..(403): Homolog of NCBI NO: 21593135 NR Description: putative shaggy-like protein kinase dzeta
  misc_feature (1)..(403): Homolog of NCBI NO: 12643750 NR Description: Shaggy-related protein kinase delta (ASK-delta)
  misc_feature (25)..(402): Homolog of NCBI NO: 15233984 NR Description: shaggy-like protein kinase etha (EC 2.7.1.-); id: At4g18710.1, supported by cDNA: 256076., supported by cDNA:
  misc_feature (25)..(402): Homolog of NCBI NO: 18700188 NR Description: AT4g18710/F28A21_120 [Arabidopsis thaliana]
  misc_feature (25)..(402): Homolog of NCBI NO: 12643751 NR Description: Shaggy-related protein kinase eta (ASK-eta)
  misc_feature (21)..(396): Homolog of NCBI NO: 15221476 NR Description: shaggy-like kinase, putative; protein id: supported by cDNA: gi_14334749, supported by cDNA: gi_15293238, by cDNA: gi_2444276 [Arabidopsis thaliana]
  misc_feature (26)..(398): Homolog of NCBI NO: 15230058 NR Description: shaggy related protein kinase, ASK-GAMMA; protein At3g05840.1, supported by cDNA: 17739., supported by cDNA:
  misc_feature (19)..(397): Homolog of NCBI NO: 15236918 NR Description: Shaggy related protein kinase tetha; protein id:
MATALGGEPNPTADAMEVDPPRASADEKHVATIIAGGSDAVTGHIISTTIGGKNGEPKRTISYMAERVVGTGSFGVVFQAKCIETGETVAIKKVLQDKRYKNRELQIMRSIDHCNVISLKHCFFSTTSRDELFLNLVMEFVPESLYRVLKHYKDMKQRMPLIYVKLYMYQIFRGLAYIHTVPGICHRDIKPQNILVDPLSHQVKVCDFGSAKILIKGEANISYICSRYYRAPELIFGATEYTTSIDIWSAGCVLAELLLSQPLFPGESAVDQLVEIIKVLGTPTREEIRCMNPNYTEFKFPQIKACPWHKIFHKRMPPEAIDLVSRLLQYSPNLRCSALEVCAHSFFDELRESHARLPNGRPFPPLFNFKQELANAPPELVSRLLPEHARRHSGFGSLFGSGP

SEQ ID NO: 4685 - protein, 388 aa, Zea mays subsp. mays
  peptide (1)..(388): Ceres Seq. ID no. 12406977
  misc_feature (48)..(332): Pfam Name: Protein kinase domain Pfam Description: Protein kinase domain
  misc_feature (1)..(380): Homolog of NCBI NO: 7434281 NR Description: probable shaggy-like protein kinase etha (EC
  misc_feature (1)..(388): Homolog of NCBI NO: 15224593 NR Description: putative shaggy-like protein kinase dzeta; id: At2g30980.1, supported by cDNA: 36479., supported by cDNA: supported by cDNA: gi_20453107, supported by cDNA: gi_20465726
  misc_feature (1)..(388): Homolog of NCBI NO: 21593135 NR Description: putative shaggy-like protein kinase dzeta
  misc_feature (1)..(388): Homolog of NCBI NO: 12643750 NR Description: Shaggy-related protein kinase delta (ASK-delta)
  misc_feature (10)..(387): Homolog of NCBI NO: 15233984 NR Description: shaggy-like protein kinase etha (EC 2.7.1.-); id: At4g18710.1, supported by cDNA: 256076., supported by cDNA:
  misc_feature (10)..(387): Homolog of NCBI NO: 18700188 NR Description: AT4g18710/F28A21_120 [Arabidopsis thaliana]
  misc_feature (10)..(387): Homolog of NCBI NO: 12643751 NR Description: Shaggy-related protein kinase eta (ASK-eta)
  misc_feature (6)..(381): Homolog of NCBI NO: 15221476 NR Description: shaggy-like kinase, putative; protein id: supported by cDNA: gi_14334749, supported by cDNA: gi_15293238, by cDNA: gi_2444276 [Arabidopsis thaliana]
  misc_feature (11)..(383): Homolog of NCBI NO: 15230058 NR Description: shaggy related protein kinase, ASK-GAMMA; protein At3g05840.1, supported by cDNA: 17739., supported by cDNA:
  misc_feature (4)..(382): Homolog of NCBI NO: 15236918 NR Description: Shaggy related protein kinase tetha; protein id:
MEVDPPRASADEKHVATIIAGGSDAVTGHIISTTIGGKNGEPKRTISYMAERVVGTGSFGVVFQAKCIETGETVAIKKVLQDKRYKNRELQIMRSIDHCNVISLKHCFFSTTSRDELFLNLVMEFVPESLYRVLKHYKDMKQRMPLIYVKLYMYQIFRGLAYIHTVPGICHRDIKPQNILVDPLSHQVKVCDFGSAKILIKGEANISYICSRYYRAPELIFGATEYTTSIDIWSAGCVLAELLLSQPLFPGESAVDQLVEIIKVLGTPTREEIRCMNPNYTEFKFPQIKACPWHKIFHKRMPPEAIDLVSRLLQYSPNLRCSALEVCAHSFFDELRESHARLPNGRPFPPLFNFKQELANAPPELVSRLLPEHARRHSGFGSLFGSGP

SEQ ID NO: 4686 - protein, 340 aa, Zea mays subsp. mays
  peptide (1)..(340): Ceres Seq. ID no. 12406978
  misc_feature (1)..(284): Pfam Name: Protein kinase domain Pfam Description: Protein kinase domain
  misc_feature (1)..(333): Homolog of NCBI NO: 15221476 NR Description: shaggy-like kinase, putative; protein id: supported by cDNA: gi_14334749, supported by cDNA: gi_15293238, by cDNA: gi_2444276 [Arabidopsis thaliana]
  misc_feature (1)..(335): Homolog of NCBI NO: 15230058 NR Description: shaggy related protein kinase, ASK-GAMMA; protein At3g05840.1, supported by cDNA: 17739., supported by cDNA:
  misc_feature (1)..(340): Homolog of NCBI NO: 15224593 NR Description: putative shaggy-like protein kinase dzeta; id: At2g30980.1, supported by cDNA: 36479., supported by cDNA: supported by cDNA: gi_20453107, supported by cDNA: gi_20465726
  misc_feature (1)..(340): Homolog of NCBI NO: 12643750 NR Description: Shaggy-related protein kinase delta (ASK-delta)
  misc_feature (1)..(339): Homolog of NCBI NO: 18700188 NR Description: AT4g18710/F28A21_120 [Arabidopsis thaliana]
  misc_feature (1)..(339): Homolog of NCBI NO: 12643751 NR Description: Shaggy-related protein kinase eta (ASK-eta)
  misc_feature (1)..(339): Homolog of NCBI NO: 15233984 NR Description: shaggy-like protein kinase etha (EC 2.7.1.-); id: At4g18710.1, supported by cDNA: 256076., supported by cDNA:
  misc_feature (1)..(340): Homolog of NCBI NO: 21593135 NR Description: putative shaggy-like protein kinase dzeta
  misc_feature (1)..(332): Homolog of NCBI NO: 7434281 NR Description: probable shaggy-like protein kinase etha (EC
  misc_feature (1)..(334): Homolog of NCBI NO: 15236918 NR Description: Shaggy related protein kinase tetha; protein id:
MAERVVGTGSFGVVFQAKCIETGETVAIKKVLQDKRYKNRELQIMRSIDHCNVISLKHCFFSTTSRDELFLNLVMEFVPESLYRVLKHYKDMKQRMPLIYVKLYMYQIFRGLAYIHTVPGICHRDIKPQNILVDPLSHQVKVCDFGSAKILIKGEANISYICSRYYRAPELIFGATEYTTSIDIWSAGCVLAELLLSQPLFPGESAVDQLVEIIKVLGTPTREEIRCMNPNYTEFKFPQIKACPWHKIFHKRMPPEAIDLVSRLLQYSPNLRCSALEVCAHSFFDELRESHARLPNGRPFPPLFNFKQELANAPPELVSRLLPEHARRHSGFGSLFGSGP

SEQ ID NO: 4687 - DNA, 1388 bp, Zea mays subsp. mays
  misc_feature (1)..(1388): Ceres Seq. ID no. 12409874
  misc_feature: MA Experiment ID: 108527 Result: Up-regulated in Transcription
  misc_feature: MA Experiment 108527 PARAMETER Experiment Name: Zm_5mM_NO_P Parameter: Age (day) Value: 8
  misc_feature: MA Experiment 108527 PARAMETER Experiment Name: Zm_5mM_NO_P Parameter: Organism Value: Zea mays
  misc_feature: MA Experiment 108527 PARAMETER Experiment Name: Zm_5mM_NO_P Parameter: Plant Line Value: 35A19
  misc_feature: MA Experiment 108527 PARAMETER Experiment Name: Zm_5mM_NO_P Parameter: Timepoint (hr) Value: 6
  misc_feature: MA Experiment 108527 PARAMETER Experiment Name: Zm_5mM_NO_P Parameter: Tissue Value: Aerial
  misc_feature: MA Experiment 108527 PARAMETER Experiment Name: Zm_5mM_NO_P Parameter: Treatment Value: 5mM NO vs. No Treatment
  misc_feature: MA Experiment ID: 20000478 Result: Up-regulated in Transcription
  misc_feature: MA Experiment 20000478 PARAMETER Experiment Name: Zm_5mM_SA_P Parameter: Age (day) Value: 11
  misc_feature: MA Experiment 20000478 PARAMETER Experiment Name: Zm_5mM_SA_P Parameter: Organism Value: Zea mays
  misc_feature: MA Experiment 20000478 PARAMETER Experiment Name: Zm_5mM_SA_P Parameter: Plant Line Value: 35A19
  misc_feature: MA Experiment 20000478 PARAMETER Experiment Name: Zm_5mM_SA_P Parameter: Timepoint (hr) Value: 72
  misc_feature: MA Experiment 20000478 PARAMETER Experiment Name: Zm_5mM_SA_P Parameter: Tissue Value: Aerial
  misc_feature: MA Experiment 20000478 PARAMETER Experiment Name: Zm_5mM_SA_P Parameter: Treatment Value: 5mM SA vs. No Treatment
  misc_feature: MA Experiment ID: 20000479 Result: Up-regulated in Transcription
  misc_feature: MA Experiment 20000479 PARAMETER Experiment Name: Zm_Drought_P Parameter: Age (day) Value: 10
  misc_feature: MA Experiment 20000479 PARAMETER Experiment Name: Zm_Drought_P Parameter: Organism Value: Zea mays
  misc_feature: MA Experiment 20000479 PARAMETER Experiment Name: Zm_Drought_P Parameter: Plant Line Value: 35A19
  misc_feature: MA Experiment 20000479 PARAMETER Experiment Name: Zm_Drought_P Parameter: Timepoint (hr) Value: 48
  misc_feature: MA Experiment 20000479 PARAMETER Experiment Name: Zm_Drought_P Parameter: Tissue Value: Aerial
  misc_feature: MA Experiment 20000479 PARAMETER Experiment Name: Zm_Drought_P Parameter: Treatment Value: Drought vs. No Drought
  misc_feature: MA Experiment ID: 20000480 Result: Up-regulated in Transcription
  misc_feature: MA Experiment 20000480 PARAMETER Experiment Name: Zm_Drought_P Parameter: Age (day) Value: 11
  misc_feature: MA Experiment 20000480 PARAMETER Experiment Name: Zm_Drought_P Parameter: Organism Value: Zea mays
  misc_feature: MA Experiment 20000480 PARAMETER Experiment Name: Zm_Drought_P Parameter: Plant Line Value: 35A19
  misc_feature: MA Experiment 20000480 PARAMETER Experiment Name: Zm_Drought_P Parameter: Timepoint (hr) Value: 72
  misc_feature: MA Experiment 20000480 PARAMETER Experiment Name: Zm_Drought_P Parameter: Tissue Value: Aerial
  misc_feature: MA Experiment 20000480 PARAMETER Experiment Name: Zm_Drought_P Parameter: Treatment Value: Drought vs. No Drought
  misc_feature: MA Experiment ID: 20000488 Result: Down-regulated in Transcription
  misc_feature: MA Experiment 20000488 PARAMETER Experiment Name: Zm_50mM_NH4NO3_L_to_H_P Parameter: Organism Value: Zea mays
  misc_feature: MA Experiment 20000488 PARAMETER Experiment Name: Zm_50mM_NH4NO3_L_to_H_P Parameter: Timepoint (hr) Value: 8
  misc_feature: MA Experiment 20000488 PARAMETER Experiment Name: Zm_50mM_NH4NO3_L_to_H_P Parameter: Tissue Value: Leaves
  misc_feature: MA Experiment 20000488 PARAMETER Experiment Name: Zm_50mM_NH4NO3_L_to_H_P Parameter: Treatment Value: 50mM NH4NO3 vs. 100mM Mannitol
  misc_feature: MA Experiment ID: 20000535 Result: Down-regulated in Transcription
  misc_feature: MA Experiment 20000535 PARAMETER Experiment Name: Zm_Hybrid_Seed_Dev_P Parameter: DAP Value: 30 vs. 12
  misc_feature: MA Experiment 20000535 PARAMETER Experiment Name: Zm_Hybrid_Seed_Dev_P Parameter: Organism Value: Zea mays
  misc_feature: MA Experiment 20000535 PARAMETER Experiment Name: Zm_Hybrid_Seed_Dev_P Parameter: Plant Line Value: 35A19
  misc_feature: MA Experiment 20000535 PARAMETER Experiment Name: Zm_Hybrid_Seed_Dev_P Parameter: Tissue Value: Embryo vs. Unfert Floret
acagaggggcagccgcctgcgcggtggccagcatcgtccggccgggttcgtcgggaagcgacccaaccccacgcccgcttccaacctcgttctgaccgacggcgaccgccgtgccgcgccaccgctatacttacatctgctccatcatccctcgccgcgaccaccaacctcggcagggaaatccaactccggtttctcctcctcgcagcgtctctcccgcagtcggggagatccgggttggcccgcccggtaatccatccctcgccctcgtgccgcctgtaatttcgcctcctaacccgaccgccgggggccacagcggcgccggaggcggtggagtggggacgatggggatcggggcggtgtcggacgagttgctgggcacgttcgtgccgatcgccgtgtactggctctactcagggctctacgtcgcgctggatggggtggggcggctcgacggataccggctgcacaccagggaggaggccgctacgaagaacgtcgtctccaaggccgccgtcgtcagaggcgttctcgtccagcaggtcttccaggtcgccgtctcgctcaccctctttgcggttattggtgatgagagtagtactggacagaagcaacctcctgttcttgtcatagtgttgcagtttataactgcaatggttgttatggacacatggcagtacttcatgcacagatacatgcacattaacaagtttctgtataaacacatccattctaagcaccatactcttgtagtcccttattcctttggagctctatacaaccatcctcttgagggccttattttggacaccattggtggtgcactctcattcctcgtctctggtatgactccacggacatccatattctttttctcctttgcaaccatcaaaactgtggatgatcattgtgggctgtggcttcctggtaatatcctccaggcgctgttcagcaataacagtgcttatcatgacattcaccatcagctctatggaaacaagtacaacttttcacaacccttctttgtgatgtgggacaagattctcggaacttacatgccctactctattgaacaacgaaaaggaggggggatcgaatcaaaaccagctaaactcgactgagctgaggataccaagactgattagtacatgcatgcatagtttctattttttttttttgacttgtccaatactcatgccttgtggtactgctgactgcgcaaatgatgtacacaccctgtgtcataacttcatatagtgaggctgcttttgctctctacatttcttgttttgttttttagggtgttctatcttgtaacaagatacagtgagtaaagtattgtaatgtaccaaagaatactcaacaccacttggatttgtgttctgttg

SEQ ID NO: 4688 - protein, 258 aa, Zea mays subsp. mays
  peptide (1)..(258): Ceres Seq. ID no. 12409875
  misc_feature (1)..(256): Homolog of NCBI NO: 22330531 NR Description: acid phosphatase, putative; protein id: supported by cDNA: gi_17979534 [Arabidopsis thaliana] At1g69640/F24J1.22 [Arabidopsis thaliana]
  misc_feature (1)..(256): Homolog of NCBI NO: 25404823 NR Description: probable sterol desaturase T6C23.16 [imported] -
  misc_feature (6)..(257): Homolog of NCBI NO: 18394095 NR Description: acid phosphatase, putative; protein id: supported by cDNA: gi_13605749 [Arabidopsis thaliana] At1g14290/F14L17_4 [Arabidopsis thaliana]
  misc_feature (6)..(257): Homolog of NCBI NO: 25511716 NR Description: F14L17.5 protein - Arabidopsis thaliana Contains similarity to acid phosphatase from Lupinus albus and contains a Sterol desaturase PF|01598 domain. EST gb|AI995340
  misc_feature (11)..(256): Homolog of NCBI NO: 34913184 NR Description: similar to acid phosphatase [Oryza sativa
  misc_feature (85)..(254): Homolog of NCBI NO: 34911990 NR Description: P0694A04.28 [Oryza sativa (japonica
  misc_feature (3)..(83): Homolog of NCBI NO: 34911990 NR Description: P0694A04.28 [Oryza sativa (japonica
  misc_feature (37)..(203): Homolog of NCBI NO: 5360721 NR Description: acid phosphatase [Lupinus albus]
  misc_feature (98)..(257): Homolog of NCBI NO: 40746027 NR Description: hypothetical protein AN0640.2 [Aspergillus
  misc_feature (3)..(95): Homolog of NCBI NO: 40746027 NR Description: hypothetical protein AN0640.2 [Aspergillus
MGIGAVSDELLGTFVPIAVYWLYSGLYVALDGVGRLDGYRLHTREEAATKNVVSKAAVVRGVLVQQVFQVAVSLTLFAVIGDESSTGQKQPPVLVIVLQFITAMVVMDTWQYFMHRYMHINKFLYKHIHSKHHTLVVPYSFGALYNHPLEGLILDTIGGALSFLVSGMTPRTSIFFFSFATIKTVDDHCGLWLPGNILQALFSNNSAYHDIHHQLYGNKYNFSQPFFVMWDKILGTYMPYSIEQRKGGGIESKPAKLD

SEQ ID NO: 4689 - protein, 155 aa, Zea mays subsp. mays
  peptide (1)..(155): Ceres Seq. ID no. 12409876
  misc_feature (1)..(153): Homolog of NCBI NO: 22330531 NR Description: acid phosphatase, putative; protein id: supported by cDNA: gi_17979534 [Arabidopsis thaliana] At1g69640/F24J1.22 [Arabidopsis thaliana]
  misc_feature (1)..(153): Homolog of NCBI NO: 25404823 NR Description: probable sterol desaturase T6C23.16 [imported] -
  misc_feature (1)..(154): Homolog of NCBI NO: 18394095 NR Description: acid phosphatase, putative; protein id: supported by cDNA: gi_13605749 [Arabidopsis thaliana] At1g14290/F14L17_4 [Arabidopsis thaliana]
  misc_feature (1)..(154): Homolog of NCBI NO: 25511716 NR Description: F14L17.5 protein - Arabidopsis thaliana Contains similarity to acid phosphatase from Lupinus albus and contains a Sterol desaturase PF|01598 domain. EST gb|AI995340
  misc_feature (1)..(153): Homolog of NCBI NO: 34913184 NR Description: similar to acid phosphatase [Oryza sativa
  misc_feature (1)..(151): Homolog of NCBI NO: 34911990 NR Description: P0694A04.28 [Oryza sativa (japonica
  misc_feature (1)..(100): Homolog of NCBI NO: 5360721 NR Description: acid phosphatase [Lupinus albus]
  misc_feature (1)..(154): Homolog of NCBI NO: 40746027 NR Description: hypothetical protein AN0640.2 [Aspergillus
  misc_feature (1)..(136): Homolog of NCBI NO: 19113281 NR Description: hypothetical integral membrane protein, putative in lipid metabolism [Schizosaccharomyces pombe]
  misc_feature (1)..(133): Homolog of NCBI NO: 37722567 NR Description: sphinganine hydroxylase [Pichia ciferrii]
MVVMDTWQYFMHRYMHINKFLYKHIHSKHHTLVVPYSFGALYNHPLEGLILDTIGGALSFLVSGMTPRTSIFFFSFATIKTVDDHCGLWLPGNILQALFSNNSAYHDIHHQLYGNKYNFSQPFFVMWDKILGTYMPYSIEQRKGGGIESKPAKLD

SEQ ID NO: 4690 - protein, 152 aa, Zea mays subsp. mays
  peptide (1)..(152): Ceres Seq. ID no. 12409877
  misc_feature (1)..(150): Homolog of NCBI NO: 22330531 NR Description: acid phosphatase, putative; protein id: supported by cDNA: gi_17979534 [Arabidopsis thaliana] At1g69640/F24J1.22 [Arabidopsis thaliana]
  misc_feature (1)..(150): Homolog of NCBI NO: 25404823 NR Description: probable sterol desaturase T6C23.16 [imported] -
  misc_feature (1)..(151): Homolog of NCBI NO: 18394095 NR Description: acid phosphatase, putative; protein id: supported by cDNA: gi_13605749 [Arabidopsis thaliana] At1g14290/F14L17_4 [Arabidopsis thaliana]
  misc_feature (1)..(151): Homolog of NCBI NO: 25511716 NR Description: F14L17.5 protein - Arabidopsis thaliana Contains similarity to acid phosphatase from Lupinus albus and contains a Sterol desaturase PF|01598 domain. EST gb|AI995340
  misc_feature (1)..(150): Homolog of NCBI NO: 34913184 NR Description: similar to acid phosphatase [Oryza sativa
  misc_feature (1)..(148): Homolog of NCBI NO: 34911990 NR Description: P0694A04.28 [Oryza sativa (japonica
  misc_feature (1)..(97): Homolog of NCBI NO: 5360721 NR Description: acid phosphatase [Lupinus albus]
  misc_feature (1)..(151): Homolog of NCBI NO: 40746027 NR Description: hypothetical protein AN0640.2 [Aspergillus
  misc_feature (1)..(133): Homolog of NCBI NO: 19113281 NR Description: hypothetical integral membrane protein, putative in lipid metabolism [Schizosaccharomyces pombe]
  misc_feature (1)..(130): Homolog of NCBI NO: 37722567 NR Description: sphinganine hydroxylase [Pichia ciferrii]
MDTWQYFMHRYMHINKFLYKHIHSKHHTLVVPYSFGALYNHPLEGLILDTIGGALSFLVSGMTPRTSIFFFSFATIKTVDDHCGLWLPGNILQALFSNNSAYHDIHHQLYGNKYNFSQPFFVMWDKILGTYMPYSIEQRKGGGIESKPAKLD

SEQ ID NO: 4691 - DNA, 1822 bp, Zea mays subsp. mays
  misc_feature (1)..(1822): Ceres Seq. ID no. 12406971
  misc_feature: MA Experiment ID: 108528 Result: Up-regulated in Transcription
  misc_feature: MA Experiment 108528 PARAMETER Experiment Name: Zm_Imbibed_Seeds_P Parameter: Age (day) Value: 5 vs. 2
  misc_feature: MA Experiment 108528 PARAMETER Experiment Name: Zm_Imbibed_Seeds_P Parameter: Organism Value: Zea mays
  misc_feature: MA Experiment 108528 PARAMETER Experiment Name: Zm_Imbibed_Seeds_P Parameter: Plant Line Value: 35A19
  misc_feature: MA Experiment 108528 PARAMETER Experiment Name: Zm_Imbibed_Seeds_P Parameter: Tissue Value: Aerial vs. Embryo
  misc_feature: MA Experiment ID: 108530 Result: Up-regulated in Transcription
  misc_feature: MA Experiment 108530 PARAMETER Experiment Name: Zm_Imbibed_Seeds_P Parameter: Age (day) Value: 6 vs. 2
  misc_feature: MA Experiment 108530 PARAMETER Experiment Name: Zm_Imbibed_Seeds_P Parameter: Organism Value: Zea mays
  misc_feature: MA Experiment 108530 PARAMETER Experiment Name: Zm_Imbibed_Seeds_P Parameter: Plant Line Value: 35A19
  misc_feature: MA Experiment 108530 PARAMETER Experiment Name: Zm_Imbibed_Seeds_P Parameter: Tissue Value: Aerial vs. Embryo
  misc_feature: MA Experiment ID: 108535 Result: Down-regulated in Transcription
  misc_feature: MA Experiment 108535 PARAMETER Experiment Name: Zm_Meristem_P Parameter: Age (day) Value: 8
  misc_feature: MA Experiment 108535 PARAMETER Experiment Name: Zm_Meristem_P Parameter: Organism Value: Zea mays
  misc_feature: MA Experiment 108535 PARAMETER Experiment Name: Zm_Meristem_P Parameter: Plant Line Value: 35A19
  misc_feature: MA Experiment 108535 PARAMETER Experiment Name: Zm_Meristem_P Parameter: Tissue Value: Root Meristem vs. Above Root Meristem
  misc_feature: MA Experiment ID: 108547 Result: Up-regulated in Transcription
  misc_feature: MA Experiment 108547 PARAMETER Experiment Name: Zm_Imbibed_Seeds_P Parameter: Age (day) Value: 4 vs. 2
  misc_feature: MA Experiment 108547 PARAMETER Experiment Name: Zm_Imbibed_Seeds_P Parameter: Organism Value: Zea mays
  misc_feature: MA Experiment 108547 PARAMETER Experiment Name: Zm_Imbibed_Seeds_P Parameter: Plant Line Value: 35A19
  misc_feature: MA Experiment 108547 PARAMETER Experiment Name: Zm_Imbibed_Seeds_P Parameter: Tissue Value: Aerial vs. Embryo
  misc_feature: MA Experiment ID: 108556 Result: Up-regulated in Transcription
  misc_feature: MA Experiment 108556 PARAMETER Experiment Name: Zm_Drought_P Parameter: Age (day) Value: 9
  misc_feature: MA Experiment 108556 PARAMETER Experiment Name: Zm_Drought_P Parameter: Organism Value: Zea mays
  misc_feature: MA Experiment 108556 PARAMETER Experiment Name: Zm_Drought_P Parameter: Plant Line Value: 35A19
  misc_feature: MA Experiment 108556 PARAMETER Experiment Name: Zm_Drought_P Parameter: Timepoint (hr) Value: 24
  misc_feature: MA Experiment 108556 PARAMETER Experiment Name: Zm_Drought_P Parameter: Tissue Value: Aerial
  misc_feature: MA Experiment 108556 PARAMETER Experiment Name: Zm_Drought_P Parameter: Treatment Value: Drought vs. No Drought
  misc_feature: MA Experiment ID: 108559 Result: Down-regulated in Transcription
  misc_feature: MA Experiment 108559 PARAMETER Experiment Name: Zm_5mM_NO_P Parameter: Age (day) Value: 8
  misc_feature: MA Experiment 108559 PARAMETER Experiment Name: Zm_5mM_NO_P Parameter: Organism Value: Zea mays
  misc_feature: MA Experiment 108559 PARAMETER Experiment Name: Zm_5mM_NO_P Parameter: Plant Line Value: 35A19
  misc_feature: MA Experiment 108559 PARAMETER Experiment Name: Zm_5mM_NO_P Parameter: Timepoint (hr) Value: 12
  misc_feature: MA Experiment 108559 PARAMETER Experiment Name: Zm_5mM_NO_P Parameter: Tissue Value: Aerial
  misc_feature: MA Experiment 108559 PARAMETER Experiment Name: Zm_5mM_NO_P Parameter: Treatment Value: 5mM NO vs. No Treatment
  misc_feature: MA Experiment ID: 108689 Result: Up-regulated in Transcription
  misc_feature: MA Experiment 108689 PARAMETER Experiment Name: Zm_Drought_Roots_P Parameter: Age (day) Value: 9
  misc_feature: MA Experiment 108689 PARAMETER Experiment Name: Zm_Drought_Roots_P Parameter: Organism Value: Zea mays
  misc_feature: MA Experiment 108689 PARAMETER Experiment Name: Zm_Drought_Roots_P Parameter: Plant Line Value: 35A19
  misc_feature: MA Experiment 108689 PARAMETER Experiment Name: Zm_Drought_Roots_P Parameter: Timepoint (hr) Value: 24
  misc_feature: MA Experiment 108689 PARAMETER Experiment Name: Zm_Drought_Roots_P Parameter: Tissue Value: Roots
  misc_feature: MA Experiment 108689 PARAMETER Experiment Name: Zm_Drought_Roots_P Parameter: Treatment Value: Drought vs. No Drought
  misc_feature: MA Experiment ID: 20000492 Result: Down-regulated in Transcription
  misc_feature: MA Experiment 20000492 PARAMETER Experiment Name: Zm_Hybrid_Seed_Dev_P Parameter: DAP Value: 12
  misc_feature: MA Experiment 20000492 PARAMETER Experiment Name: Zm_Hybrid_Seed_Dev_P Parameter: Organism Value: Zea mays
  misc_feature: MA Experiment 20000492 PARAMETER Experiment Name: Zm_Hybrid_Seed_Dev_P Parameter: Plant Line Value: 35A19
  misc_feature: MA Experiment 20000492 PARAMETER Experiment Name: Zm_Hybrid_Seed_Dev_P Parameter: Tissue Value: Fert Kernel vs. Unfert Floret
  misc_feature: MA Experiment ID: 20001606 Result: Down-regulated in Transcription
  misc_feature: MA Experiment 20001606 PARAMETER Experiment Name: Zm_50ppm_KNO3_L-to-H_P Parameter: Age (day) Value: 19
  misc_feature: MA Experiment 20001606 PARAMETER Experiment Name: Zm_50ppm_KNO3_L-to-H_P Parameter: Organism Value: Zea mays
  misc_feature: MA Experiment 20001606 PARAMETER Experiment Name: Zm_50ppm_KNO3_L-to-H_P Parameter: Plant Line Value: 35A19
  misc_feature: MA Experiment 20001606 PARAMETER Experiment Name: Zm_50ppm_KNO3_L-to-H_P Parameter: Timepoint (hr) Value: 8
  misc_feature: MA Experiment 20001606 PARAMETER Experiment Name: Zm_50ppm_KNO3_L-to-H_P Parameter: Tissue Value: Shoots
  misc_feature: MA Experiment 20001606 PARAMETER Experiment Name: Zm_50ppm_KNO3_L-to-H_P Parameter: Treatment Value: 50ppm KNO3 vs. 50ppm KCl
attccaccctcctccgtctccgatcctcgccttcaactccactccctcgctctctcgggccttcttccctagcacgacggggtgatcactgattcactgccgcccgcgccaggtcggcccagaactagtgggcgccaaacatcatagcgatcatggaggtggtctcttgcagccactcctgctcggcattacatcaaacaccagcaagcacatggaggcttcggggcagtgctcttggccttggtcttgggcatgccagcccttcccggaccagaagatacacagttgcgtgtgtaggaaccacgagtggagcttcgaatccgggtggttccggcaaggtccatgcagcccagggattccatgtaagcgacgtggatgcagccctgcagggcattccttccatgaaagccggggaggccgagagggtgatgattcaaggccttccggaaggccctgacagctccccgatcagtactgggttctgggagtggaagccgaagctgactgtgtactacgagaggtccggcatgaagaacagcaaggcacctgcggtgctcttcctgccggggttcggagtcgggacgttccatttcgagaagcagctgagggatcttggtcgcgatcatcgggtgtggacgatggattttctcgggcaggggatgtcgctgcctggtgaagatcctgctcctagtagcatagcgagcgaagatgcgttttggggctttggacaagattcccagccttgggcagaggagctggtgtattctgtggatttatggcaaaaccaagttcagcatttcattgaggaggttatccgtgaaccagtttatattgtggggaactctcttggaggttttgttgctctgtattttgctgcatccagtccacaccttgtaaaaggtgtcacactgcttaatgcaacaccgttttggggattctttcccaaccctgctacatctccccgattgtcaaagattttcccatgggctgggacatttccgcttccatcatttgtgaggaaaattactgaagcagtttggcaaaagataagtgacccaaaaagtattcaggacatactcaaacaagtatacgctgaccattcaacaaatgtggacaaagtattctctcgtattgtggagataacacaacacccagcagctgctgcatcgtttgcctccattatgtttgctccaaggggtcagatatccttccaagaggccatctctaggtgccaagaccaaggcattcctatatctctcatgtatggaagagaagatccttggattagacctatttggggccttaaagttaaacagcaagtgcccgaagcaccttattatgaaattagccccgctggtcattgtcctcatgatgaggtccctgaggttataaactacttgctccgtgggtggctgaagaacctcgagtctgagggctcagtcgacctgccgtttctagaagaacgcagctatgctgagcgtggtgtatccagggagctggagtttgtcagagaaggatcaaggaagtcagttagtgtgcggctctatggtaccaagatttccctatggagccagctaagctcattcttgaacacacgtgtccccaagtcacggatagtcttgagataatccatcctcaactccaatagatctcaatcttagaagctttgattcagatattgtatttattactttattaaattggtcagcagacagtgtttccagaattcctagcgcatgtaaatattggcactacagtggtagtttcgaatttatcatgattcatatcatgtcaagatatgcttgaagttctgttcatagct

SEQ ID NO: 4692 - protein, 491 aa, Zea mays subsp. mays
  peptide (1)..(491): Ceres Seq. ID no. 12406972
  misc_feature (158)..(419): Pfam Name: alpha/beta hydrolase fold Pfam Description: alpha/beta hydrolase fold
  misc_feature (85)..(472): Homolog of NCBI NO: 15240707 NR Description: putative protein; protein id: At5g13800.1, by cDNA: gi_15912216, supported by cDNA: gi_17979480 [Arabidopsis >gi|10177646|dbj|BAB11108.1| gene_id:MAC12.25~pir||S77419~similar
  misc_feature (190)..(421): Homolog of NCBI NO: 23040754 NR Description: hypothetical protein [Trichodesmium erythraeum
  misc_feature (110)..(171): Homolog of NCBI NO: 23040754 NR Description: hypothetical protein [Trichodesmium erythraeum
  misc_feature (190)..(424): Homolog of NCBI NO: 16330114 NR Description: unknown protein [Synechocystis sp. PCC 6803]
  misc_feature (108)..(171): Homolog of NCBI NO: 16330114 NR Description: unknown protein [Synechocystis sp. PCC 6803]
  misc_feature (190)..(424): Homolog of NCBI NO: 37521904 NR Description: hypothetical protein gll2335 [Gloeobacter
  misc_feature (111)..(169): Homolog of NCBI NO: 37521904 NR Description: hypothetical protein gll2335 [Gloeobacter
  misc_feature (190)..(426): Homolog of NCBI NO: 23126297 NR Description: hypothetical protein [Nostoc punctiforme]
  misc_feature (101)..(171): Homolog of NCBI NO: 23126297 NR Description: hypothetical protein [Nostoc punctiforme]
  misc_feature (190)..(424): Homolog of NCBI NO: 17229548 NR Description: hypothetical protein [Nostoc sp. PCC 7120]
MEVVSCSHSCSALHQTPASTWRLRGSALGLGLGHASPSRTRRYTVACVGTTSGASNPGGSGKVHAAQGFHVSDVDAALQGIPSMKAGEAERVMIQGLPEGPDSSPISTGFWEWKPKLTVYYERSGMKNSKAPAVLFLPGFGVGTFHFEKQLRDLGRDHRVWTMDFLGQGMSLPGEDPAPSSIASEDAFWGFGQDSQPWAEELVYSVDLWQNQVQHFIEEVIREPVYIVGNSLGGFVALYFAASSPHLVKGVTLLNATPFWGFFPNPATSPRLSKIFPWAGTFPLPSFVRKITEAVWQKISDPKSIQDILKQVYADHSTNVDKVFSRIVEITQHPAAAASFASIMFAPRGQISFQEAISRCQDQGIPISLMYGREDPWIRPIWGLKVKQQVPEAPYYEISPAGHCPHDEVPEVINYLLRGWLKNLESEGSVDLPFLEERSYAERGVSRELEFVREGSRKSVSVRLYGTKISLWSQLSSFLNTRVPKSRIVLR

SEQ ID NO: 4693 - protein, 408 aa, Zea mays subsp. mays
  peptide (1)..(408): Ceres Seq. ID no. 12406973
  misc_feature (75)..(336): Pfam Name: alpha/beta hydrolase fold Pfam Description: alpha/beta hydrolase fold
  misc_feature (2)..(389): Homolog of NCBI NO: 15240707 NR Description: putative protein; protein id: At5g13800.1, by cDNA: gi_15912216, supported by cDNA: gi_17979480 [Arabidopsis >gi|10177646|dbj|BAB11108.1| gene_id:MAC12.25~pir||S77419~similar
  misc_feature (107)..(338): Homolog of NCBI NO: 23040754 NR Description: hypothetical protein [Trichodesmium erythraeum
  misc_feature (27)..(88): Homolog of NCBI NO: 23040754 NR Description: hypothetical protein [Trichodesmium erythraeum
  misc_feature (107)..(341): Homolog of NCBI NO: 16330114 NR Description: unknown protein [Synechocystis sp. PCC 6803]
  misc_feature (25)..(88): Homolog of NCBI NO: 16330114 NR Description: unknown protein [Synechocystis sp. PCC 6803]
  misc_feature (107)..(341): Homolog of NCBI NO: 37521904 NR Description: hypothetical protein gll2335 [Gloeobacter
  misc_feature (28)..(86): Homolog of NCBI NO: 37521904 NR Description: hypothetical protein gll2335 [Gloeobacter
  misc_feature (107)..(343): Homolog of NCBI NO: 23126297 NR Description: hypothetical protein [Nostoc punctiforme]
  misc_feature (18)..(88): Homolog of NCBI NO: 23126297 NR Description: hypothetical protein [Nostoc punctiforme]
  misc_feature (107)..(341): Homolog of NCBI NO: 17229548 NR Description: hypothetical protein [Nostoc sp. PCC 7120]
MKAGEAERVMIQGLPEGPDSSPISTGFWEWKPKLTVYYERSGMKNSKAPAVLFLPGFGVGTFHFEKQLRDLGRDHRVWTMDFLGQGMSLPGEDPAPSSIASEDAFWGFGQDSQPWAEELVYSVDLWQNQVQHFIEEVIREPVYIVGNSLGGFVALYFAASSPHLVKGVTLLNATPFWGFFPNPATSPRLSKIFPWAGTFPLPSFVRKITEAVWQKISDPKSIQDILKQVYADHSTNVDKVFSRIVEITQHPAAAASFASIMFAPRGQISFQEAISRCQDQGIPISLMYGREDPWIRPIWGLKVKQQVPEAPYYEISPAGHCPHDEVPEVINYLLRGWLKNLESEGSVDLPFLEERSYAERGVSRELEFVREGSRKSVSVRLYGTKISLWSQLSSFLNTRVPKSRIVLR

SEQ ID NO: 4694 - protein, 399 aa, Zea mays subsp. mays
  peptide (1)..(399): Ceres Seq. ID no. 12406974
  misc_feature (66)..(327): Pfam Name: alpha/beta hydrolase fold Pfam Description: alpha/beta hydrolase fold
  misc_feature (1)..(380): Homolog of NCBI NO: 15240707 NR Description: putative protein; protein id: At5g13800.1, by cDNA: gi_15912216, supported by cDNA: gi_17979480 [Arabidopsis >gi|10177646|dbj|BAB11108.1| gene_id:MAC12.25~pir||S77419~similar
  misc_feature (98)..(329): Homolog of NCBI NO: 23040754 NR Description: hypothetical protein [Trichodesmium erythraeum
  misc_feature (18)..(79): Homolog of NCBI NO: 23040754 NR Description: hypothetical protein [Trichodesmium erythraeum
  misc_feature (98)..(332): Homolog of NCBI NO: 16330114 NR Description: unknown protein [Synechocystis sp. PCC 6803]
  misc_feature (16)..(79): Homolog of NCBI NO: 16330114 NR Description: unknown protein [Synechocystis sp. PCC 6803]
  misc_feature (98)..(332): Homolog of NCBI NO: 37521904 NR Description: hypothetical protein gll2335 [Gloeobacter
  misc_feature (19)..(77): Homolog of NCBI NO: 37521904 NR Description: hypothetical protein gll2335 [Gloeobacter
  misc_feature (98)..(334): Homolog of NCBI NO: 23126297 NR Description: hypothetical protein [Nostoc punctiforme]
  misc_feature (9)..(79): Homolog of NCBI NO: 23126297 NR Description: hypothetical protein [Nostoc punctiforme]
  misc_feature (98)..(332): Homolog of NCBI NO: 17229548 NR Description: hypothetical protein [Nostoc sp. PCC 7120]
MIQGLPEGPDSSPISTGFWEWKPKLTVYYERSGMKNSKAPAVLFLPGFGVGTFHFEKQLRDLGRDHRVWTMDFLGQGMSLPGEDPAPSSIASEDAFWGFGQDSQPWAEELVYSVDLWQNQVQHFIEEVIREPVYIVGNSLGGFVALYFAASSPHLVKGVTLLNATPFWGFFPNPATSPRLSKIFPWAGTFPLPSFVRKITEAVWQKISDPKSIQDILKQVYADHSTNVDKVFSRIVEITQHPAAAASFASIMFAPRGQISFQEAISRCQDQGIPISLMYGREDPWIRPIWGLKVKQQVPEAPYYEISPAGHCPHDEVPEVINYLLRGWLKNLESEGSVDLPFLEERSYAERGVSRELEFVREGSRKSVSVRLYGTKISLWSQLSSFLNTRVPKSRIVLR

SEQ ID NO: 4695 - DNA, 1490 bp, Zea mays subsp. mays
  misc_feature (1)..(1490): Ceres Seq. ID no. 12409866
  misc_feature: MA Experiment ID: 108535 Result: Up-regulated in Transcription
  misc_feature: MA Experiment 108535 PARAMETER Experiment Name: Zm_Meristem_P Parameter: Age (day) Value: 8
  misc_feature: MA Experiment 108535 PARAMETER Experiment Name: Zm_Meristem_P Parameter: Organism Value: Zea mays
  misc_feature: MA Experiment 108535 PARAMETER Experiment Name: Zm_Meristem_P Parameter: Plant Line Value: 35A19
  misc_feature: MA Experiment 108535 PARAMETER Experiment Name: Zm_Meristem_P Parameter: Tissue Value: Root Meristem vs. Above Root Meristem
  misc_feature: MA Experiment ID: 20000478 Result: Down-regulated in Transcription
  misc_feature: MA Experiment 20000478 PARAMETER Experiment Name: Zm_5mM_SA_P Parameter: Age (day) Value: 11
  misc_feature: MA Experiment 20000478 PARAMETER Experiment Name: Zm_5mM_SA_P Parameter: Organism Value: Zea mays
  misc_feature: MA Experiment 20000478 PARAMETER Experiment Name: Zm_5mM_SA_P Parameter: Plant Line Value: 35A19
  misc_feature: MA Experiment 20000478 PARAMETER Experiment Name: Zm_5mM_SA_P Parameter: Timepoint (hr) Value: 72
  misc_feature: MA Experiment 20000478 PARAMETER Experiment Name: Zm_5mM_SA_P Parameter: Tissue Value: Aerial
  misc_feature: MA Experiment 20000478 PARAMETER Experiment Name: Zm_5mM_SA_P Parameter: Treatment Value: 5mM SA vs. No Treatment
  misc_feature: MA Experiment ID: 20000535 Result: Up-regulated in Transcription
  misc_feature: MA Experiment 20000535 PARAMETER Experiment Name: Zm_Hybrid_Seed_Dev_P Parameter: DAP Value: 30 vs. 12
  misc_feature: MA Experiment 20000535 PARAMETER Experiment Name: Zm_Hybrid_Seed_Dev_P Parameter: Organism Value: Zea mays
  misc_feature: MA Experiment 20000535 PARAMETER Experiment Name: Zm_Hybrid_Seed_Dev_P Parameter: Plant Line Value: 35A19
  misc_feature: MA Experiment 20000535 PARAMETER Experiment Name: Zm_Hybrid_Seed_Dev_P Parameter: Tissue Value: Embryo vs. Unfert Floret
aaagagggacgagggagacgttggggaggggagcgagcgagccgtaacatccgagctgttccaatggcgacccctgccgttgctttcgtcgccagcgctttgttggggcggtggtagcgctaggagcggagcagtactaggttggtaggtggttgtagctttgcgcgtgacccgagcgcgcgctcgctcgctcctgtgcctctctacctcgcttgcgtgcgccgggaaggcagtgggtggctggtcggttctcgcaagaggttgctggtgctgttcctcctcccccggttgatgagcatggggcattgctccgagcagcggacggggttcgaggtgactaaggactggaacggcgccgaccagttcgcgatccggtcccccgcggggggcgtccgttcgggtctgcctgcacggcgggcaggtcgtctcgtggaggaaccaccgcggcgaggaactcctcttcagcagcagcaaggcaatcttcaagccgccaagagcgacccgtggtggcattccgatatgcttcccacagtttggaaactgtggaacattggagcagcatggatttgcaaggaacaagatatggacaatagacgatgaggctccacctctaaattatggtgataataacagcaacaaagcttctgttgaccttctgctaaagccatctgaagatgacctgaagtgctggccacactgttttgagttacgtctcagagtctctctttcaatggatggagacctttcactgatatcacgggtcagaaatgttaatgggaagccattcagtttcgcatttgcttaccatacatacctttctgtttctgacatcagtgaagtgaggatagaaggtctggagacccttgattatcttgacaaccttagccagcgggaacgttttaccgaacagggagatgccataacatttgaatcagaggttgatcgagtctatgttggctgcccaggcgtaatagctgttcttgaccatggaaagaaacgcacattcatcgtgcggaaagaagggcttcctgatattgttgtgtggaacccctgggagaagaagtccaagacgatggcagacttcggcgacgacgagtacaagcagatgctgtgcgtggatgcagccgcggtcgagagggccatcacgctgaagcccggggaggagtggacggggaagctggagctctccgccgtggcgtcgaccaactgcagcgaccacctggatcgcccgggcaggctgtagagcgctgggtgggtgggttcgttcgcccctgacgaaaggcatgtactagttttttttcatgtacatgggggcgctaggtccggcccttgcaggctgcagtatcatctacctgtcaggtgtgtcatgtgtgagtttaaacttatgtcagatccaagtattgctgtgatcgacatgttcgatgttcctggactgcgaagtctcaagcgcaggctgttcgtttggctggctttaatccgaaacggcatct

SEQ ID NO: 4696 - protein, 170 aa, Zea mays subsp. mays; identical to SEQ ID NO: 1488
  peptide (1)..(170): Ceres Seq. ID no. 12409867
  misc_feature (1)..(153): Pfam Name: Aldose 1-epimerase Pfam Description: Aldose 1-epimerase
  misc_feature (1)..(165): Homolog of NCBI NO: 15233165 NR Description: putative protein; protein id: At3g61610.1
  misc_feature (1)..(170): Homolog of NCBI NO: 19387263 NR Description: putative apospory-associated protein C [Oryza
  misc_feature (1)..(165): Homolog of NCBI NO: 40253263 NR Description: putative Aldose 1-epimerase [Oryza sativa
  misc_feature (1)..(158): Homolog of NCBI NO: 15236591 NR Description: putative protein; protein id: At4g23730.1, by cDNA: 21949. [Arabidopsis thaliana] >gi|7486738|pir||T05605
  misc_feature (1)..(165): Homolog of NCBI NO: 2501555 NR Description: POSSIBLE APOSPORY-ASSOCIATED PROTEIN C
  misc_feature (1)..(165): Homolog of NCBI NO: 15242099 NR Description: apospory-associated protein C; protein id:
  misc_feature (1)..(170): Homolog of NCBI NO: 38344152 NR Description: OSJNBa0041A02.19 [Oryza sativa (japonica
  misc_feature (1)..(19): Homolog of NCBI NO: 34911992 NR Description: P0694A04.29 [Oryza sativa (japonica
  misc_feature (98)..(167): Homolog of NCBI NO: 34911992 NR Description: P0694A04.29 [Oryza sativa (japonica
  misc_feature (1)..(165): Homolog of NCBI NO: 18395868 NR Description: expressed protein; protein id: At3g01590.1, by cDNA: 41354., supported by cDNA: gi_16612257, supported by gi_20258972 [Arabidopsis thaliana]

SEQ ID NO: 4697 - protein, 102 aa, Zea mays subsp. mays
  peptide (1)..(102): Ceres Seq. ID no. 12409868
  misc_feature (8)..(32): Homolog of NCBI NO: 15233165 NR Description: putative protein; protein id: At3g61610.1
  misc_feature (3)..(57): Homolog of NCBI NO: 34911992 NR Description: P0694A04.29 [Oryza sativa (japonica
MSMGHCSEQRTGFEVTKDWNGADQFAIRSPAGGVRSGLPARRAGRLVEEPPRRGTPLQQQQGNLQAAKSDPWWHSDMLPTVWKLWNIGAAWICKEQDMDNRR

SEQ ID NO: 4698 - protein, 100 aa, Zea mays subsp. mays
  peptide (1)..(100): Ceres Seq. ID no. 12409869
  misc_feature (6)..(30): Homolog of NCBI NO: 15233165 NR Description: putative protein; protein id: At3g61610.1
  misc_feature (1)..(55): Homolog of NCBI NO: 34911992 NR Description: P0694A04.29 [Oryza sativa (japonica
MGHCSEQRTGFEVTKDWNGADQFAIRSPAGGVRSGLPARRAGRLVEEPPRRGTPLQQQQGNLQAAKSDPWWHSDMLPTVWKLWNIGAAWICKEQDMDNRR

SEQ ID NO: 4699 - DNA, 1559 bp, Zea mays subsp. mays
  misc_feature (1)..(1559): Ceres Seq. ID no. 12409862
  misc_feature: MA Experiment ID: 108522 Result: Up-regulated in Transcription
  misc_feature: MA Experiment 108522 PARAMETER Experiment Name: Zm_42deg_Heat_P Parameter: Age (day) Value: 8
  misc_feature: MA Experiment 108522 PARAMETER Experiment Name: Zm_42deg_Heat_P Parameter: Organism Value: Zea mays
  misc_feature: MA Experiment 108522 PARAMETER Experiment Name: Zm_42deg_Heat_P Parameter: Plant Line Value: 35A19
  misc_feature: MA Experiment 108522 PARAMETER Experiment Name: Zm_42deg_Heat_P Parameter: Temperature (deg C) Value: 42 vs. 22
  misc_feature: MA Experiment 108522 PARAMETER Experiment Name: Zm_42deg_Heat_P Parameter: Timepoint (hr) Value: 1
  misc_feature: MA Experiment 108522 PARAMETER Experiment Name: Zm_42deg_Heat_P Parameter: Tissue Value: Aerial
  misc_feature: MA Experiment ID: 108523 Result: Up-regulated in Transcription
  misc_feature: MA Experiment 108523 PARAMETER Experiment Name: Zm_42deg_Heat_P Parameter: Age (day) Value: 8
  misc_feature: MA Experiment 108523 PARAMETER Experiment Name: Zm_42deg_Heat_P Parameter: Organism Value: Zea mays
  misc_feature: MA Experiment 108523 PARAMETER Experiment Name: Zm_42deg_Heat_P Parameter: Plant Line Value: 35A19
  misc_feature: MA Experiment 108523 PARAMETER Experiment Name: Zm_42deg_Heat_P Parameter: Temperature (deg C) Value: 42 vs. 22
  misc_feature: MA Experiment 108523 PARAMETER Experiment Name: Zm_42deg_Heat_P Parameter: Timepoint (hr) Value: 6
  misc_feature: MA Experiment 108523 PARAMETER Experiment Name: Zm_42deg_Heat_P Parameter: Tissue Value: Aerial
gcacgagaccattacctagaacatcctaatcgaaaagcccgcccccaaaccaaagggaaaccctcaccacgcttcccgaaacttctcctttctccatcctcaaccctactcccccttcatccgcacgaacgaagcagcgcgagcgaggagcagacgatccttcccgacctcgaagcctaccccccttccagctgcggccatggcgaccgtcatgcagaagatcaaggacatcgaggacgagatggcaaggacacagaagaataaagccactgctcaccatcttggtcttcttaaggctaaacttgcaaaattgcggcgggagttgctcactccaacatccaaaggtggtggtggtgcaggtgaaggatttgatgtgacgaagagtggagatgcacgtgttggtttagttggctttccttcggttgggaaatcaacattgttgaacaagctaacagggacattttcagaggttgcttcctacgagtttacaactttaacatgtattcctggagttatcatgtataagggtgctaaaatccagcttctagatctcccagggatcatcgaaggtgctaaagatggaaagggcagaggaagacaggttatcagcacagctaggacatgcaatgttattttgattgttcttgatgccataaaaccaataactcacaagcgtcttattgagaaggagcttgaaggatttggcattaggttgaacaaaacaccacccaatttgactttcagaagaaaggacaagggtggaatcaacttcacatcaacagtgacgaacacacatttggaccttgatacagtaaaagcaatctgtagcgagtacaggatacataatgctgatgtctccctgagatatgatgctacagcagatgatctcatagatgttattgaaggaagccggatttacactccttgcgtatatgttgtcaacaagattgatcagataacactcgaggagctggaaatcttggacaaacttccccattactgcccggttagtgctcatcttgaatggaatcttgatggacttctggagaaggtatgggaatacttggatttggttaggatatacacaaaacctaaagggctgaacccagattatgaggatcctgttatcgtatcatctaagaagaaaaccgtggaagatttctgcgacagaatccacaaggacatggtcaaacaatttaaatacgctctggtatggggttccagtgtgaaacataagcctcagagagttggcaaggagcatgagcttgacgatgaggacgtcgttcagatcattaagaaaatataggcgtatcatgtggtggaacaaaacctgttttttctggaaaactgggagcgttgaggattttgttgagtagtagcctcgcgagaagagcttgaactcggcctttgcttgttggtgaggctcatatgtaatgttccctgttctcagaaaatttgctttgatccaaagacaatgtgagtcggcatttacttatatacaacgagtcatgtagctgtgatgtaacttcctctaacttggtgccatgtggactggagcc

SEQ ID NO: 4700 - protein, 368 aa, Zea mays subsp. mays
  peptide (1)..(368): Ceres Seq. ID no. 12409863
  misc_feature (1)..(368): Homolog of NCBI NO: 15235111 NR Description: GTP-binding - like protein; protein id:
  misc_feature (1)..(368): Homolog of NCBI NO: 30585289 NR Description: Homo sapiens developmentally regulated GTP
  misc_feature (1)..(367): Homolog of NCBI NO: 4758796 NR Description: developmentally regulated GTP binding protein 1;
  misc_feature (1)..(367): Homolog of NCBI NO: 24586704 NR Description: developmentally regulated GTP binding protein 1
  misc_feature (1)..(367): Homolog of NCBI NO: 6681225 NR Description: developmentally regulated GTP binding protein 1;
  misc_feature (1)..(367): Homolog of NCBI NO: 18089152 NR Description: developmentally regulated GTP binding protein 1
  misc_feature (1)..(367): Homolog of NCBI NO: 346685 NR Description: GTP-binding protein DRG [validated] - mouse
  misc_feature (1)..(367): Homolog of NCBI NO: 1169421 NR Description: Developmentally regulated GTP-binding protein 1
  misc_feature (1)..(367): Homolog of NCBI NO: 26348781 NR Description: unnamed protein product [Mus musculus]
  misc_feature (3)..(367): Homolog of NCBI NO: 23613265 NR Description: developmentally regulated GTP-binding protein 1, [Plasmodium falciparum 3D7] >gi|23504826|emb|CAD51607.1|
MATVMQKIKDIEDEMARTQKNKATAHHLGLLKAKLAKLRRELLTPTSKGGGGAGEGFDVTKSGDARVGLVGFPSVGKSTLLNKLTGTFSEVASYEFTTLTCIPGVIMYKGAKIQLLDLPGIIEGAKDGKGRGRQVISTARTCNVILIVLDAIKPITHKRLIEKELEGFGIRLNKTPPNLTFRRKDKGGINFTSTVTNTHLDLDTVKAICSEYRIHNADVSLRYDATADDLIDVIEGSRIYTPCVYVVNKIDQITLEELEILDKLPHYCPVSAHLEWNLDGLLEKVWEYLDLVRIYTKPKGLNPDYEDPVIVSSKKKTVEDFCDRIHKDMVKQFKYALVWGSSVKHKPQRVGKEHELDDEDVVQIIKKI

SEQ ID NO: 4701 - protein, 364 aa, Zea mays subsp. mays
  peptide (1)..(364): Ceres Seq. ID no. 12409864
  misc_feature (1)..(364): Homolog of NCBI NO: 15235111 NR Description: GTP-binding - like protein; protein id:
  misc_feature (1)..(364): Homolog of NCBI NO: 30585289 NR Description: Homo sapiens developmentally regulated GTP
  misc_feature (1)..(363): Homolog of NCBI NO: 4758796 NR Description: developmentally regulated GTP binding protein 1;
  misc_feature (1)..(363): Homolog of NCBI NO: 24586704 NR Description: developmentally regulated GTP binding protein 1
  misc_feature (1)..(363): Homolog of NCBI NO: 6681225 NR Description: developmentally regulated GTP binding protein 1;
  misc_feature (1)..(363): Homolog of NCBI NO: 18089152 NR Description: developmentally regulated GTP binding protein 1
  misc_feature (1)..(363): Homolog of NCBI NO: 346685 NR Description: GTP-binding protein DRG [validated] - mouse
  misc_feature (1)..(363): Homolog of NCBI NO: 1169421 NR Description: Developmentally regulated GTP-binding protein 1
  misc_feature (1)..(363): Homolog of NCBI NO: 26348781 NR Description: unnamed protein product [Mus musculus]
  misc_feature (1)..(363): Homolog of NCBI NO: 23613265 NR Description: developmentally regulated GTP-binding protein 1, [Plasmodium falciparum 3D7] >gi|23504826|emb|CAD51607.1|
MQKIKDIEDEMARTQKNKATAHHLGLLKAKLAKLRRELLTPTSKGGGGAGEGFDVTKSGDARVGLVGFPSVGKSTLLNKLTGTFSEVASYEFTTLTCIPGVIMYKGAKIQLLDLPGIIEGAKDGKGRGRQVISTARTCNVILIVLDAIKPITHKRLIEKELEGFGIRLNKTPPNLTFRRKDKGGINFTSTVTNTHLDLDTVKAICSEYRIHNADVSLRYDATADDLIDVIEGSRIYTPCVYVVNKIDQITLEELEILDKLPHYCPVSAHLEWNLDGLLEKVWEYLDLVRIYTKPKGLNPDYEDPVIVSSKKKTVEDFCDRIHKDMVKQFKYALVWGSSVKHKPQRVGKEHELDDEDVVQIIKKI

SEQ ID NO: 4702 - protein, 354 aa, Zea mays subsp. mays
  peptide (1)..(354): Ceres Seq. ID no. 12409865
  misc_feature (1)..(354): Homolog of NCBI NO: 15235111 NR Description: GTP-binding - like protein; protein id:
  misc_feature (1)..(354): Homolog of NCBI NO: 30585289 NR Description: Homo sapiens developmentally regulated GTP
  misc_feature (1)..(353): Homolog of NCBI NO: 4758796 NR Description: developmentally regulated GTP binding protein 1;
  misc_feature (1)..(353): Homolog of NCBI NO: 24586704 NR Description: developmentally regulated GTP binding protein 1
  misc_feature (1)..(353): Homolog of NCBI NO: 6681225 NR Description: developmentally regulated GTP binding protein 1;
  misc_feature (1)..(353): Homolog of NCBI NO: 18089152 NR Description: developmentally regulated GTP binding protein 1
  misc_feature (1)..(353): Homolog of NCBI NO: 346685 NR Description: GTP-binding protein DRG [validated] - mouse
  misc_feature (1)..(353): Homolog of NCBI NO: 1169421 NR Description: Developmentally regulated GTP-binding protein 1
  misc_feature (1)..(353): Homolog of NCBI NO: 26348781 NR Description: unnamed protein product [Mus musculus]
  misc_feature (1)..(353): Homolog of NCBI NO: 23613265 NR Description: developmentally regulated GTP-binding protein 1, [Plasmodium falciparum 3D7] >gi|23504826|emb|CAD51607.1|
MARTQKNKATAHHLGLLKAKLAKLRRELLTPTSKGGGGAGEGFDVTKSGDARVGLVGFPSVGKSTLLNKLTGTFSEVASYEFTTLTCIPGVIMYKGAKIQLLDLPGIIEGAKDGKGRGRQVISTARTCNVILIVLDAIKPITHKRLIEKELEGFGIRLNKTPPNLTFRRKDKGGINFTSTVTNTHLDLDTVKAICSEYRIHNADVSLRYDATADDLIDVIEGSRIYTPCVYVVNKIDQITLEELEILDKLPHYCPVSAHLEWNLDGLLEKVWEYLDLVRIYTKPKGLNPDYEDPVIVSSKKKTVEDFCDRIHKDMVKQFKYALVWGSSVKHKPQRVGKEHELDDEDVVQIIKKI

SEQ ID NO: 4703 - DNA, 1217 bp, Zea mays subsp. mays
  misc_feature (1)..(1217): Ceres Seq. ID no. 12409859
  misc_feature: MA Experiment ID: 108504 Result: Up-regulated in Transcription
  misc_feature: MA Experiment 108504 PARAMETER Experiment Name: Zm_Drought_P Parameter: Age (day) Value: 8
  misc_feature: MA Experiment 108504 PARAMETER Experiment Name: Zm_Drought_P Parameter: Organism Value: Zea mays
  misc_feature: MA Experiment 108504 PARAMETER Experiment Name: Zm_Drought_P Parameter: Plant Line Value: 35A19
  misc_feature: MA Experiment 108504 PARAMETER Experiment Name: Zm_Drought_P Parameter: Timepoint (hr) Value: 12
  misc_feature: MA Experiment 108504 PARAMETER Experiment Name: Zm_Drought_P Parameter: Tissue Value: Aerial
  misc_feature: MA Experiment 108504 PARAMETER Experiment Name: Zm_Drought_P Parameter: Treatment Value: Drought vs. No Drought
  misc_feature: MA Experiment ID: 108556 Result: Up-regulated in Transcription
  misc_feature: MA Experiment 108556 PARAMETER Experiment Name: Zm_Drought_P Parameter: Age (day) Value: 9
  misc_feature: MA Experiment 108556 PARAMETER Experiment Name: Zm_Drought_P Parameter: Organism Value: Zea mays
  misc_feature: MA Experiment 108556 PARAMETER Experiment Name: Zm_Drought_P Parameter: Plant Line Value: 35A19
  misc_feature: MA Experiment 108556 PARAMETER Experiment Name: Zm_Drought_P Parameter: Timepoint (hr) Value: 24
  misc_feature: MA Experiment 108556 PARAMETER Experiment Name: Zm_Drought_P Parameter: Tissue Value: Aerial
  misc_feature: MA Experiment 108556 PARAMETER Experiment Name: Zm_Drought_P Parameter: Treatment Value: Drought vs. No Drought
  misc_feature: MA Experiment ID: 108689 Result: Up-regulated in Transcription
  misc_feature: MA Experiment 108689 PARAMETER Experiment Name: Zm_Drought_Roots_P Parameter: Age (day) Value: 9
  misc_feature: MA Experiment 108689 PARAMETER Experiment Name: Zm_Drought_Roots_P Parameter: Organism Value: Zea mays
  misc_feature: MA Experiment 108689 PARAMETER Experiment Name: Zm_Drought_Roots_P Parameter: Plant Line Value: 35A19
  misc_feature: MA Experiment 108689 PARAMETER Experiment Name: Zm_Drought_Roots_P Parameter: Timepoint (hr) Value: 24
  misc_feature: MA Experiment 108689 PARAMETER Experiment Name: Zm_Drought_Roots_P Parameter: Tissue Value: Roots
  misc_feature: MA Experiment 108689 PARAMETER Experiment Name: Zm_Drought_Roots_P Parameter: Treatment Value: Drought vs. No Drought
gcaaattaaggcttcagctcgcgcgagacctcagctttcactcgagtgagtgcgagtccatcgccggagagagagagagcgagagcacgcaatcgagttaaacaagccctgtctcttggttctctgtccacggcgggagagtggtagagatgggcaggcagccgtgctgcgagaagatcggtatcaagaaggggccgtggaccgcggaggaggaccagaagctggtcaccttcctcctgtctcacggccattgctgctggcggctcgtccccaagctcgcggggctgctgaggtgcgggaagagctgccggctgcggtggaccaactacctgaggccggacctcaagcgcggcctcctctcggaggaggaagaggcgctggtcatcgacctccacgcgcagctcggcaaccggtggtccaagatcgcggcgcggctgccggggaggacggacaacgagataaagaaccactggaacacccacatcaagaagaagctcaagaagatgggcatcgaccccgtcacccacgggccgctcgcgccggccactcaacctctggcgctggcgcagcagcgcgatcctccgcaggtggtgcgagaagaggaacgttgcgacgacgaccccagcaagcaggcatcgtcgcaagggctggcggcgggcgccgacgaggacgacgacgtggaggagacgccggcgagcgccgcccagccgcacggcgcgacgaccacctcccctgcttccgcagcggctggatccgtctcgccgtcctgctcctcctcggcctccggcgcggacgcggacgcggccgcctggcccggccccatcgacctcttcctcgaagtggacggcatcatggacatggactgggcgggcatcctttcgggctgcggcgatgacgacgccgcggacataagcgtcgatcttttcgaccattacgcaggcgatggctttgatgaacaagtctggatgtgatgcttgctcttcctgcaggtagcagcagtacactgggcggtaggatggttagaactgtgttgtgttgttactggtgatcgtatctctgctcttgcgtttgcgtgtccagttgcctctcttgttttcttgggtcaattcaagttcgcccgcgtccatgcatgcatggttgctggtatgggggagaggcacggcctggtttgtgtggtacgttcttcgtgaagattgaggaaatgaattgtgattgcg

SEQ ID NO: 4704 - protein, 273 aa, Zea mays subsp. mays
  peptide (1)..(273): Ceres Seq. ID no. 12409860
  misc_feature (14)..(61): Pfam Name: Myb-like DNA-binding domain Pfam Description: Myb-like DNA-binding domain
  misc_feature (1)..(238): Homolog of NCBI NO: 7446182 NR Description: probable myb factor - rice
  misc_feature (1)..(235): Homolog of NCBI NO: 23343575 NR Description: Myb51 protein [Oryza sativa]
  misc_feature (1)..(153): Homolog of NCBI NO: 19073330 NR Description: typical P-type R2R3 Myb protein [Sorghum bicolor]
  misc_feature (1)..(156): Homolog of NCBI NO: 19073332 NR Description: typical P-type R2R3 Myb protein [Sorghum bicolor]
  misc_feature (1)..(197): Homolog of NCBI NO: 23343577 NR Description: Myb13 protein [Oryza sativa]
  misc_feature (1)..(155): Homolog of NCBI NO: 19072740 NR Description: typical P-type R2R3 Myb protein [Zea mays]
  misc_feature (1)..(176): Homolog of NCBI NO: 7446177 NR Description: myb-related transcription factor - tomato
  misc_feature (1)..(141): Homolog of NCBI NO: 19073336 NR Description: typical P-type R2R3 Myb protein [Sorghum bicolor]
  misc_feature (1)..(178): Homolog of NCBI NO: 34147926 NR Description: R2R3-MYB transcription factor [Pinus taeda]
  misc_feature (1)..(212): Homolog of NCBI NO: 15219601 NR Description: myb family transcription factor(MYB20); protein At1g66230.1 [Arabidopsis thaliana] >gi|25294090|pir||C96687
MGRQPCCEKIGIKKGPWTAEEDQKLVTFLLSHGHCCWRLVPKLAGLLRCGKSCRLRWTNYLRPDLKRGLLSEEEEALVIDLHAQLGNRWSKIAARLPGRTDNEIKNHWNTHIKKKLKKMGIDPVTHGPLAPATQPLALAQQRDPPQVVREEERCDDDPSKQASSQGLAAGADEDDDVEETPASAAQPHGATTTSPASAAAGSVSPSCSSSASGADADAAAWPGPIDLFLEVDGIMDMDWAGILSGCGDDDAADISVDLFDHYAGDGFDEQVWM

SEQ ID NO: 4705 - protein, 155 aa, Zea mays subsp. mays
  peptide (1)..(155): Ceres Seq. ID no. 12409861
  misc_feature (1)..(117): Homolog of NCBI NO: 23343575 NR Description: Myb51 protein [Oryza sativa]
  misc_feature (1)..(35): Homolog of NCBI NO: 19073330 NR Description: typical P-type R2R3 Myb protein [Sorghum bicolor]
  misc_feature (1)..(38): Homolog of NCBI NO: 19073332 NR Description: typical P-type R2R3 Myb protein [Sorghum bicolor]
  misc_feature (1)..(79): Homolog of NCBI NO: 23343577 NR Description: Myb13 protein [Oryza sativa]
  misc_feature (1)..(37): Homolog of NCBI NO: 19072740 NR Description: typical P-type R2R3 Myb protein [Zea mays]
  misc_feature (1)..(58): Homolog of NCBI NO: 7446177 NR Description: myb-related transcription factor - tomato
  misc_feature (1)..(23): Homolog of NCBI NO: 19073336 NR Description: typical P-type R2R3 Myb protein [Sorghum bicolor]
  misc_feature (1)..(60): Homolog of NCBI NO: 34147926 NR Description: R2R3-MYB transcription factor [Pinus taeda]
  misc_feature (1)..(94): Homolog of NCBI NO: 15219601 NR Description: myb family transcription factor(MYB20); protein At1g66230.1 [Arabidopsis thaliana] >gi|25294090|pir||C96687
  misc_feature (1)..(120): Homolog of NCBI NO: 7446182 NR Description: probable myb factor - rice
MGIDPVTHGPLAPATQPLALAQQRDPPQVVREEERCDDDPSKQASSQGLAAGADEDDDVEETPASAAQPHGATTTSPASAAAGSVSPSCSSSASGADADAAAWPGPIDLFLEVDGIMDMDWAGILSGCGDDDAADISVDLFDHYAGDGFDEQVWM

SEQ ID NO: 4706 - DNA, 1527 bp, Zea mays subsp. mays
  misc_feature (1)..(1527): Ceres Seq. ID no. 12356270
  misc_feature: MA Experiment ID: 108535 Result: Down-regulated in Transcription
  misc_feature: MA Experiment 108535 PARAMETER Experiment Name: Zm_Meristem_P Parameter: Age (day) Value: 8
  misc_feature: MA Experiment 108535 PARAMETER Experiment Name: Zm_Meristem_P Parameter: Organism Value: Zea mays
  misc_feature: MA Experiment 108535 PARAMETER Experiment Name: Zm_Meristem_P Parameter: Plant Line Value: 35A19
  misc_feature: MA Experiment 108535 PARAMETER Experiment Name: Zm_Meristem_P Parameter: Tissue Value: Root Meristem vs. Above Root Meristem
  misc_feature: MA Experiment ID: 108689 Result: Up-regulated in Transcription
  misc_feature: MA Experiment 108689 PARAMETER Experiment Name: Zm_Drought_Roots_P Parameter: Age (day) Value: 9
  misc_feature: MA Experiment 108689 PARAMETER Experiment Name: Zm_Drought_Roots_P Parameter: Organism Value: Zea mays
  misc_feature: MA Experiment 108689 PARAMETER Experiment Name: Zm_Drought_Roots_P Parameter: Plant Line Value: 35A19
  misc_feature: MA Experiment 108689 PARAMETER Experiment Name: Zm_Drought_Roots_P Parameter: Timepoint (hr) Value: 24
  misc_feature: MA Experiment 108689 PARAMETER Experiment Name: Zm_Drought_Roots_P Parameter: Tissue Value: Roots
  misc_feature: MA Experiment 108689 PARAMETER Experiment Name: Zm_Drought_Roots_P Parameter: Treatment Value: Drought vs. No Drought
  misc_feature: MA Experiment ID: 20000479 Result: Up-regulated in Transcription
  misc_feature: MA Experiment 20000479 PARAMETER Experiment Name: Zm_Drought_P Parameter: Age (day) Value: 10
  misc_feature: MA Experiment 20000479 PARAMETER Experiment Name: Zm_Drought_P Parameter: Organism Value: Zea mays
  misc_feature: MA Experiment 20000479 PARAMETER Experiment Name: Zm_Drought_P Parameter: Plant Line Value: 35A19
  misc_feature: MA Experiment 20000479 PARAMETER Experiment Name: Zm_Drought_P Parameter: Timepoint (hr) Value: 48
  misc_feature: MA Experiment 20000479 PARAMETER Experiment Name: Zm_Drought_P Parameter: Tissue Value: Aerial
  misc_feature: MA Experiment 20000479 PARAMETER Experiment Name: Zm_Drought_P Parameter: Treatment Value: Drought vs. No Drought
  misc_feature: MA Experiment ID: 20000480 Result: Up-regulated in Transcription
  misc_feature: MA Experiment 20000480 PARAMETER Experiment Name: Zm_Drought_P Parameter: Age (day) Value: 11
  misc_feature: MA Experiment 20000480 PARAMETER Experiment Name: Zm_Drought_P Parameter: Organism Value: Zea mays
  misc_feature: MA Experiment 20000480 PARAMETER Experiment Name: Zm_Drought_P Parameter: Plant Line Value: 35A19
  misc_feature: MA Experiment 20000480 PARAMETER Experiment Name: Zm_Drought_P Parameter: Timepoint (hr) Value: 72
  misc_feature: MA Experiment 20000480 PARAMETER Experiment Name: Zm_Drought_P Parameter: Tissue Value: Aerial
  misc_feature: MA Experiment 20000480 PARAMETER Experiment Name: Zm_Drought_P Parameter: Treatment Value: Drought vs. No Drought
aacgcaacacttccgtgccctacgccccagaacctcccaccgcatcggagggctccgcgcctccgctacgccgatggcgtcccagccgccgccagagcccgcaccggccgaggcgggtctggaaagcatggagggcctcgtcctcgacacggtcatctcaagagccggcgcgcgccccgcagcggcgctcgcctgcgccagcacgcgcctccgcaccgccgttgccgacgactccctctggcgcagattctgcggtgaggacctggggctcgacgctcccgtcgatccagagggccggcctcttccctccttccaggttgcatataaactttggttggagtcttttggcatgtaccctctacctatggtaaagagagtgagacaattctggacttcaatgaaaacttggttgtctgaaaactttcctgaggcatacaaaacgttatgcgaaggtgtttctgaagctcaattaaagtcagcagaggatgatcttggtttcaagctccctatgcccacaaagctgttgtatcgcttttgcaatgctcaactgccttttagtgaggaccatgacacaaataaaagcatttccactcatggattgattgggggctatgcgttttatgatcattgggtgaatgtgcatttgtcaccgcttgagcaaatagttgaagagacgaaggactctatcgggagttccctgatgtatttcatgggcgcaaattcattgtagtggcaacttcatggtttcatccgaaaacatttcttctagattgctcaaatggtgaactttatgttggtacatacaacttaccgataggaggaatgcttccctgtgtgcccaaagcattgataaagccagcaggtaatgatctagcacaagatggactacttctgtggttagaagaacaccttaggcgtttacagagtggcatgatcaagacccgtatgctgatggcatcgagatatatcagcttatatccagaagcacctccatcatgcagttcagctgttacaaatggcattaaggtacgctcatctgctgtctttgtgccagaacatcctgggaggcctggggaaaaatttatgttcacttactcaattcgcatgtcagttccagaggcatgcatgctaggtggcgtgtactattcttcctgccagctttgctcccgccactggaccatcagatcgtgtgacagggttgtttctgatgtgagcggaggaggggttattggagagtatcctctactgttacctggcgaggatgagtttgtctacgagagttgcacgccactgccccaagtacctggatctgtggagggctctttttcgtttgtgcctggcaagttgagccgacctgaagggaagccgttcgaagtcatggtggctcctttccctcttgatgtgccagaatacatcttctgatgatcacagcagaaataaatgtatgtatgcttgttggggaaaagtccggatgcttgtaataaccttattggagtaatgtaaaataaggaaccgtgcgctcttcgt

SEQ ID NO: 4707 - protein, 242 aa, Zea mays subsp. mays
  peptide (1)..(242): Ceres Seq. ID no. 12356271
  misc_feature (39)..(228): Homolog of NCBI NO: 18390613 NR Description: F-box protein family; protein id: At1g06110.1, by cDNA: gi_16930490, supported by cDNA: gi_20466210 [Arabidopsis >gi|25373377|pir||D86196 hypothetical protein [imported]
  misc_feature (36)..(182): Homolog of NCBI NO: 12859828 NR Description: unnamed protein product [Mus musculus]
  misc_feature (36)..(182): Homolog of NCBI NO: 10181216 NR Description: f-box only protein 3; F-box protein FBA [Mus
  misc_feature (36)..(182): Homolog of NCBI NO: 12835784 NR Description: unnamed protein product [Mus musculus] unnamed protein product [Mus musculus]
  misc_feature (36)..(182): Homolog of NCBI NO: 26340912 NR Description: unnamed protein product [Mus musculus]
  misc_feature (36)..(182): Homolog of NCBI NO: 26389339 NR Description: unnamed protein product [Mus musculus]
  misc_feature (36)..(182): Homolog of NCBI NO: 34856605 NR Description: similar to F-box protein FBA [Rattus norvegicus]
  misc_feature (32)..(182): Homolog of NCBI NO: 6103643 NR Description: F-box protein FBX3 [Homo sapiens]
  misc_feature (32)..(182): Homolog of NCBI NO: 15812188 NR Description: F-box only protein 3 isoform 2; F-box protein
  misc_feature (32)..(182): Homolog of NCBI NO: 13124239 NR Description: F-box only protein 3 >gi|7023521|dbj|BAA91991.1|
TQHFRALRPRTSHRIGGLRASATPMASQPPPEPAPAEAGLESMEGLVLDTVISRAGARPAAALACASTRLRTAVADDSLWRRFCGEDLGLDAPVDPEGRPLPSFQVAYKLWLESFGMYPLPMVKRVRQFWTSMKTWLSENFPEAYKTLCEGVSEAQLKSAEDDLGFKLPMPTKLLYRFCNAQLPFSEDHDTNKSISTHGLIGGYAFYDHWVNVHLSPLEQIVEETKDSIGSSLMYFMGANSL

SEQ ID NO: 4708 - protein, 218 aa, Zea mays subsp. mays
  peptide (1)..(218): Ceres Seq. ID no. 12356272
  misc_feature (15)..(204): Homolog of NCBI NO: 18390613 NR Description: F-box protein family; protein id: At1g06110.1, by cDNA: gi_16930490, supported by cDNA: gi_20466210 [Arabidopsis >gi|25373377|pir||D86196 hypothetical protein [imported]
  misc_feature (12)..(158): Homolog of NCBI NO: 12859828 NR Description: unnamed protein product [Mus musculus]
  misc_feature (12)..(158): Homolog of NCBI NO: 10181216 NR Description: f-box only protein 3; F-box protein FBA [Mus
  misc_feature (12)..(158): Homolog of NCBI NO: 12835784 NR Description: unnamed protein product [Mus musculus] unnamed protein product [Mus musculus]
  misc_feature (12)..(158): Homolog of NCBI NO: 26389339 NR Description: unnamed protein product [Mus musculus]
  misc_feature (12)..(158): Homolog of NCBI NO: 26340912 NR Description: unnamed protein product [Mus musculus]
  misc_feature (12)..(158): Homolog of NCBI NO: 34856605 NR Description: similar to F-box protein FBA [Rattus norvegicus]
  misc_feature (8)..(158): Homolog of NCBI NO: 6103643 NR Description: F-box protein FBX3 [Homo sapiens]
  misc_feature (8)..(158): Homolog of NCBI NO: 15812188 NR Description: F-box only protein 3 isoform 2; F-box protein
  misc_feature (8)..(158): Homolog of NCBI NO: 13124239 NR Description: F-box only protein 3 >gi|7023521|dbj|BAA91991.1|
MASQPPPEPAPAEAGLESMEGLVLDTVISRAGARPAAALACASTRLRTAVADDSLWRRFCGEDLGLDAPVDPEGRPLPSFQVAYKLWLESFGMYPLPMVKRVRQFWTSMKTWLSENFPEAYKTLCEGVSEAQLKSAEDDLGFKLPMPTKLLYRFCNAQLPFSEDHDTNKSISTHGLIGGYAFYDHWVNVHLSPLEQIVEETKDSIGSSLMYFMGANSL

SEQ ID NO: 4709 - protein, 200 aa, Zea mays subsp. mays
  peptide (1)..(200): Ceres Seq. ID no. 12356273
  misc_feature (1)..(186): Homolog of NCBI NO: 18390613 NR Description: F-box protein family; protein id: At1g06110.1, by cDNA: gi_16930490, supported by cDNA: gi_20466210 [Arabidopsis >gi|25373377|pir||D86196 hypothetical protein [imported]
  misc_feature (1)..(140): Homolog of NCBI NO: 12859828 NR Description: unnamed protein product [Mus musculus]
  misc_feature (1)..(140): Homolog of NCBI NO: 10181216 NR Description: f-box only protein 3; F-box protein FBA [Mus
  misc_feature (1)..(140): Homolog of NCBI NO: 12835784 NR Description: unnamed protein product [Mus musculus] unnamed protein product [Mus musculus]
  misc_feature (1)..(140): Homolog of NCBI NO: 26340912 NR Description: unnamed protein product [Mus musculus]
  misc_feature (1)..(140): Homolog of NCBI NO: 26389339 NR Description: unnamed protein product [Mus musculus]
  misc_feature (1)..(140): Homolog of NCBI NO: 34856605 NR Description: similar to F-box protein FBA [Rattus norvegicus]
  misc_feature (1)..(140): Homolog of NCBI NO: 6103643 NR Description: F-box protein FBX3 [Homo sapiens]
  misc_feature (1)..(140): Homolog of NCBI NO: 15812188 NR Description: F-box only protein 3 isoform 2; F-box protein
  misc_feature (1)..(140): Homolog of NCBI NO: 13124239 NR Description: F-box only protein 3 >gi|7023521|dbj|BAA91991.1|
MEGLVLDTVISRAGARPAAALACASTRLRTAVADDSLWRRFCGEDLGLDAPVDPEGRPLPSFQVAYKLWLESFGMYPLPMVKRVRQFWTSMKTWLSENFPEAYKTLCEGVSEAQLKSAEDDLGFKLPMPTKLLYRFCNAQLPFSEDHDTNKSISTHGLIGGYAFYDHWVNVHLSPLEQIVEETKDSIGSSLMYFMGANSL

SEQ ID NO: 4710 - DNA, 709 bp, Zea mays subsp. mays
  misc_feature (1)..(709): Ceres Seq. ID no. 12412856
  misc_feature: MA Experiment ID: 108527 Result: Down-regulated in Transcription
  misc_feature: MA Experiment 108527 PARAMETER Experiment Name: Zm_5mM_NO_P Parameter: Age (day) Value: 8
  misc_feature: MA Experiment 108527 PARAMETER Experiment Name: Zm_5mM_NO_P Parameter: Organism Value: Zea mays
  misc_feature: MA Experiment 108527 PARAMETER Experiment Name: Zm_5mM_NO_P Parameter: Plant Line Value: 35A19
  misc_feature: MA Experiment 108527 PARAMETER Experiment Name: Zm_5mM_NO_P Parameter: Timepoint (hr) Value: 6
  misc_feature: MA Experiment 108527 PARAMETER Experiment Name: Zm_5mM_NO_P Parameter: Tissue Value: Aerial
  misc_feature: MA Experiment 108527 PARAMETER Experiment Name: Zm_5mM_NO_P Parameter: Treatment Value: 5mM NO vs. No Treatment
  misc_feature: MA Experiment ID: 108528 Result: Up-regulated in Transcription
  misc_feature: MA Experiment 108528 PARAMETER Experiment Name: Zm_Imbibed_Seeds_P Parameter: Age (day) Value: 5 vs. 2
  misc_feature: MA Experiment 108528 PARAMETER Experiment Name: Zm_Imbibed_Seeds_P Parameter: Organism Value: Zea mays
  misc_feature: MA Experiment 108528 PARAMETER Experiment Name: Zm_Imbibed_Seeds_P Parameter: Plant Line Value: 35A19
  misc_feature: MA Experiment 108528 PARAMETER Experiment Name: Zm_Imbibed_Seeds_P Parameter: Tissue Value: Aerial vs. Embryo
  misc_feature: MA Experiment ID: 108530 Result: Up-regulated in Transcription
  misc_feature: MA Experiment 108530 PARAMETER Experiment Name: Zm_Imbibed_Seeds_P Parameter: Age (day) Value: 6 vs. 2
  misc_feature: MA Experiment 108530 PARAMETER Experiment Name: Zm_Imbibed_Seeds_P Parameter: Organism Value: Zea mays
  misc_feature: MA Experiment 108530 PARAMETER Experiment Name: Zm_Imbibed_Seeds_P Parameter: Plant Line Value: 35A19
  misc_feature: MA Experiment 108530 PARAMETER Experiment Name: Zm_Imbibed_Seeds_P Parameter: Tissue Value: Aerial vs. Embryo
  misc_feature: MA Experiment ID: 108543 Result: Up-regulated in Transcription
  misc_feature: MA Experiment ID: 108545 Result: Up-regulated in Transcription
  misc_feature: MA Experiment 108545 PARAMETER Experiment Name: Zm_Imbibed_Seeds_P Parameter: Age (day) Value: 3 vs. 2
  misc_feature: MA Experiment 108545 PARAMETER Experiment Name: Zm_Imbibed_Seeds_P Parameter: Organism Value: Zea mays
  misc_feature: MA Experiment 108545 PARAMETER Experiment Name: Zm_Imbibed_Seeds_P Parameter: Plant Line Value: 35A19
  misc_feature: MA Experiment 108545 PARAMETER Experiment Name: Zm_Imbibed_Seeds_P Parameter: Tissue Value: Aerial vs. Embryo
  misc_feature: MA Experiment ID: 108546 Result: Down-regulated in Transcription
  misc_feature: MA Experiment 108546 PARAMETER Experiment Name: Zm_Imbibed_Seeds_P Parameter: Age (day) Value: 3 vs. 2
  misc_feature: MA Experiment 108546 PARAMETER Experiment Name: Zm_Imbibed_Seeds_P Parameter: Organism Value: Zea mays
  misc_feature: MA Experiment 108546 PARAMETER Experiment Name: Zm_Imbibed_Seeds_P Parameter: Plant Line Value: 35A19
  misc_feature: MA Experiment 108546 PARAMETER Experiment Name: Zm_Imbibed_Seeds_P Parameter: Tissue Value: Roots vs. Embryo
  misc_feature: MA Experiment ID: 108547 Result: Up-regulated in Transcription
  misc_feature: MA Experiment 108547 PARAMETER Experiment Name: Zm_Imbibed_Seeds_P Parameter: Age (day) Value: 4 vs. 2
  misc_feature: MA Experiment 108547 PARAMETER Experiment Name: Zm_Imbibed_Seeds_P Parameter: Organism Value: Zea mays
  misc_feature: MA Experiment 108547 PARAMETER Experiment Name: Zm_Imbibed_Seeds_P Parameter: Plant Line Value: 35A19
  misc_feature: MA Experiment 108547 PARAMETER Experiment Name: Zm_Imbibed_Seeds_P Parameter: Tissue Value: Aerial vs. Embryo
  misc_feature: MA Experiment ID: 108687 Result: Down-regulated in Transcription
  misc_feature: MA Experiment 108687 PARAMETER Experiment Name: Zm_Embryos-Flowers__P Parameter: Tissue Value: Embryo vs. Aerial+
  misc_feature: MA Experiment ID: 20000479 Result: Down-regulated in Transcription
  misc_feature: MA Experiment 20000479 PARAMETER Experiment Name: Zm_Drought_P Parameter: Age (day) Value: 10
  misc_feature: MA Experiment 20000479 PARAMETER Experiment Name: Zm_Drought_P Parameter: Organism Value: Zea mays
  misc_feature: MA Experiment 20000479 PARAMETER Experiment Name: Zm_Drought_P Parameter: Plant Line Value: 35A19
  misc_feature: MA Experiment 20000479 PARAMETER Experiment Name: Zm_Drought_P Parameter: Timepoint (hr) Value: 48
  misc_feature: MA Experiment 20000479 PARAMETER Experiment Name: Zm_Drought_P Parameter: Tissue Value: Aerial
  misc_feature: MA Experiment 20000479 PARAMETER Experiment Name: Zm_Drought_P Parameter: Treatment Value: Drought vs. No Drought
  misc_feature: MA Experiment ID: 20000480 Result: Down-regulated in Transcription
  misc_feature: MA Experiment 20000480 PARAMETER Experiment Name: Zm_Drought_P Parameter: Age (day) Value: 11
  misc_feature: MA Experiment 20000480 PARAMETER Experiment Name: Zm_Drought_P Parameter: Organism Value: Zea mays
  misc_feature: MA Experiment 20000480 PARAMETER Experiment Name: Zm_Drought_P Parameter: Plant Line Value: 35A19
  misc_feature: MA Experiment 20000480 PARAMETER Experiment Name: Zm_Drought_P Parameter: Timepoint (hr) Value: 72
  misc_feature: MA Experiment 20000480 PARAMETER Experiment Name: Zm_Drought_P Parameter: Tissue Value: Aerial
  misc_feature: MA Experiment 20000480 PARAMETER Experiment Name: Zm_Drought_P Parameter: Treatment Value: Drought vs. No Drought
  misc_feature: MA Experiment ID: 20000626 Result: Down-regulated in Transcription
  misc_feature: MA Experiment 20000626 PARAMETER Experiment Name: Zm_Herbicide-Treatments_P Parameter: Timepoint (hr) Value: 12
  misc_feature: MA Experiment 20000626 PARAMETER Experiment Name: Zm_Herbicide-Treatments_P Parameter: Tissue Value: Aerial
  misc_feature: MA Experiment 20000626 PARAMETER Experiment Name: Zm_Herbicide-Treatments_P Parameter: Treatment Value: Roundup vs. No Treatment
aaaaaacgaaacggctaagaaatccccaccttcacccacaaactagccggacaagcgaacaaaaggtgtaagagcttacgaccgacgcggccaaatagagataagagcaagatgacgtcgtcgacggcgttcagccaactgttcccttccgccgctgcggtatcccccgtccctcgctgcgtctccctgcagctcttctgcgccagcggtggagttgtccctggatggaggagaagatgccgccgcatggccatggtgcgcgcggcaaccgcggatgctgcggcgcccgcctacacctccgattccctcatcctctacttcaaggcggagggcaccatggaggagagggccattcccaagatcacagaatctcttgagggtatggagggagtcaaggacctggaggtgctcattgaagaaggcatcggaagtgttgtgttaacaaaggagacaactgtgcaagctactggagtagcctcgaacctggtggaagctatccagggagctgggttcaagctgcaaactctaagcttgagcttcgatgatttcgacgagccagcagcaggagcgggaggcactgtccaatccagcgagtgagctaatttgtggtgccgtgcgtggtgccaaatgcatataattcggtctcctgattttgtttaccctgctccttacctttgatttccgaagcacgatcttgtttttttttggc

SEQ ID NO: 4711 - protein, 161 aa, Zea mays subsp. mays
  peptide (1)..(161): Ceres Seq. ID no. 12412857
  misc_feature (1)..(148): Homolog of NCBI NO: 18417512 NR Description: putative protein; protein id: At5g14910.1, by cDNA: 21085., supported by cDNA: gi_14517525, supported by gi_15810112 [Arabidopsis thaliana] >gi|14517526|gb|AAK62653.1|
  misc_feature (1)..(148): Homolog of NCBI NO: 11346179 NR Description: hypothetical protein F2G14_30 - Arabidopsis >gi|9755658|emb|CAC01810.1| putative protein [Arabidopsis
MTSSTAFSQLFPSAAAVSPVPRCVSLQLFCASGGVVPGWRRRCRRMAMVRAATADAAAPAYTSDSLILYFKAEGTMEERAIPKITESLEGMEGVKDLEVLIEEGIGSVVLTKETTVQATGVASNLVEAIQGAGFKLQTLSLSFDDFDEPAAGAGGTVQSSE

SEQ ID NO: 4712 - protein, 116 aa, Zea mays subsp. mays
  peptide (1)..(116): Ceres Seq. ID no. 12412858
  misc_feature (1)..(103): Homolog of NCBI NO: 18417512 NR Description: putative protein; protein id: At5g14910.1, by cDNA: 21085., supported by cDNA: gi_14517525, supported by gi_15810112 [Arabidopsis thaliana] >gi|14517526|gb|AAK62653.1|
  misc_feature (1)..(103): Homolog of NCBI NO: 11346179 NR Description: hypothetical protein F2G14_30 - Arabidopsis >gi|9755658|emb|CAC01810.1| putative protein [Arabidopsis
MAMVRAATADAAAPAYTSDSLILYFKAEGTMEERAIPKITESLEGMEGVKDLEVLIEEGIGSVVLTKETTVQATGVASNLVEAIQGAGFKLQTLSLSFDDFDEPAAGAGGTVQSSE

SEQ ID NO: 4713 - protein, 114 aa, Zea mays subsp. mays
  peptide (1)..(114): Ceres Seq. ID no. 12412859
  misc_feature (1)..(101): Homolog of NCBI NO: 18417512 NR Description: putative protein; protein id: At5g14910.1, by cDNA: 21085., supported by cDNA: gi_14517525, supported by gi_15810112 [Arabidopsis thaliana] >gi|14517526|gb|AAK62653.1|
  misc_feature (1)..(101): Homolog of NCBI NO: 11346179 NR Description: hypothetical protein F2G14_30 - Arabidopsis >gi|9755658|emb|CAC01810.1| putative protein [Arabidopsis
MVRAATADAAAPAYTSDSLILYFKAEGTMEERAIPKITESLEGMEGVKDLEVLIEEGIGSVVLTKETTVQATGVASNLVEAIQGAGFKLQTLSLSFDDFDEPAAGAGGTVQSSE

SEQ ID NO: 4714 - DNA, 1356 bp, Zea mays subsp. mays
  misc_feature (1)..(1356): Ceres Seq. ID no. 12373716
  misc_feature: MA Experiment ID: 108528 Result: Up-regulated in Transcription
  misc_feature: MA Experiment 108528 PARAMETER Experiment Name: Zm_Imbibed_Seeds_P Parameter: Age (day) Value: 5 vs. 2
  misc_feature: MA Experiment 108528 PARAMETER Experiment Name: Zm_Imbibed_Seeds_P Parameter: Organism Value: Zea mays
  misc_feature: MA Experiment 108528 PARAMETER Experiment Name: Zm_Imbibed_Seeds_P Parameter: Plant Line Value: 35A19
  misc_feature: MA Experiment 108528 PARAMETER Experiment Name: Zm_Imbibed_Seeds_P Parameter: Tissue Value: Aerial vs. Embryo
  misc_feature: MA Experiment ID: 108530 Result: Up-regulated in Transcription
  misc_feature: MA Experiment 108530 PARAMETER Experiment Name: Zm_Imbibed_Seeds_P Parameter: Age (day) Value: 6 vs. 2
  misc_feature: MA Experiment 108530 PARAMETER Experiment Name: Zm_Imbibed_Seeds_P Parameter: Organism Value: Zea mays
  misc_feature: MA Experiment 108530 PARAMETER Experiment Name: Zm_Imbibed_Seeds_P Parameter: Plant Line Value: 35A19
  misc_feature: MA Experiment 108530 PARAMETER Experiment Name: Zm_Imbibed_Seeds_P Parameter: Tissue Value: Aerial vs. Embryo
  misc_feature: MA Experiment ID: 108545 Result: Up-regulated in Transcription
  misc_feature: MA Experiment 108545 PARAMETER Experiment Name: Zm_Imbibed_Seeds_P Parameter: Age (day) Value: 3 vs. 2
  misc_feature: MA Experiment 108545 PARAMETER Experiment Name: Zm_Imbibed_Seeds_P Parameter: Organism Value: Zea mays
  misc_feature: MA Experiment 108545 PARAMETER Experiment Name: Zm_Imbibed_Seeds_P Parameter: Plant Line Value: 35A19
  misc_feature: MA Experiment 108545 PARAMETER Experiment Name: Zm_Imbibed_Seeds_P Parameter: Tissue Value: Aerial vs. Embryo
  misc_feature: MA Experiment ID: 108547 Result: Up-regulated in Transcription
  misc_feature: MA Experiment 108547 PARAMETER Experiment Name: Zm_Imbibed_Seeds_P Parameter: Age (day) Value: 4 vs. 2
  misc_feature: MA Experiment 108547 PARAMETER Experiment Name: Zm_Imbibed_Seeds_P Parameter: Organism Value: Zea mays
  misc_feature: MA Experiment 108547 PARAMETER Experiment Name: Zm_Imbibed_Seeds_P Parameter: Plant Line Value: 35A19
  misc_feature: MA Experiment 108547 PARAMETER Experiment Name: Zm_Imbibed_Seeds_P Parameter: Tissue Value: Aerial vs. Embryo
  misc_feature: MA Experiment ID: 108559 Result: Down-regulated in Transcription
  misc_feature: MA Experiment 108559 PARAMETER Experiment Name: Zm_5mM_NO_P Parameter: Age (day) Value: 8
  misc_feature: MA Experiment 108559 PARAMETER Experiment Name: Zm_5mM_NO_P Parameter: Organism Value: Zea mays
  misc_feature: MA Experiment 108559 PARAMETER Experiment Name: Zm_5mM_NO_P Parameter: Plant Line Value: 35A19
  misc_feature: MA Experiment 108559 PARAMETER Experiment Name: Zm_5mM_NO_P Parameter: Timepoint (hr) Value: 12
  misc_feature: MA Experiment 108559 PARAMETER Experiment Name: Zm_5mM_NO_P Parameter: Tissue Value: Aerial
  misc_feature: MA Experiment 108559 PARAMETER Experiment Name: Zm_5mM_NO_P Parameter: Treatment Value: 5mM NO vs. No Treatment
  misc_feature: MA Experiment ID: 20000480 Result: Down-regulated in Transcription
  misc_feature: MA Experiment 20000480 PARAMETER Experiment Name: Zm_Drought_P Parameter: Age (day) Value: 11
  misc_feature: MA Experiment 20000480 PARAMETER Experiment Name: Zm_Drought_P Parameter: Organism Value: Zea mays
  misc_feature: MA Experiment 20000480 PARAMETER Experiment Name: Zm_Drought_P Parameter: Plant Line Value: 35A19
  misc_feature: MA Experiment 20000480 PARAMETER Experiment Name: Zm_Drought_P Parameter: Timepoint (hr) Value: 72
  misc_feature: MA Experiment 20000480 PARAMETER Experiment Name: Zm_Drought_P Parameter: Tissue Value: Aerial
  misc_feature: MA Experiment 20000480 PARAMETER Experiment Name: Zm_Drought_P Parameter: Treatment Value: Drought vs. No Drought
  misc_feature: MA Experiment ID: 20000535 Result: Down-regulated in Transcription
  misc_feature: MA Experiment 20000535 PARAMETER Experiment Name: Zm_Hybrid_Seed_Dev_P Parameter: DAP Value: 30 vs. 12
  misc_feature: MA Experiment 20000535 PARAMETER Experiment Name: Zm_Hybrid_Seed_Dev_P Parameter: Organism Value: Zea mays
  misc_feature: MA Experiment 20000535 PARAMETER Experiment Name: Zm_Hybrid_Seed_Dev_P Parameter: Plant Line Value: 35A19
  misc_feature: MA Experiment 20000535 PARAMETER Experiment Name: Zm_Hybrid_Seed_Dev_P Parameter: Tissue Value: Embryo vs. Unfert Floret
gtcttaccgcagcctcgtcctatccgtttgacgctcatccctggtatcccactcccctccctccccagccaacgacctccgccgccggccaccgcctgcctcagatcccccgccccgcccttccgttactcccagcgcgacgcggctgcgtccatgacgccctcctccgctctagccctcgcgctccaggccgcggcgtccccgctcccggcctccacgccgcggtcctcgcccaggtccagctcgctgagcctgggccgggggaccgccgggaacggcccgcgccgtcttgccgcagcagcgcccccacgggcgttcttctcatcgtccccctaccagccgccccaaccggaggggttctcgccacacccgggagtacggcctggtccccatggtgatcgaaaccacctcccgcggggagcgcgcctacgacatcttctcgcgcctgctgaaggagcgcatcgtctgcatcaacgggcccatcgccgacgacacggcctcgcttgtcgtcgcacagctgctcttcctcgagtccgagaacccactcaagcccgtccacctctatatcaactcccccgggggtgtcgtcaccgcggggctcgccatctacgacaccatgcagtacatccgctgccccgtcaccacgctctgcatcggccaggcggcctccatgggctcgctcctcctcgcggctggggcgccgggtgagaggcgcgcgctgcccaacgccagggtcatgatccaccagccctcgggcggcgcgcaggggcaggccactgacatcgccatccaggccaaggagatcctcaagctgcgcgaccgcctcaacaagatctaccagaagcacacgcgccagcccatcgacaagatcgagcagtgcatggagagggacctcttcatggatcccgacgaggcgcgcgactggggcctcatcgacgaggtcatcgagaaccgacctgcctcgctcatgcccgacggaatcgttggaggcctcgatgtgcccagcctcggtggcggtgggggcgggggcggacggggaagcgacgtcgaggagccttcggcggtgtgagaattggcctcaaaggtgaaatcccgttcgcatccggtggctttgttgtttgttgttagatctgaaggttcgattcttaccgtacaaggttaaccttgttattctggttacggaggcatccggctccccattctccttgttgcttcaattgcctgaattgagctattggtgatataattattacaactccaaggaaattctgttctgctggtactgataaattgacaaagtattgtgtatgttgtactatactactatattagtatcaattccatgccagggcattg

SEQ ID NO: 4715 - protein, 235 aa, Zea mays subsp. mays
  peptide (1)..(235): Ceres Seq. ID no. 12373717
  misc_feature (19)..(235): Pfam Name: Atrophin-1 family Pfam Description: Atrophin-1 family
  misc_feature (95)..(121): Homolog of NCBI NO: 38344435 NR Description: OSJNBa0038O10.7 [Oryza sativa (japonica
VLPQPRPIRLTLIPGIPLPSLPSQRPPPPATACLRSPAPPFRYSQRDAAASMTPSSALALALQAAASPLPASTPRSSPRSSSLSLGRGTAGNGPRRLAAAAPPRAFFSSSPYQPPQPEGFSPHPGVRPGPHGDRNHLPRGARLRHLLAPAEGAHRLHQRAHRRRHGLACRRTAALPRVREPTQARPPLYQLPRGCRHRGARHLRHHAVHPLPRHHALHRPGGLHGLAPPRGWGAG

SEQ ID NO: 4716 - protein, 225 aa, Zea mays subsp. mays
  peptide (1)..(225): Ceres Seq. ID no. 12373718
  misc_feature (7)..(188): Pfam Name: Clp protease Pfam Description: Clp protease
  misc_feature (1)..(223): Homolog of NCBI NO: 38344435 NR Description: OSJNBa0038O10.7 [Oryza sativa (japonica
  misc_feature (1)..(197): Homolog of NCBI NO: 18420643 NR Description: ATP-dependent Clp protease proteolytic subunit
  misc_feature (1)..(189): Homolog of NCBI NO: 8393156 NR Description: caseinolytic protease, ATP-dependent, proteolytic
  misc_feature (1)..(196): Homolog of NCBI NO: 6685315 NR Description: ATP-dependent Clp protease proteolytic subunit
  misc_feature (1)..(189): Homolog of NCBI NO: 34882298 NR Description: similar to ClpP protease [Rattus norvegicus]
  misc_feature (1)..(189): Homolog of NCBI NO: 5174419 NR Description: endopeptidase Clp precursor; ATP-dependent
  misc_feature (1)..(191): Homolog of NCBI NO: 23014984 NR Description: hypothetical protein [Magnetospirillum
  misc_feature (1)..(196): Homolog of NCBI NO: 20129427 NR Description: CG5045-PA [Drosophila melanogaster]
  misc_feature (1)..(196): Homolog of NCBI NO: 22967580 NR Description: hypothetical protein [Rhodospirillum rubrum]
  misc_feature (1)..(188): Homolog of NCBI NO: 23474550 NR Description: hypothetical protein [Desulfovibrio desulfuricans
MVIETTSRGERAYDIFSRLLKERIVCINGPIADDTASLVVAQLLFLESENPLKPVHLYINSPGGVVTAGLAIYDTMQYIRCPVTTLCIGQAASMGSLLLAAGAPGERRALPNARVMIHQPSGGAQGQATDIAIQAKEILKLRDRLNKIYQKHTRQPIDKIEQCMERDLFMDPDEARDWGLIDEVIENRPASLMPDGIVGGLDVPSLGGGGGGGGRGSDVEEPSAV

SEQ ID NO: 4717 - protein, 184 aa, Zea mays subsp. mays
  peptide (1)..(184): Ceres Seq. ID no. 12373719
  misc_feature (1)..(184): Pfam Name: Atrophin-1 family Pfam Description: Atrophin-1 family
  misc_feature (44)..(70): Homolog of NCBI NO: 38344435 NR Description: OSJNBa0038O10.7 [Oryza sativa (japonica
MTPSSALALALQAAASPLPASTPRSSPRSSSLSLGRGTAGNGPRRLAAAAPPRAFFSSSPYQPPQPEGFSPHPGVRPGPHGDRNHLPRGARLRHLLAPAEGAHRLHQRAHRRRHGLACRRTAALPRVREPTQARPPLYQLPRGCRHRGARHLRHHAVHPLPRHHALHRPGGLHGLAPPRGWGAG

SEQ ID NO: 4718 - DNA, 848 bp, Zea mays subsp. mays
  misc_feature (1)..(848): Ceres Seq. ID no. 12344457
  misc_feature: MA Experiment ID: 108528 Result: Up-regulated in Transcription
  misc_feature: MA Experiment 108528 PARAMETER Experiment Name: Zm_Imbibed_Seeds_P Parameter: Age (day) Value: 5 vs. 2
  misc_feature: MA Experiment 108528 PARAMETER Experiment Name: Zm_Imbibed_Seeds_P Parameter: Organism Value: Zea mays
  misc_feature: MA Experiment 108528 PARAMETER Experiment Name: Zm_Imbibed_Seeds_P Parameter: Plant Line Value: 35A19
  misc_feature: MA Experiment 108528 PARAMETER Experiment Name: Zm_Imbibed_Seeds_P Parameter: Tissue Value: Aerial vs. Embryo
  misc_feature: MA Experiment ID: 108529 Result: Down-regulated in Transcription
  misc_feature: MA Experiment 108529 PARAMETER Experiment Name: Zm_Imbibed_Seeds_P Parameter: Age (day) Value: 5 vs. 2
  misc_feature: MA Experiment 108529 PARAMETER Experiment Name: Zm_Imbibed_Seeds_P Parameter: Organism Value: Zea mays
  misc_feature: MA Experiment 108529 PARAMETER Experiment Name: Zm_Imbibed_Seeds_P Parameter: Plant Line Value: 35A19
  misc_feature: MA Experiment 108529 PARAMETER Experiment Name: Zm_Imbibed_Seeds_P Parameter: Tissue Value: Roots vs. Embryo
  misc_feature: MA Experiment ID: 108530 Result: Up-regulated in Transcription
  misc_feature: MA Experiment 108530 PARAMETER Experiment Name: Zm_Imbibed_Seeds_P Parameter: Age (day) Value: 6 vs. 2
  misc_feature: MA Experiment 108530 PARAMETER Experiment Name: Zm_Imbibed_Seeds_P Parameter: Organism Value: Zea mays
  misc_feature: MA Experiment 108530 PARAMETER Experiment Name: Zm_Imbibed_Seeds_P Parameter: Plant Line Value: 35A19
  misc_feature: MA Experiment 108530 PARAMETER Experiment Name: Zm_Imbibed_Seeds_P Parameter: Tissue Value: Aerial vs. Embryo
  misc_feature: MA Experiment ID: 108536 Result: Down-regulated in Transcription
  misc_feature: MA Experiment 108536 PARAMETER Experiment Name: Zm_Meristem_P Parameter: Age (day) Value: 8
  misc_feature: MA Experiment 108536 PARAMETER Experiment Name: Zm_Meristem_P Parameter: Organism Value: Zea mays
  misc_feature: MA Experiment 108536 PARAMETER Experiment Name: Zm_Meristem_P Parameter: Plant Line Value: 35A19
  misc_feature: MA Experiment 108536 PARAMETER Experiment Name: Zm_Meristem_P Parameter: Tissue Value: Shoot Meristem vs. Above Shoot Meristem
  misc_feature: MA Experiment ID: 108543 Result: Up-regulated in Transcription
  misc_feature: MA Experiment ID: 108544 Result: Up-regulated in Transcription
  misc_feature: MA Experiment ID: 108545 Result: Up-regulated in Transcription
  misc_feature: MA Experiment 108545 PARAMETER Experiment Name: Zm_Imbibed_Seeds_P Parameter: Age (day) Value: 3 vs. 2
  misc_feature: MA Experiment 108545 PARAMETER Experiment Name: Zm_Imbibed_Seeds_P Parameter: Organism Value: Zea mays
  misc_feature: MA Experiment 108545 PARAMETER Experiment Name: Zm_Imbibed_Seeds_P Parameter: Plant Line Value: 35A19
  misc_feature: MA Experiment 108545 PARAMETER Experiment Name: Zm_Imbibed_Seeds_P Parameter: Tissue Value: Aerial vs. Embryo
  misc_feature: MA Experiment ID: 108546 Result: Down-regulated in Transcription
  misc_feature: MA Experiment 108546 PARAMETER Experiment Name: Zm_Imbibed_Seeds_P Parameter: Age (day) Value: 3 vs. 2
  misc_feature: MA Experiment 108546 PARAMETER Experiment Name: Zm_Imbibed_Seeds_P Parameter: Organism Value: Zea mays
  misc_feature: MA Experiment 108546 PARAMETER Experiment Name: Zm_Imbibed_Seeds_P Parameter: Plant Line Value: 35A19
  misc_feature: MA Experiment 108546 PARAMETER Experiment Name: Zm_Imbibed_Seeds_P Parameter: Tissue Value: Roots vs. Embryo
  misc_feature: MA Experiment ID: 108547 Result: Up-regulated in Transcription
  misc_feature: MA Experiment 108547 PARAMETER Experiment Name: Zm_Imbibed_Seeds_P Parameter: Age (day) Value: 4 vs. 2
  misc_feature: MA Experiment 108547 PARAMETER Experiment Name: Zm_Imbibed_Seeds_P Parameter: Organism Value: Zea mays
  misc_feature: MA Experiment 108547 PARAMETER Experiment Name: Zm_Imbibed_Seeds_P Parameter: Plant Line Value: 35A19
  misc_feature: MA Experiment 108547 PARAMETER Experiment Name: Zm_Imbibed_Seeds_P Parameter: Tissue Value: Aerial vs. Embryo
  misc_feature: MA Experiment ID: 20000492 Result: Down-regulated in Transcription
  misc_feature: MA Experiment 20000492 PARAMETER Experiment Name: Zm_Hybrid_Seed_Dev_P Parameter: DAP Value: 12
  misc_feature: MA Experiment 20000492 PARAMETER Experiment Name: Zm_Hybrid_Seed_Dev_P Parameter: Organism Value: Zea mays
  misc_feature: MA Experiment 20000492 PARAMETER Experiment Name: Zm_Hybrid_Seed_Dev_P Parameter: Plant Line Value: 35A19
  misc_feature: MA Experiment 20000492 PARAMETER Experiment Name: Zm_Hybrid_Seed_Dev_P Parameter: Tissue Value: Fert Kernel vs. Unfert Floret
  misc_feature: MA Experiment ID: 20000535 Result: Down-regulated in Transcription
  misc_feature: MA Experiment 20000535 PARAMETER Experiment Name: Zm_Hybrid_Seed_Dev_P Parameter: DAP Value: 30 vs. 12
  misc_feature: MA Experiment 20000535 PARAMETER Experiment Name: Zm_Hybrid_Seed_Dev_P Parameter: Organism Value: Zea mays
  misc_feature: MA Experiment 20000535 PARAMETER Experiment Name: Zm_Hybrid_Seed_Dev_P Parameter: Plant Line Value: 35A19
  misc_feature: MA Experiment 20000535 PARAMETER Experiment Name: Zm_Hybrid_Seed_Dev_P Parameter: Tissue Value: Embryo vs. Unfert Floret
agactgctcgaccggaccgacgagcgacgaagcgcgcagaaagagaagaacctcggagctgagatggcacaagccatggcgtcgatgaccggcctctcgcagggcgtcctgcccagcaggcgcgccgacagcagaaccaggacggccgtcgtcatcgtcagggcgtccgcggagggcgacgccgttgcgcaggcgggccgccgcgccgtgatcgggctggtggccactggcatcgtcggcggcgccttgtcgcaggcggcgcgcgccgagaccgtcaagaccatcaagattggagccccgccgccgccctccggtggactccccgggactctcaactctgaccaggcgagggacttcgacctccccttgaaggagcggttctacctgcagccgctgccgccggcggaggcggcggcgagggtgaagacgtcggcgcaggacatcatcaacctcaagccgctcatcgacaagaaggcgtggccgtacgtccagaacgacctccgcctccgggcctcctacctgcgctacgacctcaagaccgtcatcgcttccaagcccaaggaggagaagaagagcctcaaggagctcaccggcaagctcttcagcaccatcgacgatcttgaccatgccgcgaagatcaagagcaccccagaggccgagaaatacttcgcagcaaccaaagatgctcttggcgatgttctcgccaagctaggctagacgcaagggctaataatggccatgtaatttcggacttgtgtttgttcatatggacccggcaaggcaatgtaccattttctgttgatattgtatcaggaagcacttaactacaatgctatcttgagtccttg

SEQ ID NO: 4719 - protein, 238 aa, Zea mays subsp. mays
  peptide (1)..(238): Ceres Seq. ID no. 12344458
  misc_feature (36)..(238): Pfam Name: Oxygen evolving enhancer protein 3 (PsbQ) Pfam Description: Oxygen evolving enhancer protein 3 (PsbQ)
  misc_feature (22)..(238): Homolog of NCBI NO: 11134057 NR Description: Oxygen-evolving enhancer protein 3-1, chloroplast (OEE3) (16 kDa subunit of oxygen evolving system of photosystem
  misc_feature (22)..(238): Homolog of NCBI NO: 11134066 NR Description: Oxygen-evolving enhancer protein 3-2, chloroplast (OEE3) (16 kDa subunit of oxygen evolving system of photosystem
  misc_feature (26)..(238): Homolog of NCBI NO: 34393258 NR Description: putative Oxygen-evolving enhancer protein 3-1,
  misc_feature (22)..(238): Homolog of NCBI NO: 15234637 NR Description: oxygen-evolving complex protein 16, chloroplast (OEC16); protein id: At4g05180.1, supported by cDNA: 40326.,
  misc_feature (26)..(238): Homolog of NCBI NO: 15233587 NR Description: oxygen-evolving complex protein 16, chloroplast (OEC16); protein id: At4g21280.1, supported by cDNA: 5691., by cDNA: gi_15215599, supported by cDNA: gi_20334895 [Arabidopsis
  misc_feature (22)..(238): Homolog of NCBI NO: 131397 NR Description: Oxygen-evolving enhancer protein 3, chloroplast (OEE3) (16 kDa subunit of oxygen evolving system of photosystem
  misc_feature (46)..(237): Homolog of NCBI NO: 31096349 NR Description: oxygen-evolving enhancer protein 3 precursor
  misc_feature (26)..(238): Homolog of NCBI NO: 4583542 NR Description: 16 kDa polypeptide of oxygen-evolving complex
  misc_feature (22)..(238): Homolog of NCBI NO: 11133850 NR Description: Oxygen-evolving enhancer protein 3, chloroplast (OEE3) (16 kDa subunit of oxygen evolving system of photosystem
  misc_feature (21)..(201): Homolog of NCBI NO: 32400800 NR Description: oxygen-evolving complex precursor [Triticum
RLLDRTDERRSAQKEKNLGAEMAQAMASMTGLSQGVLPSRRADSRTRTAVVIVRASAEGDAVAQAGRRAVIGLVATGIVGGALSQAARAETVKTIKIGAPPPPSGGLPGTLNSDQARDFDLPLKERFYLQPLPPAEAAARVKTSAQDIINLKPLIDKKAWPYVQNDLRLRASYLRYDLKTVIASKPKEEKKSLKELTGKLFSTIDDLDHAAKIKSTPEAEKYFAATKDALGDVLAKLG

SEQ ID NO: 4720 - protein, 217 aa, Zea mays subsp. mays
  peptide (1)..(217): Ceres Seq. ID no. 12344459
  misc_feature (15)..(217): Pfam Name: Oxygen evolving enhancer protein 3 (PsbQ) Pfam Description: Oxygen evolving enhancer protein 3 (PsbQ)
  misc_feature (1)..(217): Homolog of NCBI NO: 11134057 NR Description: Oxygen-evolving enhancer protein 3-1, chloroplast (OEE3) (16 kDa subunit of oxygen evolving system of photosystem
  misc_feature (1)..(217): Homolog of NCBI NO: 11134066 NR Description: Oxygen-evolving enhancer protein 3-2, chloroplast (OEE3) (16 kDa subunit of oxygen evolving system of photosystem
  misc_feature (5)..(217): Homolog of NCBI NO: 34393258 NR Description: putative Oxygen-evolving enhancer protein 3-1,
  misc_feature (1)..(217): Homolog of NCBI NO: 15234637 NR Description: oxygen-evolving complex protein 16, chloroplast (OEC16); protein id: At4g05180.1, supported by cDNA: 40326.,
  misc_feature (5)..(217): Homolog of NCBI NO: 15233587 NR Description: oxygen-evolving complex protein 16, chloroplast (OEC16); protein id: At4g21280.1, supported by cDNA: 5691., by cDNA: gi_15215599, supported by cDNA: gi_20334895 [Arabidopsis
  misc_feature (1)..(217): Homolog of NCBI NO: 131397 NR Description: Oxygen-evolving enhancer protein 3, chloroplast (OEE3) (16 kDa subunit of oxygen evolving system of photosystem
  misc_feature (25)..(216): Homolog of NCBI NO: 31096349 NR Description: oxygen-evolving enhancer protein 3 precursor
  misc_feature (5)..(217): Homolog of NCBI NO: 4583542 NR Description: 16 kDa polypeptide of oxygen-evolving complex
  misc_feature (1)..(217): Homolog of NCBI NO: 11133850 NR Description: Oxygen-evolving enhancer protein 3, chloroplast (OEE3) (16 kDa subunit of oxygen evolving system of photosystem
  misc_feature (1)..(180): Homolog of NCBI NO: 32400800 NR Description: oxygen-evolving complex precursor [Triticum
MAQAMASMTGLSQGVLPSRRADSRTRTAVVIVRASAEGDAVAQAGRRAVIGLVATGIVGGALSQAARAETVKTIKIGAPPPPSGGLPGTLNSDQARDFDLPLKERFYLQPLPPAEAAARVKTSAQDIINLKPLIDKKAWPYVQNDLRLRASYLRYDLKTVIASKPKEEKKSLKELTGKLFSTIDDLDHAAKIKSTPEAEKYFAATKDALGDVLAKLG

SEQ ID NO: 4721 - protein, 213 aa, Zea mays subsp. mays
  peptide (1)..(213): Ceres Seq. ID no. 12344460
  misc_feature (11)..(213): Pfam Name: Oxygen evolving enhancer protein 3 (PsbQ) Pfam Description: Oxygen evolving enhancer protein 3 (PsbQ)
  misc_feature (1)..(213): Homolog of NCBI NO: 11134057 NR Description: Oxygen-evolving enhancer protein 3-1, chloroplast (OEE3) (16 kDa subunit of oxygen evolving system of photosystem
  misc_feature (1)..(213): Homolog of NCBI NO: 11134066 NR Description: Oxygen-evolving enhancer protein 3-2, chloroplast (OEE3) (16 kDa subunit of oxygen evolving system of photosystem
  misc_feature (1)..(213): Homolog of NCBI NO: 34393258 NR Description: putative Oxygen-evolving enhancer protein 3-1,
  misc_feature (1)..(213): Homolog of NCBI NO: 15234637 NR Description: oxygen-evolving complex protein 16, chloroplast (OEC16); protein id: At4g05180.1, supported by cDNA: 40326.,
  misc_feature (1)..(213): Homolog of NCBI NO: 15233587 NR Description: oxygen-evolving complex protein 16, chloroplast (OEC16); protein id: At4g21280.1, supported by cDNA: 5691., by cDNA: gi_15215599, supported by cDNA: gi_20334895 [Arabidopsis
  misc_feature (1)..(213): Homolog of NCBI NO: 131397 NR Description: Oxygen-evolving enhancer protein 3, chloroplast (OEE3) (16 kDa subunit of oxygen evolving system of photosystem
  misc_feature (21)..(212): Homolog of NCBI NO: 31096349 NR Description: oxygen-evolving enhancer protein 3 precursor
  misc_feature (1)..(213): Homolog of NCBI NO: 4583542 NR Description: 16 kDa polypeptide of oxygen-evolving complex
  misc_feature (1)..(213): Homolog of NCBI NO: 11133850 NR Description: Oxygen-evolving enhancer protein 3, chloroplast (OEE3) (16 kDa subunit of oxygen evolving system of photosystem
  misc_feature (1)..(176): Homolog of NCBI NO: 32400800 NR Description: oxygen-evolving complex precursor [Triticum
MASMTGLSQGVLPSRRADSRTRTAVVIVRASAEGDAVAQAGRRAVIGLVATGIVGGALSQAARAETVKTIKIGAPPPPSGGLPGTLNSDQARDFDLPLKERFYLQPLPPAEAAARVKTSAQDIINLKPLIDKKAWPYVQNDLRLRASYLRYDLKTVIASKPKEEKKSLKELTGKLFSTIDDLDHAAKIKSTPEAEKYFAATKDALGDVLAKLG

SEQ ID NO: 4722 - DNA, 1767 bp, Zea mays subsp. mays
  misc_feature (1)..(1767): Ceres Seq. ID no. 13498593
  misc_feature: MA Experiment ID: 108544 Result: Up-regulated in Transcription
acaagcacagcagcagcagcagcagcagcaggcaagaagaatccaaagcggaagggtctctccccccatctctgttccaccaggtgcggcgggcggcgatgggggcgcggaggcggctgcaggcagacgcgccgccggggcatcgccacaggcagggcgcgccggcgccggactcggagcgccgggtacctcaacgggtggctgtcgcagccgacgcccgtcttcggcctccgcctctgggtgctcatcggcatcgccgtcggcgccgccatcgtgctcgtgctcctcctcatcttcgtctgcctctcccgccgccgccgccgccgccgcctcgccgccaacccctactaccccgccgacaccaagctgctcaagaagcacctgcagcagcaggccacgcccacgcccacgcccaccaaggacatccaggagatcgtccgccgccagcaggagcccgcggtgcagctcgccaaggccgtgccgcagccgcagccgcagccgcagactcctccgccgccgccgcctccgcagcacaggccaccggcgcggaagacgcccggcagcggcgtgtcggccacgactagcggcgggagcgagcgggacggcgccacgcctaggagcaccggcagcggcgcggggctgccggaggtctcgcacctcgggtggggccactggttcacgctccgcgagctggaggaggccaccggcgggctcgccgaggagaatgtgatcggcgagggcgggtacgggatcgtgtacaagggcaccttgcacgactccactttggtcgccgtcaagaacctgctcaataatagggggcaggccgagaaggagttcaaggtggaggtggaagcaatcggtcgtgttcggcacaaaaatctcgtcaggttgctcggctactgcgtagagggtgcttacaggatgctcgtgtatgagtatgtggacaatggtaatcttgaccagtggcttcatggtgatgttggcgaagtgagccccactgacatgggacatcaggatgaacattatgcttgccacagctaaagggctggcctacctccacgaggggctggaaccgaaggtggtccaccgcgacatcaaggctagcaacatccttcttgaccagcagtggaacgccaaagtatcggatttcgggctcgcaaagctgttgtgctcggagagaagctacgttacgacccgtgtcatgggaaccttcggttacgtggcgcctgagtacgccagcaccggcatgctgaacgagaggagcgatgtgtatagcttcggcgtgctgataatggagatcatcaccggcagatgtcctgtggattacacaagggcggctggagaggtgcagctggtggagtggctcaagaacatggtggccgagaggaaagcggaggaggtagtggacagtaagatggccgagaggcctcctcccaagacgctgaagcgggcgctcctggtggcgctccgctgcgtggaccctgacgcgaacaagcggcctaagatggggcatgtgatccacatgctcgaaatggacgatctccagttccgagacgataagaggcccggggccgggagagatggtcgtcgtccccagggtccggataggtacagctccaagctaggtggaggaagggagcctcagcaagcgcgagcaccagcgtcggtacagatgagatgattgtcattagagagtagcgatattaaccatgttatttttttcccgtcagtaaatacattctttcccaactcgttccatcgattctc

SEQ ID NO: 4723 - protein, 346 aa, Zea mays subsp. mays
  peptide (1)..(346): Ceres Seq. ID no. 13498594
  misc_feature (238)..(332): Pfam Name: Protein kinase domain Pfam Description: Protein kinase domain
  misc_feature (132)..(332): Homolog of NCBI NO: 14194119 NR Description: At1g01540/F22L4_6 [Arabidopsis thaliana]
  misc_feature (132)..(332): Homolog of NCBI NO: 15223428 NR Description: protein kinase family [Arabidopsis thaliana] putative kinase [Arabidopsis thaliana]
  misc_feature (61)..(151): Homolog of NCBI NO: 14194119 NR Description: At1g01540/F22L4_6 [Arabidopsis thaliana]
  misc_feature (61)..(151): Homolog of NCBI NO: 15223428 NR Description: protein kinase family [Arabidopsis thaliana] putative kinase [Arabidopsis thaliana]
  misc_feature (132)..(332): Homolog of NCBI NO: 15234142 NR Description: protein kinase family [Arabidopsis thaliana]
  misc_feature (64)..(147): Homolog of NCBI NO: 15234142 NR Description: protein kinase family [Arabidopsis thaliana]
  misc_feature (60)..(332): Homolog of NCBI NO: 37536398 NR Description: putative receptor-like protein kinase [Oryza
  misc_feature (83)..(332): Homolog of NCBI NO: 34897534 NR Description: OSJNBa0042L16.4 [Oryza sativa (japonica
  misc_feature (85)..(332): Homolog of NCBI NO: 15235432 NR Description: protein kinase family [Arabidopsis thaliana]
  misc_feature (132)..(332): Homolog of NCBI NO: 30678150 NR Description: protein kinase family [Arabidopsis thaliana]
TSTAAAAAAAGKKNPKRKGLSPHLCSTRCGGRRWGRGGGCRQTRRRGIATGRARRRRTRSAGYLNGWLSQPTPVFGLRLWVLIGIAVGAAIVLVLLLIFVCLSRRRRRRRLAANPYYPADTKLLKKHLQQQATPTPTPTKDIQEIVRRQQEPAVQLAKAVPQPQPQPQTPPPPPPPQHRPPARKTPGSGVSATTSGGSERDGATPRSTGSGAGLPEVSHLGWGHWFTLRELEEATGGLAEENVIGEGGYGIVYKGTLHDSTLVAVKNLLNNRGQAEKEFKVEVEAIGRVRHKNLVRLLGYCVEGAYRMLVYEYVDNGNLDQWLHGDVGEVSPTDMGHQDEHYACHS

SEQ ID NO: 4724 - protein, 242 aa, Zea mays subsp. mays
  peptide (1)..(242): Ceres Seq. ID no. 13498595
  misc_feature (75)..(159): Homolog of NCBI NO: 15223161 NR Description: protein kinase -related [Arabidopsis thaliana]
  misc_feature (74)..(159): Homolog of NCBI NO: 13447449 NR Description: receptor protein kinase PERK1 [Brassica napus]
  misc_feature (47)..(139): Homolog of NCBI NO: 15223161 NR Description: protein kinase -related [Arabidopsis thaliana]
  misc_feature (57)..(159): Homolog of NCBI NO: 13447449 NR Description: receptor protein kinase PERK1 [Brassica napus]
  misc_feature (44)..(152): Homolog of NCBI NO: 15223161 NR Description: protein kinase -related [Arabidopsis thaliana]
  misc_feature (85)..(159): Homolog of NCBI NO: 15230108 NR Description: protein kinase -related [Arabidopsis thaliana]
  misc_feature (63)..(152): Homolog of NCBI NO: 15218591 NR Description: protein kinase family [Arabidopsis thaliana]
  misc_feature (73)..(157): Homolog of NCBI NO: 15221470 NR Description: protein kinase family [Arabidopsis thaliana]
  misc_feature (88)..(159): Homolog of NCBI NO: 15221470 NR Description: protein kinase family [Arabidopsis thaliana]
  misc_feature (46)..(167): Homolog of NCBI NO: 30690042 NR Description: serine threonine protein kinase -related thaliana] >gi|26452004|dbj|BAC43092.1| putative serine/threonine kinase [Arabidopsis thaliana] >gi|29029022|gb|AAO64890.1|
QAQQQQQQQQARRIQSGRVSPPISVPPGAAGGDGGAEAAAGRRAAGASPQAGRAGAGLGAPGTSTGGCRSRRPSSASASGCSSASPSAPPSCSCSSSSSSASPAAAAAAASPPTPTTPPTPSCSRSTCSSRPRPRPRPPRTSRRSSAASRSPRCSSPRPCRSRSRSRRLLRRRRLRSTGHRRGRRPAAACRPRLAAGASGTAPRLGAPAAARGCRRSRTSGGATGSRSASWRRPPAGSPRRM

SEQ ID NO: 4725 - protein, 221 aa, Zea mays subsp. mays
  peptide (1)..(221): Ceres Seq. ID no. 13498596
  misc_feature (1)..(171): Pfam Name: Protein kinase domain Pfam Description: Protein kinase domain
  misc_feature (1)..(194): Homolog of NCBI NO: 15223428 NR Description: protein kinase family [Arabidopsis thaliana] putative kinase [Arabidopsis thaliana]
  misc_feature (1)..(180): Homolog of NCBI NO: 15234142 NR Description: protein kinase family [Arabidopsis thaliana]
  misc_feature (1)..(203): Homolog of NCBI NO: 37536398 NR Description: putative receptor-like protein kinase [Oryza
  misc_feature (1)..(193): Homolog of NCBI NO: 34897534 NR Description: OSJNBa0042L16.4 [Oryza sativa (japonica
  misc_feature (1)..(195): Homolog of NCBI NO: 15235432 NR Description: protein kinase family [Arabidopsis thaliana]
  misc_feature (1)..(194): Homolog of NCBI NO: 14194119 NR Description: At1g01540/F22L4_6 [Arabidopsis thaliana]
  misc_feature (1)..(111): Homolog of NCBI NO: 30678150 NR Description: protein kinase family [Arabidopsis thaliana]
  misc_feature (1)..(221): Homolog of NCBI NO: 37535714 NR Description: putative kinase [Oryza sativa (japonica
  misc_feature (1)..(183): Homolog of NCBI NO: 15231637 NR Description: protein kinase family [Arabidopsis thaliana]
  misc_feature (1)..(188): Homolog of NCBI NO: 30690058 NR Description: protein kinase family [Arabidopsis thaliana]
MNIMLATAKGLAYLHEGLEPKVVHRDIKASNILLDQQWNAKVSDFGLAKLLCSERSYVTTRVMGTFGYVAPEYASTGMLNERSDVYSFGVLIMEIITGRCPVDYTRAAGEVQLVEWLKNMVAERKAEEVVDSKMAERPPPKTLKRALLVALRCVDPDANKRPKMGHVIHMLEMDDLQFRDDKRPGAGRDGRRPQGPDRYSSKLGGGREPQQARAPASVQMR

SEQ ID NO: 4726 - DNA, 1493 bp, Zea mays subsp. mays
  misc_feature (1)..(1493): Ceres Seq. ID no. 12352289
  misc_feature: MA Experiment ID: 108522 Result: Up-regulated in Transcription
  misc_feature: MA Experiment 108522 PARAMETER Experiment Name: Zm_42deg_Heat_P Parameter: Age (day) Value: 8
  misc_feature: MA Experiment 108522 PARAMETER Experiment Name: Zm_42deg_Heat_P Parameter: Organism Value: Zea mays
  misc_feature: MA Experiment 108522 PARAMETER Experiment Name: Zm_42deg_Heat_P Parameter: Plant Line Value: 35A19
  misc_feature: MA Experiment 108522 PARAMETER Experiment Name: Zm_42deg_Heat_P Parameter: Temperature (deg C) Value: 42 vs. 22
  misc_feature: MA Experiment 108522 PARAMETER Experiment Name: Zm_42deg_Heat_P Parameter: Timepoint (hr) Value: 1
  misc_feature: MA Experiment 108522 PARAMETER Experiment Name: Zm_42deg_Heat_P Parameter: Tissue Value: Aerial
  misc_feature: MA Experiment ID: 108689 Result: Up-regulated in Transcription
  misc_feature: MA Experiment 108689 PARAMETER Experiment Name: Zm_Drought_Roots_P Parameter: Age (day) Value: 9
  misc_feature: MA Experiment 108689 PARAMETER Experiment Name: Zm_Drought_Roots_P Parameter: Organism Value: Zea mays
  misc_feature: MA Experiment 108689 PARAMETER Experiment Name: Zm_Drought_Roots_P Parameter: Plant Line Value: 35A19
  misc_feature: MA Experiment 108689 PARAMETER Experiment Name: Zm_Drought_Roots_P Parameter: Timepoint (hr) Value: 24
  misc_feature: MA Experiment 108689 PARAMETER Experiment Name: Zm_Drought_Roots_P Parameter: Tissue Value: Roots
  misc_feature: MA Experiment 108689 PARAMETER Experiment Name: Zm_Drought_Roots_P Parameter: Treatment Value: Drought vs. No Drought
  misc_feature: MA Experiment ID: 20000534 Result: Down-regulated in Transcription
  misc_feature: MA Experiment 20000534 PARAMETER Experiment Name: Zm_Hybrid_Pollen_P Parameter: Age (day) Value: 8
  misc_feature: MA Experiment 20000534 PARAMETER Experiment Name: Zm_Hybrid_Pollen_P Parameter: Organism Value: Zea mays
  misc_feature: MA Experiment 20000534 PARAMETER Experiment Name: Zm_Hybrid_Pollen_P Parameter: Plant Line Value: 35A19
  misc_feature: MA Experiment 20000534 PARAMETER Experiment Name: Zm_Hybrid_Pollen_P Parameter: Tissue Value: Pollen vs. Aerial
  misc_feature: MA Experiment ID: 20000535 Result: Up-regulated in Transcription
  misc_feature: MA Experiment 20000535 PARAMETER Experiment Name: Zm_Hybrid_Seed_Dev_P Parameter: DAP Value: 30 vs. 12
  misc_feature: MA Experiment 20000535 PARAMETER Experiment Name: Zm_Hybrid_Seed_Dev_P Parameter: Organism Value: Zea mays
  misc_feature: MA Experiment 20000535 PARAMETER Experiment Name: Zm_Hybrid_Seed_Dev_P Parameter: Plant Line Value: 35A19
  misc_feature: MA Experiment 20000535 PARAMETER Experiment Name: Zm_Hybrid_Seed_Dev_P Parameter: Tissue Value: Embryo vs. Unfert Floret
atagtcactcccccaactctgctgcttcccgtggccgtggttcaaaattcgaatccagaaagacttccccaagcattttccgtttctttaaaccgtcatcgtcctccctcgtgctagcctcgctcgttgcgcgttcaaatttcgaaccacctccgccttcgacgccccaaaccctagcccgacccctcctcctccacctgcgccaccgcccaccatgagctccgccgccgcgccagctgccgtcggcagcggcaaggagcttgccaacccgcccgccgacggaatcaccaacctccgcttctccaaccacagcaacaacctcctcgtctcctcatgggacaagacggtgcggctctacgacgccgacgccaacgtgctcaagggggagttcatgcaccccggggccgtcctcgactgctgcttccacgacgactcctcgggctttagcgccggtgccgaccacaccgtgcggaggttggtatttagctcgtccaaggaagatgttttggggcggcatgatggtccggttcgttgcgtggaatactcttatgctgcaggtcaagtcatcaccggcagctgggataaaactgtaaaatgctgggatccaagaggagttagtggaccagagcgcacccttgttgggacatatgctcaacctgaacgtgtatattctctttcgttagtaggaaataggttggttgttgcaacagctggaagacatgtaaatatttatgatctgcgcaatatgtctcaacctgagcaaaaaagagactcttctttgaaatatcaaacacgatgtgttcgatgttttcccaacggaacaggatatgctcttagttctgttgaagggcgagtttctatggaattctttgatctatctgagtctgctcaatctaaaaagtatgctttcaagtgtcatcggaagtctgaggccggcagggacaccgtttatcctgtcaatgcaattgctttccatcccatatatggaacatttgccaccggagggtgtgatggatttgtgaatgtgtgggatggcattaacaagaaaagactatatcagtactcgaagtacgcatcaagcatcgctgctctatcattcagtaaggatgggcatctgcttgctgtggcatccagctacacttatgaagagggagaaaaaacgcatgaacctgacgctatatttatccggacagtgaatgaagtcgaggtgaagccgaagcccaaggcattggcagccccccagtagtgctgtgacctgttctggaggctagatgacccgtacttctctgcgttgatgtcaattacattagttgacggagtgcttgtttgtgttgaaagagctgaaacgcctgtgtttcttaatctggaaccctcttctcccgttttacttgtccgtggaaacatttcatgttccagctggttgtatattccgaaacagaccatgttttagttcactcggttcttcgttgacttaagttatttatcaaatattt

SEQ ID NO: 4727 - protein, 343 aa, Zea mays subsp. mays
  peptide (1)..(343): Ceres Seq. ID no. 12352290
  misc_feature (12)..(342): Homolog of NCBI NO: 18402300 NR Description: mitotic checkpoint protein, putative; protein id:
  misc_feature (13)..(342): Homolog of NCBI NO: 15222841 NR Description: mitotic checkpoint protein, putative; protein id: [Arabidopsis thaliana] >gi|12597855|gb|AAG60165.1|AC074110_3
  misc_feature (1)..(337): Homolog of NCBI NO: 28564814 NR Description: putative mitotic checkpoint protein [Oryza sativa
  misc_feature (13)..(255): Homolog of NCBI NO: 12323596 NR Description: mitotic checkpoint protein, 3' partial;
  misc_feature (11)..(335): Homolog of NCBI NO: 4757880 NR Description: BUB3 budding uninhibited by benzimidazoles 3 mitotic checkpoint component; BUB3 (budding uninhibited by
  misc_feature (11)..(335): Homolog of NCBI NO: 3986296 NR Description: mitotic checkpoint [Xenopus laevis]
  misc_feature (11)..(335): Homolog of NCBI NO: 13122448 NR Description: WD repeat protein Bub3 [Xenopus laevis]
  misc_feature (15)..(335): Homolog of NCBI NO: 37362190 NR Description: BUB3 budding uninhibited by benzimidazoles 3-like
  misc_feature (19)..(335): Homolog of NCBI NO: 39591225 NR Description: Hypothetical protein CBG20696 [Caenorhabditis
  misc_feature (15)..(262): Homolog of NCBI NO: 21428470 NR Description: LD23540p [Drosophila melanogaster]
MSSAAAPAAVGSGKELANPPADGITNLRFSNHSNNLLVSSWDKTVRLYDADANVLKGEFMHPGAVLDCCFHDDSSGFSAGADHTVRRLVFSSSKEDVLGRHDGPVRCVEYSYAAGQVITGSWDKTVKCWDPRGVSGPERTLVGTYAQPERVYSLSLVGNRLVVATAGRHVNIYDLRNMSQPEQKRDSSLKYQTRCVRCFPNGTGYALSSVEGRVSMEFFDLSESAQSKKYAFKCHRKSEAGRDTVYPVNAIAFHPIYGTFATGGCDGFVNVWDGINKKRLYQYSKYASSIAALSFSKDGHLLAVASSYTYEEGEKTHEPDAIFIRTVNEVEVKPKPKALAAPQ

SEQ ID NO: 4728 - protein, 284 aa, Zea mays subsp. mays
  peptide (1)..(284): Ceres Seq. ID no. 12352291
  misc_feature (1)..(283): Homolog of NCBI NO: 18402300 NR Description: mitotic checkpoint protein, putative; protein id:
  misc_feature (1)..(283): Homolog of NCBI NO: 15222841 NR Description: mitotic checkpoint protein, putative; protein id: [Arabidopsis thaliana] >gi|12597855|gb|AAG60165.1|AC074110_3
  misc_feature (1)..(278): Homolog of NCBI NO: 28564814 NR Description: putative mitotic checkpoint protein [Oryza sativa
  misc_feature (1)..(196): Homolog of NCBI NO: 12323596 NR Description: mitotic checkpoint protein, 3' partial;
  misc_feature (1)..(276): Homolog of NCBI NO: 4757880 NR Description: BUB3 budding uninhibited by benzimidazoles 3 mitotic checkpoint component; BUB3 (budding uninhibited by
  misc_feature (1)..(276): Homolog of NCBI NO: 3986296 NR Description: mitotic checkpoint [Xenopus laevis]
  misc_feature (1)..(276): Homolog of NCBI NO: 13122448 NR Description: WD repeat protein Bub3 [Xenopus laevis]
  misc_feature (1)..(276): Homolog of NCBI NO: 37362190 NR Description: BUB3 budding uninhibited by benzimidazoles 3-like
  misc_feature (1)..(276): Homolog of NCBI NO: 39591225 NR Description: Hypothetical protein CBG20696 [Caenorhabditis
  misc_feature (1)..(203): Homolog of NCBI NO: 21428470 NR Description: LD23540p [Drosophila melanogaster]
MHPGAVLDCCFHDDSSGFSAGADHTVRRLVFSSSKEDVLGRHDGPVRCVEYSYAAGQVITGSWDKTVKCWDPRGVSGPERTLVGTYAQPERVYSLSLVGNRLVVATAGRHVNIYDLRNMSQPEQKRDSSLKYQTRCVRCFPNGTGYALSSVEGRVSMEFFDLSESAQSKKYAFKCHRKSEAGRDTVYPVNAIAFHPIYGTFATGGCDGFVNVWDGINKKRLYQYSKYASSIAALSFSKDGHLLAVASSYTYEEGEKTHEPDAIFIRTVNEVEVKPKPKALAAPQ

SEQ ID NO: 4729 - DNA, 1522 bp, Zea mays subsp. mays
  misc_feature (1)..(1522): Ceres Seq. ID no. 12409851
  misc_feature: MA Experiment ID: 108535 Result: Down-regulated in Transcription
  misc_feature: MA Experiment 108535 PARAMETER Experiment Name: Zm_Meristem_P Parameter: Age (day) Value: 8
  misc_feature: MA Experiment 108535 PARAMETER Experiment Name: Zm_Meristem_P Parameter: Organism Value: Zea mays
  misc_feature: MA Experiment 108535 PARAMETER Experiment Name: Zm_Meristem_P Parameter: Plant Line Value: 35A19
  misc_feature: MA Experiment 108535 PARAMETER Experiment Name: Zm_Meristem_P Parameter: Tissue Value: Root Meristem vs. Above Root Meristem
  misc_feature: MA Experiment ID: 20000478 Result: Down-regulated in Transcription
  misc_feature: MA Experiment 20000478 PARAMETER Experiment Name: Zm_5mM_SA_P Parameter: Age (day) Value: 11
  misc_feature: MA Experiment 20000478 PARAMETER Experiment Name: Zm_5mM_SA_P Parameter: Organism Value: Zea mays
  misc_feature: MA Experiment 20000478 PARAMETER Experiment Name: Zm_5mM_SA_P Parameter: Plant Line Value: 35A19
  misc_feature: MA Experiment 20000478 PARAMETER Experiment Name: Zm_5mM_SA_P Parameter: Timepoint (hr) Value: 72
  misc_feature: MA Experiment 20000478 PARAMETER Experiment Name: Zm_5mM_SA_P Parameter: Tissue Value: Aerial
  misc_feature: MA Experiment 20000478 PARAMETER Experiment Name: Zm_5mM_SA_P Parameter: Treatment Value: 5mM SA vs. No Treatment
  misc_feature: MA Experiment ID: 20000480 Result: Down-regulated in Transcription
  misc_feature: MA Experiment 20000480 PARAMETER Experiment Name: Zm_Drought_P Parameter: Age (day) Value: 11
  misc_feature: MA Experiment 20000480 PARAMETER Experiment Name: Zm_Drought_P Parameter: Organism Value: Zea mays
  misc_feature: MA Experiment 20000480 PARAMETER Experiment Name: Zm_Drought_P Parameter: Plant Line Value: 35A19
  misc_feature: MA Experiment 20000480 PARAMETER Experiment Name: Zm_Drought_P Parameter: Timepoint (hr) Value: 72
  misc_feature: MA Experiment 20000480 PARAMETER Experiment Name: Zm_Drought_P Parameter: Tissue Value: Aerial
  misc_feature: MA Experiment 20000480 PARAMETER Experiment Name: Zm_Drought_P Parameter: Treatment Value: Drought vs. No Drought
attattagagagagctacaacaagcatgaagctaagactggtagcgctagtgctggcggtagcgtccggtgtacgcttgctcgtcggcggcatcagcgttcgcgggggacgacgtcgtccgtgtcgcgctaaagcatgtcgacgctgggaagcagctgtccaggcccgagctgatccggcgcgccatgcggaggagcaaggcgagggcggccgcgctctccgcggtgaggaaccgcgcccgcttctctggcaagaacgagcagcaaacgcccgccggcgtgctgccggtgcgcccgtcgggggacctcgagtacgtcatcgacctcgccatcggcacgccgccgcagcccgtctcggcgctgctcgacaccggcagcgacctcatctggacgcagtgcgcgccgtgcgccagctgcctctcgcagccggacccgctgttcgcgccggggcagtcggcgtcgtacgagcccatgcggtgcgccgggacgctctgctctgacatcctgcaccacagctgcgagaggcccgacacgtgcacctaccgctacaactacggcgacggcacgatgaccgtgggcgtgtacgccacggagcgcttcaccttcgcgtcgtcgggcggcggcgggctcacgactaccgtcccgctcggcttcgggtgcggctccgtgaacgtcggcagcctcaacaacggctccggcatcgtgggcttcggccggaacccgctctcgctcgtgtcccagctctccatccgccgcttctcctactgcctcacgtcctacgccagccgcaggcagagcaccctcctgtttggctccctgtccgacggagtctacggtgacgccacgggccgcgtgcagaccacaccgctcctccagagcccccagaacccgaccttctactacgtacacttcacgggcctgaccgtcggcgccaggcggctgcggataccggagtcagcgttcgcgctccggcccgacggctcgggcggcgtgatcgtcgactccggcacggcgctcacgctcctcccagccgcggtgctcgcgggaggtggtgcgggcgttccgccagcagctgaggctgccgttcgcaaacggcggcaaccccgaggacggcgtgtgcttcctggtgcccgcggcctggcggcgctcgtcgtcgacgtcacagatgccggtcccgaggatggtgctccacttccagggcgcggacctcgacctgccgcgccgaaactacgtcctggacgaccacaggaggggccgcctgtgcctcctcctggcagactccggcgacgatggctccacgattggcaacctggtgcagcaggacatgcgcgtgctctacgatttggaggcagagaccttgtcgatcgctccggcacgatgctgacacgcgcgcaactagtagaaaggccgccgactactcgactactctcactgtatgcaagttagtgttaaccatgcaaatgcatgccaaccataccgggtcgcactttgcacgcaggcaaacaaattttttttgtcggtcg

SEQ ID NO: 4730 - protein, 419 aa, Zea mays subsp. mays
  peptide (1)..(419): Ceres Seq. ID no. 12409852
  misc_feature (45)..(280): Pfam Name: Eukaryotic aspartyl protease Pfam Description: Eukaryotic aspartyl protease
  misc_feature (1)..(280): Homolog of NCBI NO: 38344829 NR Description: OSJNBa0064H22.10 [Oryza sativa (japonica
  misc_feature (1)..(280): Homolog of NCBI NO: 30678047 NR Description: chloroplast nucleoid DNA binding protein -related
  misc_feature (1)..(280): Homolog of NCBI NO: 34898756 NR Description: OJ1131_E05.2 [Oryza sativa (japonica
  misc_feature (45)..(280): Homolog of NCBI NO: 20197342 NR Description: putative chloroplast nucleoid DNA binding protein
  misc_feature (1)..(283): Homolog of NCBI NO: 34898762 NR Description: OJ1131_E05.5 [Oryza sativa (japonica
  misc_feature (1)..(284): Homolog of NCBI NO: 15223368 NR Description: chloroplast nucleoid DNA binding protein, protein id: At1g01300.1, supported by cDNA: 7567. [Arabidopsis
  misc_feature (1)..(284): Homolog of NCBI NO: 21594980 NR Description: chloroplast nucleoid DNA binding protein,
  misc_feature (1)..(280): Homolog of NCBI NO: 15229656 NR Description: putative chloroplast nucleoid DNA-binding protein id: At3g18490.1 [Arabidopsis thaliana]
  misc_feature (1)..(280): Homolog of NCBI NO: 19424106 NR Description: putative chloroplast nucleoid DNA-binding protein
  misc_feature (1)..(286): Homolog of NCBI NO: 34895664 NR Description: nucleoid DNA-binding protein cnd41-like protein
MRRSKARAAALSAVRNRARFSGKNEQQTPAGVLPVRPSGDLEYVIDLAIGTPPQPVSALLDTGSDLIWTQCAPCASCLSQPDPLFAPGQSASYEPMRCAGTLCSDILHHSCERPDTCTYRYNYGDGTMTVGVYATERFTFASSGGGGLTTTVPLGFGCGSVNVGSLNNGSGIVGFGRNPLSLVSQLSIRRFSYCLTSYASRRQSTLLFGSLSDGVYGDATGRVQTTPLLQSPQNPTFYYVHFTGLTVGARRLRIPESAFALRPDGSGGVIVDSGTALTLLPAAVLAGGGAGVPPAAEAAVRKRRQPRGRRVLPGARGLAALVVDVTDAGPEDGAPLPGRGPRPAAPKLRPGRPQEGPPVPPPGRLRRRWLHDWQPGAAGHARALRFGGRDLVDRSGTMLTRAQLVERPPTTRLLSLYAS

SEQ ID NO: 4731 - protein, 324 aa, Zea mays subsp. mays
  peptide (1)..(324): Ceres Seq. ID no. 12409853
  misc_feature (1)..(185): Pfam Name: Eukaryotic aspartyl protease Pfam Description: Eukaryotic aspartyl protease
  misc_feature (1)..(185): Homolog of NCBI NO: 38344829 NR Description: OSJNBa0064H22.10 [Oryza sativa (japonica
  misc_feature (1)..(185): Homolog of NCBI NO: 30678047 NR Description: chloroplast nucleoid DNA binding protein -related
  misc_feature (1)..(185): Homolog of NCBI NO: 34898756 NR Description: OJ1131_E05.2 [Oryza sativa (japonica
  misc_feature (1)..(185): Homolog of NCBI NO: 20197342 NR Description: putative chloroplast nucleoid DNA binding protein
  misc_feature (1)..(188): Homolog of NCBI NO: 34898762 NR Description: OJ1131_E05.5 [Oryza sativa (japonica
  misc_feature (1)..(189): Homolog of NCBI NO: 15223368 NR Description: chloroplast nucleoid DNA binding protein, protein id: At1g01300.1, supported by cDNA: 7567. [Arabidopsis
  misc_feature (1)..(189): Homolog of NCBI NO: 21594980 NR Description: chloroplast nucleoid DNA binding protein,
  misc_feature (1)..(185): Homolog of NCBI NO: 15229656 NR Description: putative chloroplast nucleoid DNA-binding protein id: At3g18490.1 [Arabidopsis thaliana]
  misc_feature (1)..(185): Homolog of NCBI NO: 19424106 NR Description: putative chloroplast nucleoid DNA-binding protein
  misc_feature (1)..(191): Homolog of NCBI NO: 34895664 NR Description: nucleoid DNA-binding protein cnd41-like protein
MRCAGTLCSDILHHSCERPDTCTYRYNYGDGTMTVGVYATERFTFASSGGGGLTTTVPLGFGCGSVNVGSLNNGSGIVGFGRNPLSLVSQLSIRRFSYCLTSYASRRQSTLLFGSLSDGVYGDATGRVQTTPLLQSPQNPTFYYVHFTGLTVGARRLRIPESAFALRPDGSGGVIVDSGTALTLLPAAVLAGGGAGVPPAAEAAVRKRRQPRGRRVLPGARGLAALVVDVTDAGPEDGAPLPGRGPRPAAPKLRPGRPQEGPPVPPPGRLRRRWLHDWQPGAAGHARALRFGGRDLVDRSGTMLTRAQLVERPPTTRLLSLYAS

SEQ ID NO: 4732 - protein, 292 aa, Zea mays subsp. mays
  peptide (1)..(292): Ceres Seq. ID no. 12409854
  misc_feature (1)..(153): Pfam Name: Eukaryotic aspartyl protease Pfam Description: Eukaryotic aspartyl protease
  misc_feature (1)..(153): Homolog of NCBI NO: 38344829 NR Description: OSJNBa0064H22.10 [Oryza sativa (japonica
  misc_feature (1)..(153): Homolog of NCBI NO: 30678047 NR Description: chloroplast nucleoid DNA binding protein -related
  misc_feature (1)..(153): Homolog of NCBI NO: 34898756 NR Description: OJ1131_E05.2 [Oryza sativa (japonica
  misc_feature (1)..(153): Homolog of NCBI NO: 20197342 NR Description: putative chloroplast nucleoid DNA binding protein
  misc_feature (1)..(156): Homolog of NCBI NO: 34898762 NR Description: OJ1131_E05.5 [Oryza sativa (japonica
  misc_feature (1)..(157): Homolog of NCBI NO: 15223368 NR Description: chloroplast nucleoid DNA binding protein, protein id: At1g01300.1, supported by cDNA: 7567. [Arabidopsis
  misc_feature (1)..(157): Homolog of NCBI NO: 21594980 NR Description: chloroplast nucleoid DNA binding protein,
  misc_feature (1)..(153): Homolog of NCBI NO: 15229656 NR Description: putative chloroplast nucleoid DNA-binding protein id: At3g18490.1 [Arabidopsis thaliana]
  misc_feature (1)..(153): Homolog of NCBI NO: 19424106 NR Description: putative chloroplast nucleoid DNA-binding protein
  misc_feature (1)..(159): Homolog of NCBI NO: 34895664 NR Description: nucleoid DNA-binding protein cnd41-like protein
MTVGVYATERFTFASSGGGGLTTTVPLGFGCGSVNVGSLNNGSGIVGFGRNPLSLVSQLSIRRFSYCLTSYASRRQSTLLFGSLSDGVYGDATGRVQTTPLLQSPQNPTFYYVHFTGLTVGARRLRIPESAFALRPDGSGGVIVDSGTALTLLPAAVLAGGGAGVPPAAEAAVRKRRQPRGRRVLPGARGLAALVVDVTDAGPEDGAPLPGRGPRPAAPKLRPGRPQEGPPVPPPGRLRRRWLHDWQPGAAGHARALRFGGRDLVDRSGTMLTRAQLVERPPTTRLLSLYAS

SEQ ID NO: 4733 - DNA, 1536 bp, Zea mays subsp. mays
  misc_feature (1)..(1536): Ceres Seq. ID no. 12387081
  misc_feature: MA Experiment ID: 108527 Result: Up-regulated in Transcription
  misc_feature: MA Experiment 108527 PARAMETER Experiment Name: Zm_5mM_NO_P Parameter: Age (day) Value: 8
  misc_feature: MA Experiment 108527 PARAMETER Experiment Name: Zm_5mM_NO_P Parameter: Organism Value: Zea mays
  misc_feature: MA Experiment 108527 PARAMETER Experiment Name: Zm_5mM_NO_P Parameter: Plant Line Value: 35A19
  misc_feature: MA Experiment 108527 PARAMETER Experiment Name: Zm_5mM_NO_P Parameter: Timepoint (hr) Value: 6
  misc_feature: MA Experiment 108527 PARAMETER Experiment Name: Zm_5mM_NO_P Parameter: Tissue Value: Aerial
  misc_feature: MA Experiment 108527 PARAMETER Experiment Name: Zm_5mM_NO_P Parameter: Treatment Value: 5mM NO vs. No Treatment
  misc_feature: MA Experiment ID: 108529 Result: Up-regulated in Transcription
  misc_feature: MA Experiment 108529 PARAMETER Experiment Name: Zm_Imbibed_Seeds_P Parameter: Age (day) Value: 5 vs. 2
  misc_feature: MA Experiment 108529 PARAMETER Experiment Name: Zm_Imbibed_Seeds_P Parameter: Organism Value: Zea mays
  misc_feature: MA Experiment 108529 PARAMETER Experiment Name: Zm_Imbibed_Seeds_P Parameter: Plant Line Value: 35A19
  misc_feature: MA Experiment 108529 PARAMETER Experiment Name: Zm_Imbibed_Seeds_P Parameter: Tissue Value: Roots vs. Embryo
  misc_feature: MA Experiment ID: 108535 Result: Down-regulated in Transcription
  misc_feature: MA Experiment 108535 PARAMETER Experiment Name: Zm_Meristem_P Parameter: Age (day) Value: 8
  misc_feature: MA Experiment 108535 PARAMETER Experiment Name: Zm_Meristem_P Parameter: Organism Value: Zea mays
  misc_feature: MA Experiment 108535 PARAMETER Experiment Name: Zm_Meristem_P Parameter: Plant Line Value: 35A19
  misc_feature: MA Experiment 108535 PARAMETER Experiment Name: Zm_Meristem_P Parameter: Tissue Value: Root Meristem vs. Above Root Meristem
  misc_feature: MA Experiment ID: 20000492 Result: Down-regulated in Transcription
  misc_feature: MA Experiment 20000492 PARAMETER Experiment Name: Zm_Hybrid_Seed_Dev_P Parameter: DAP Value: 12
  misc_feature: MA Experiment 20000492 PARAMETER Experiment Name: Zm_Hybrid_Seed_Dev_P Parameter: Organism Value: Zea mays
  misc_feature: MA Experiment 20000492 PARAMETER Experiment Name: Zm_Hybrid_Seed_Dev_P Parameter: Plant Line Value: 35A19
  misc_feature: MA Experiment 20000492 PARAMETER Experiment Name: Zm_Hybrid_Seed_Dev_P Parameter: Tissue Value: Fert Kernel vs. Unfert Floret
  misc_feature: MA Experiment ID: 20000535 Result: Down-regulated in Transcription
  misc_feature: MA Experiment 20000535 PARAMETER Experiment Name: Zm_Hybrid_Seed_Dev_P Parameter: DAP Value: 30 vs. 12
  misc_feature: MA Experiment 20000535 PARAMETER Experiment Name: Zm_Hybrid_Seed_Dev_P Parameter: Organism Value: Zea mays
  misc_feature: MA Experiment 20000535 PARAMETER Experiment Name: Zm_Hybrid_Seed_Dev_P Parameter: Plant Line Value: 35A19
  misc_feature: MA Experiment 20000535 PARAMETER Experiment Name: Zm_Hybrid_Seed_Dev_P Parameter: Tissue Value: Embryo vs. Unfert Floret
aaagcaaagtctcctgcttccttccgtcttgctcctcgacccttcttccttccccaccaccgcgttccaatcaatcccaatcgcgacccagccagaggcgagcgcgagaaaatccccattccccaatccccacgccacagcctcccttccctccccgtctcctccaaattcaatcgtctccaagcgccaatccgccccgtctccaaatcccaggcaggcaggcagccaaccagccatggagtgcgagccggaggagctgcagttcctgggcgtcgtcggcatctaccgcttctccgcggagatcctccgaggcccgcaccgcccgctcttcgcgcgcatcgcggccgccttcgcgctgcccctctccgcgcttttcctcctgcacgtcgccatctcgcacgcgctcttcacccacatcgactccgacgacacggccctggacgcatcctccccgggcaccgacacgcagcgccgcctgctgtcccgcctcgcctccgactggctcgccctgctcctcttcaagtccgcctacctcctcgcgctcctcctgctctcgctcctctccgtcgccgcctccgtgttctccgtcgcctccgtctactccgccaagcgcgacgcgctcaccttcccgcgcgtgctctccgtcgtgccccgcgtctggcggaggctcgccgccacgttcctcgccgccttcgcgctcctcttcgcctaccacgccgtcgccgtgctcgtcttcgtcggcctcctcgtcgccgcggacaacggctccggcctcgcgggcctgctcgccttcctcgtcgccgtcgcctacctgctcggcctcgtctacctcggcgtcgtctggcacctcgccagcgtcgtctccgtgctcgaggaccacaagggcttcgccgccatgcgcaagagcaaggacctcatcagggggaagctcgtcaccgcgggtgctatcttcttcacgctcaacgtcgtcttcgccgccgtcgagctcggcttccgcgcctgggtcgtcaggggatccggcgccgcgtcgtcaaggctcttgctcggcctcatcatgctcgccgcgctctgctgcgtcgtcatgctcgcgctcgtcacgcagaccgtcgtctacctcgtgtgcaagagctaccaccacgagagcctcgacaaggccaacatctccgaccacctcgaggtctacctcggcgactacgtccccgctaaaggcgtccgacgtgcagatggagcagttccaggtctgactgtgaatcccatagcttctctgtctttatcactgctcgccaatccatcctctgatgccggaattctcctgttaccaccggcagccaggtaatctgtaattgtgtacgtacagcaggcagcaggtgatgaacatacttgcgttaagtaggaagaattgggaatttttgtcttgggggtacaagaataatggggatctgtacttcccttagtctcttcctcaaggacatggttccttcccttgtttacatgatttataaacaggagatgaatggaattgggcatgccgaattt

SEQ ID NO: 4734 - protein, 444 aa, Zea mays subsp. mays
  peptide (1)..(444): Ceres Seq. ID no. 12387082
  misc_feature (79)..(402): Homolog of NCBI NO: 18397813 NR Description: expressed protein; protein id: At1g31130.1, by cDNA: 151489., supported by cDNA: gi_13272450, supported by gi_19698822 [Arabidopsis thaliana] >gi|25513746|pir||H86436
  misc_feature (79)..(402): Homolog of NCBI NO: 30684945 NR Description: expressed protein [Arabidopsis thaliana]
  misc_feature (79)..(402): Homolog of NCBI NO: 34908936 NR Description: P0691E06.20 [Oryza sativa (japonica
  misc_feature (79)..(402): Homolog of NCBI NO: 15241607 NR Description: putative protein; protein id: At5g44860.1, by cDNA: 31042. [Arabidopsis thaliana] >gi|2660664|gb|AAC79135.1| protein [Arabidopsis thaliana] >gi|10177476|dbj|BAB10867.1|
  misc_feature (79)..(402): Homolog of NCBI NO: 7485737 NR Description: hypothetical protein F18F4.50 - Arabidopsis >gi|2827649|emb|CAA16603.1| putative protein [Arabidopsis >gi|7268790|emb|CAB78995.1| putative protein [Arabidopsis
KQSLLLPSVLLLDPSSFPTTAFQSIPIATQPEASARKSPFPNPHATASLPSPSPPNSIVSKRQSAPSPNPRQAGSQPAMECEPEELQFLGVVGIYRFSAEILRGPHRPLFARIAAAFALPLSALFLLHVAISHALFTHIDSDDTALDASSPGTDTQRRLLSRLASDWLALLLFKSAYLLALLLLSLLSVAASVFSVASVYSAKRDALTFPRVLSVVPRVWRRLAATFLAAFALLFAYHAVAVLVFVGLLVAADNGSGLAGLLAFLVAVAYLLGLVYLGVVWHLASVVSVLEDHKGFAAMRKSKDLIRGKLVTAGAIFFTLNVVFAAVELGFRAWVVRGSGAASSRLLLGLIMLAALCCVVMLALVTQTVVYLVCKSYHHESLDKANISDHLEVYLGDYVPAKGVRRADGAVPGLTVNPIASLSLSLLANPSSDAGILLLPPAAR

SEQ ID NO: 4735 - protein, 413 aa, Zea mays subsp. mays
  peptide (1)..(413): Ceres Seq. ID no. 12387083
  misc_feature (82)..(400): Pfam Name: Equine herpesvirus glycoprotein gp2 Pfam Description: Equine herpesvirus glycoprotein gp2
  misc_feature (1)..(404): Homolog of NCBI NO: 13592175 NR Description: ppg3 [Leishmania major]
  misc_feature (20)..(404): Homolog of NCBI NO: 13592175 NR Description: ppg3 [Leishmania major]
  misc_feature (8)..(360): Homolog of NCBI NO: 13592175 NR Description: ppg3 [Leishmania major]
  misc_feature (1)..(377): Homolog of NCBI NO: 13592175 NR Description: ppg3 [Leishmania major]
  misc_feature (87)..(404): Homolog of NCBI NO: 13592175 NR Description: ppg3 [Leishmania major]
  misc_feature (65)..(399): Homolog of NCBI NO: 28828184 NR Description: similar to Leishmania major. Ppg3 [Dictyostelium
  misc_feature (90)..(395): Homolog of NCBI NO: 28828184 NR Description: similar to Leishmania major. Ppg3 [Dictyostelium
  misc_feature (91)..(396): Homolog of NCBI NO: 28828184 NR Description: similar to Leishmania major. Ppg3 [Dictyostelium
  misc_feature (80)..(383): Homolog of NCBI NO: 28828184 NR Description: similar to Leishmania major. Ppg3 [Dictyostelium
  misc_feature (80)..(383): Homolog of NCBI NO: 28828184 NR Description: similar to Leishmania major. Ppg3 [Dictyostelium
SKVSCFLPSCSSTLLPSPPPRSNQSQSRPSQRRARENPHSPIPTPQPPFPPRLLQIQSSPSANPPRLQIPGRQAANQPWSASRRSCSSWASSASTASPRRSSEARTARSSRASRPPSRCPSPRFSSCTSPSRTRSSPTSTPTTRPWTHPPRAPTRSAACCPASPPTGSPCSSSSPPTSSRSSCSRSSPSPPPCSPSPPSTPPSATRSPSRACSPSCPASGGGSPPRSSPPSRSSSPTTPSPCSSSSASSSPRTTAPASRACSPSSSPSPTCSASSTSASSGTSPASSPCSRTTRASPPCARARTSSGGSSSPRVLSSSRSTSSSPPSSSASAPGSSGDPAPRRQGSCSASSCSPRSAASSCSRSSRRPSSTSCARATTTRASTRPTSPTTSRSTSATTSPLKASDVQMEQFQV

SEQ ID NO: 4736 - protein, 401 aa, Zea mays subsp. mays
  peptide (1)..(401): Ceres Seq. ID no. 12387084
  misc_feature (183)..(285): Pfam Name: Cupin Pfam Description: Cupin
KAKSPASFRLAPRPFFLPHHRVPINPNRDPARGEREKIPIPQSPRHSLPSLPVSSKFNRLQAPIRPVSKSQAGRQPTSHGVRAGGAAVPGRRRHLPLLRGDPPRPAPPALRAHRGRLRAAPLRAFPPARRHLARALHPHRLRRHGPGRILPGHRHAAPPAVPPRLRLARPAPLQVRLPPRAPPALAPLRRRLRVLRRLRLLRQARRAHLPARALRRAPRLAEARRHVPRRLRAPLRLPRRRRARLRRPPRRRGQRLRPRGPARLPRRRRLPARPRLPRRRLAPRQRRLRARGPQGLRRHAQEQGPHQGEARHRGCYLLHAQRRLRRRRARLPRLGRQGIRRRVVKALARPHHARRALLRRHARARHADRRLPRVQELPPREPRQGQHLRPPRGLPRRLRPR

SEQ ID NO: 4737 - protein, 366 aa, Zea mays subsp. mays
  peptide (1)..(366): Ceres Seq. ID no. 12387085
  misc_feature (1)..(324): Homolog of NCBI NO: 18397813 NR Description: expressed protein; protein id: At1g31130.1, by cDNA: 151489., supported by cDNA: gi_13272450, supported by gi_19698822 [Arabidopsis thaliana] >gi|25513746|pir||H86436
  misc_feature (1)..(324): Homolog of NCBI NO: 30684945 NR Description: expressed protein [Arabidopsis thaliana]
  misc_feature (1)..(324): Homolog of NCBI NO: 34908936 NR Description: P0691E06.20 [Oryza sativa (japonica
  misc_feature (1)..(324): Homolog of NCBI NO: 15241607 NR Description: putative protein; protein id: At5g44860.1, by cDNA: 31042. [Arabidopsis thaliana] >gi|2660664|gb|AAC79135.1| protein [Arabidopsis thaliana] >gi|10177476|dbj|BAB10867.1|
  misc_feature (1)..(324): Homolog of NCBI NO: 7485737 NR Description: hypothetical protein F18F4.50 - Arabidopsis >gi|2827649|emb|CAA16603.1| putative protein [Arabidopsis >gi|7268790|emb|CAB78995.1| putative protein [Arabidopsis
MECEPEELQFLGVVGIYRFSAEILRGPHRPLFARIAAAFALPLSALFLLHVAISHALFTHIDSDDTALDASSPGTDTQRRLLSRLASDWLALLLFKSAYLLALLLLSLLSVAASVFSVASVYSAKRDALTFPRVLSVVPRVWRRLAATFLAAFALLFAYHAVAVLVFVGLLVAADNGSGLAGLLAFLVAVAYLLGLVYLGVVWHLASVVSVLEDHKGFAAMRKSKDLIRGKLVTAGAIFFTLNVVFAAVELGFRAWVVRGSGAASSRLLLGLIMLAALCCVVMLALVTQTVVYLVCKSYHHESLDKANISDHLEVYLGDYVPAKGVRRADGAVPGLTVNPIASLSLSLLANPSSDAGILLLPPAAR

SEQ ID NO: 4738 - DNA, 1314 bp, Zea mays subsp. mays
  misc_feature (1)..(1314): Ceres Seq. ID no. 12344048
  misc_feature: MA Experiment ID: 20000480 Result: Down-regulated in Transcription
  misc_feature: MA Experiment 20000480 PARAMETER Experiment Name: Zm_Drought_P Parameter: Age (day) Value: 11
  misc_feature: MA Experiment 20000480 PARAMETER Experiment Name: Zm_Drought_P Parameter: Organism Value: Zea mays
  misc_feature: MA Experiment 20000480 PARAMETER Experiment Name: Zm_Drought_P Parameter: Plant Line Value: 35A19
  misc_feature: MA Experiment 20000480 PARAMETER Experiment Name: Zm_Drought_P Parameter: Timepoint (hr) Value: 72
  misc_feature: MA Experiment 20000480 PARAMETER Experiment Name: Zm_Drought_P Parameter: Tissue Value: Aerial
  misc_feature: MA Experiment 20000480 PARAMETER Experiment Name: Zm_Drought_P Parameter: Treatment Value: Drought vs. No Drought
  misc_feature: MA Experiment ID: 20000534 Result: Down-regulated in Transcription
  misc_feature: MA Experiment 20000534 PARAMETER Experiment Name: Zm_Hybrid_Pollen_P Parameter: Age (day) Value: 8
  misc_feature: MA Experiment 20000534 PARAMETER Experiment Name: Zm_Hybrid_Pollen_P Parameter: Organism Value: Zea mays
  misc_feature: MA Experiment 20000534 PARAMETER Experiment Name: Zm_Hybrid_Pollen_P Parameter: Plant Line Value: 35A19
  misc_feature: MA Experiment 20000534 PARAMETER Experiment Name: Zm_Hybrid_Pollen_P Parameter: Tissue Value: Pollen vs. Aerial
gtacaagcctttggagacatcgtgtccgtcagttatttctcttcctcctccaaaccaccgatgtcgctaccggttctatccctgcgctgccattgctcgtccgcatcctccttggatttccctcccaggaaggttagggttttctgatgcgctcatacatggggcagcaagaagatgggatgtctgatggcttgtacacttacaagcatcaccgcgagcgaggagctgatatccacaccatctttgtgaagaagagcaaattcaggattctgctgtcatttatcggcacaacgttccttcttgtgtctgtttgctgcgccctgttatcgaaggatggtttatgtctttgttccctttggagcatttcatttgccagtgtaattgcgaaatgcctgcgatgtgaccctgtgaagaaagagtcattggtgatcatgccgacttttggaattcaattagagcaacacttttggagtggaagagttcatcgcaaatttgtgcccattggcaagattctaagaccagtgctgaatgagcatgtgacccctgtctcatgctactggagcttggccttgcttgtacgcgaagaatatgagctcatgcttgttttcaagagcttgaatccaccagtcaagatgttggttccaatctggaaagcgttatgtgcattcgtagactccaaaagtgttgctcaatataatgctagtcagctgatcacacagagagagactgtgagtagggagattaggaagatactgactgagagggctagattcttcaacattgctcttgatgacgtctccatcacaagcctgagctttgggaaggagtttactcatgccattgaagcgaagcaggttgctgcacaggaagctgagcgtgctaagttcattgtcgagaaagctgaacaagataagagaagtgcaattatcagggctcagggagaggctaagagtgcggagctgattggtcaagccatagcgaacaaccctgccttccttgccctgaggcagattgaagctgcaagggagatctcccacaccatttcggcctcagccaacaaggtgttcctggactccaacgacctgctgctcaacctccagcagctgaatgtatcgagcaagcagaagaaatgatgtcacaacgttatcccatttcttctgagtttgcagtcagtagtggatgcctttgtaccagacattgtgaggaacgctcggttttggatgtagtttcgccaatcttcctgttatgtggaacttgcgagtatttgctcaaaggcaagcaagctgacaggttttgtttaaacgtaactacagg

SEQ ID NO: 4739 - protein, 328 aa, Zea mays subsp. mays
  peptide (1)..(328): Ceres Seq. ID no. 12344049
  misc_feature (180)..(328): Homolog of NCBI NO: 7716456 NR Description: prohibitin [Zea mays]
  misc_feature (180)..(328): Homolog of NCBI NO: 34394832 NR Description: putative prohibitin [Oryza sativa (japonica
  misc_feature (180)..(328): Homolog of NCBI NO: 34901014 NR Description: putative prohibitin [Oryza sativa (japonica
  misc_feature (180)..(328): Homolog of NCBI NO: 7716462 NR Description: prohibitin [Zea mays]
  misc_feature (180)..(328): Homolog of NCBI NO: 12751303 NR Description: prohibitin 1-like protein [Brassica napus]
  misc_feature (180)..(326): Homolog of NCBI NO: 15219569 NR Description: putative prohibitin 2; protein id: At1g03860.1, by cDNA: 6208., supported by cDNA: gi_13878108, supported by
  misc_feature (180)..(327): Homolog of NCBI NO: 15235317 NR Description: prohibitin-like protein; protein id: At4g28510.1, by cDNA: 40688., supported by cDNA: gi_20260657, supported by
  misc_feature (180)..(328): Homolog of NCBI NO: 15225374 NR Description: putative prohibitin; protein id: At2g20530.1, by cDNA: 6176., supported by cDNA: gi_18252886 [Arabidopsis
  misc_feature (180)..(327): Homolog of NCBI NO: 21593626 NR Description: prohibitin-like protein [Arabidopsis thaliana]
  misc_feature (180)..(318): Homolog of NCBI NO: 15241424 NR Description: prohibitin; protein id: At5g44140.1 [Arabidopsis
MRSYMGQQEDGMSDGLYTYKHHRERGADIHTIFVKKSKFRILLSFIGTTFLLVSVCCALLSKDGLCLCSLWSISFASVIAKCLRCDPVKKESLVIMPTFGIQLEQHFWSGRVHRKFVPIGKILRPVLNEHVTPVSCYWSLALLVREEYELMLVFKSLNPPVKMLVPIWKALCAFVDSKSVAQYNASQLITQRETVSREIRKILTERARFFNIALDDVSITSLSFGKEFTHAIEAKQVAAQEAERAKFIVEKAEQDKRSAIIRAQGEAKSAELIGQAIANNPAFLALRQIEAAREISHTISASANKVFLDSNDLLLNLQQLNVSSKQKK

SEQ ID NO: 4740 - protein, 324 aa, Zea mays subsp. mays
  peptide (1)..(324): Ceres Seq. ID no. 12344050
  misc_feature (176)..(324): Homolog of NCBI NO: 7716456 NR Description: prohibitin [Zea mays]
  misc_feature (176)..(324): Homolog of NCBI NO: 34394832 NR Description: putative prohibitin [Oryza sativa (japonica
  misc_feature (176)..(324): Homolog of NCBI NO: 34901014 NR Description: putative prohibitin [Oryza sativa (japonica
  misc_feature (176)..(324): Homolog of NCBI NO: 7716462 NR Description: prohibitin [Zea mays]
  misc_feature (176)..(324): Homolog of NCBI NO: 12751303 NR Description: prohibitin 1-like protein [Brassica napus]
  misc_feature (176)..(322): Homolog of NCBI NO: 15219569 NR Description: putative prohibitin 2; protein id: At1g03860.1, by cDNA: 6208., supported by cDNA: gi_13878108, supported by
  misc_feature (176)..(323): Homolog of NCBI NO: 15235317 NR Description: prohibitin-like protein; protein id: At4g28510.1, by cDNA: 40688., supported by cDNA: gi_20260657, supported by
  misc_feature (176)..(324): Homolog of NCBI NO: 15225374 NR Description: putative prohibitin; protein id: At2g20530.1, by cDNA: 6176., supported by cDNA: gi_18252886 [Arabidopsis
  misc_feature (176)..(323): Homolog of NCBI NO: 21593626 NR Description: prohibitin-like protein [Arabidopsis thaliana]
  misc_feature (176)..(314): Homolog of NCBI NO: 15241424 NR Description: prohibitin; protein id: At5g44140.1 [Arabidopsis
MGQQEDGMSDGLYTYKHHRERGADIHTIFVKKSKFRILLSFIGTTFLLVSVCCALLSKDGLCLCSLWSISFASVIAKCLRCDPVKKESLVIMPTFGIQLEQHFWSGRVHRKFVPIGKILRPVLNEHVTPVSCYWSLALLVREEYELMLVFKSLNPPVKMLVPIWKALCAFVDSKSVAQYNASQLITQRETVSREIRKILTERARFFNIALDDVSITSLSFGKEFTHAIEAKQVAAQEAERAKFIVEKAEQDKRSAIIRAQGEAKSAELIGQAIANNPAFLALRQIEAAREISHTISASANKVFLDSNDLLLNLQQLNVSSKQKK

SEQ ID NO: 4741 - protein, 317 aa, Zea mays subsp. mays
  peptide (1)..(317): Ceres Seq. ID no. 12344051
  misc_feature (169)..(317): Homolog of NCBI NO: 7716456 NR Description: prohibitin [Zea mays]
  misc_feature (169)..(317): Homolog of NCBI NO: 34394832 NR Description: putative prohibitin [Oryza sativa (japonica
  misc_feature (169)..(317): Homolog of NCBI NO: 34901014 NR Description: putative prohibitin [Oryza sativa (japonica
  misc_feature (169)..(317): Homolog of NCBI NO: 7716462 NR Description: prohibitin [Zea mays]
  misc_feature (169)..(317): Homolog of NCBI NO: 12751303 NR Description: prohibitin 1-like protein [Brassica napus]
  misc_feature (169)..(315): Homolog of NCBI NO: 15219569 NR Description: putative prohibitin 2; protein id: At1g03860.1, by cDNA: 6208., supported by cDNA: gi_13878108, supported by
  misc_feature (169)..(316): Homolog of NCBI NO: 15235317 NR Description: prohibitin-like protein; protein id: At4g28510.1, by cDNA: 40688., supported by cDNA: gi_20260657, supported by
  misc_feature (169)..(317): Homolog of NCBI NO: 15225374 NR Description: putative prohibitin; protein id: At2g20530.1, by cDNA: 6176., supported by cDNA: gi_18252886 [Arabidopsis
  misc_feature (169)..(316): Homolog of NCBI NO: 21593626 NR Description: prohibitin-like protein [Arabidopsis thaliana]
  misc_feature (169)..(307): Homolog of NCBI NO: 15241424 NR Description: prohibitin; protein id: At5g44140.1 [Arabidopsis
MSDGLYTYKHHRERGADIHTIFVKKSKFRILLSFIGTTFLLVSVCCALLSKDGLCLCSLWSISFASVIAKCLRCDPVKKESLVIMPTFGIQLEQHFWSGRVHRKFVPIGKILRPVLNEHVTPVSCYWSLALLVREEYELMLVFKSLNPPVKMLVPIWKALCAFVDSKSVAQYNASQLITQRETVSREIRKILTERARFFNIALDDVSITSLSFGKEFTHAIEAKQVAAQEAERAKFIVEKAEQDKRSAIIRAQGEAKSAELIGQAIANNPAFLALRQIEAAREISHTISASANKVFLDSNDLLLNLQQLNVSSKQKK

SEQ ID NO: 4742 - DNA, 1660 bp, Zea mays subsp. mays
  misc_feature (1)..(1660): Ceres Seq. ID no. 12373712
  misc_feature: MA Experiment ID: 108522 Result: Down-regulated in Transcription
  misc_feature: MA Experiment 108522 PARAMETER Experiment Name: Zm_42deg_Heat_P Parameter: Age (day) Value: 8
  misc_feature: MA Experiment 108522 PARAMETER Experiment Name: Zm_42deg_Heat_P Parameter: Organism Value: Zea mays
  misc_feature: MA Experiment 108522 PARAMETER Experiment Name: Zm_42deg_Heat_P Parameter: Plant Line Value: 35A19
  misc_feature: MA Experiment 108522 PARAMETER Experiment Name: Zm_42deg_Heat_P Parameter: Temperature (deg C) Value: 42 vs. 22
  misc_feature: MA Experiment 108522 PARAMETER Experiment Name: Zm_42deg_Heat_P Parameter: Timepoint (hr) Value: 1
  misc_feature: MA Experiment 108522 PARAMETER Experiment Name: Zm_42deg_Heat_P Parameter: Tissue Value: Aerial
ctgatttctgaatttgttcctcgtttcgttgccagcccaatcggttcagtttcggcggtaacaagatcaaccgcggtcgccagtcgattctgtgagcctgccagccatggagttgtccagttccgtctcgtccacggcggcggcggcggcgcaggcgcggctgctccggccgccgtcgtttcgccagccggggccggcgggtaagatgaccttcgaccacttccctcgcgcctggattaaccccgcgctcgcgtttgcctctgccttcttcgactccatccaatccaaggaaagttgcaagtgtggcgtgccggctggaactgagcagattggacttcccggcatgctgaatcctgctgcacttggacctgcaactttgccaggatttgtgtaaccaaggcttgtagtacctcttagtgttccatgcaaatttcttgctggcagcaaaccttcagccttgcctgctagtgctaactggatgtcttctccttttgttctccaattccaaactcctgtgcttccgttgcagtttcgaggggtagcttaaaagttaaaactatgattctcctgccgctgcaggattcgtgtcctgtaggagttacgctataaggagcaaactggtgagggcgatgcctccgatccttgctagcttccagcctgcatctcctcagtacccaagctttcaagacgcaaatggcaaaagacgaaatgttccttgttatcagagacaacaaaccccgcaggtagaagtcaggtcgatggaggaggtatatgacactttggctgaacaccttctttctgtcttgaagaatattgaacatcttgattcaaaatacattgttggtctagctggcccacctggtgctggcaagtccacagttgcctctgaagttgttcgacgtgttaatacattttggtcccagaagcacacaaagggtagcgcagcactgcttcctaccaaggaaattgctgcaatgcttccaatggatggtttccacctttatcgtgcccagcttgatgcaatggaggatccaaaagaagcacatgcaagaagaggagcaccttggacattcaatccatcactgtttctgaaatgtctacatacactaagaacagagggttcagtttatgctccatcatttgatcatggtgttggcgacccagttgagaatgacatatttgtaaagccacagcacaaaatagtgatagttgaagggaactatctgttactggaagaagatgtttggaccgaaattagagacttgtttgatgagaaatggttcattgacattgacattgatatctccatgcaaagagtgctcaagagacatattgcaaccggaaaagagccagatgtagcagcatggaggatctcctacaacgaccgaccgaatgcagagcttatcctggaatcaaggaagaatgctgaccttgtgatcagatcagtagacttctcaagctagtgttcaattctttcaataggaaatagcattgtggttctagagttggaggttgttgtgggctgtttccgtggagattcctgtacatataataagctgaatgcctgtttcaaattttcatggtgattgtgttgcatgtaataagatattccttcactatgtaccgtggaggattgttaagtaatttattgacatttttt

SEQ ID NO: 4743 - protein, 277 aa, Zea mays subsp. mays
  peptide (1)..(277): Ceres Seq. ID no. 12373713
  misc_feature (70)..(273): Pfam Name: Phosphoribulokinase / Uridine kinase family Pfam Description: Phosphoribulokinase / Uridine kinase family
  misc_feature (116)..(270): Homolog of NCBI NO: 23500977 NR Description: kinase-related protein [Brucella suis 1330]
  misc_feature (58)..(124): Homolog of NCBI NO: 23500977 NR Description: kinase-related protein [Brucella suis 1330]
  misc_feature (24)..(274): Homolog of NCBI NO: 15218676 NR Description: unknown protein; protein id: At1g03030.1
  misc_feature (166)..(274): Homolog of NCBI NO: 25363622 NR Description: hypothetical protein F10O3.15 - Arabidopsis >gi|4587575|gb|AAD25806.1|AC006550_14 Belongs to PF|01121 protein family UPF0038 containing ATP/GTP binding gene.
  misc_feature (38)..(273): Homolog of NCBI NO: 19113880 NR Description: similarity to uridine kinase [Schizosaccharomyces
  misc_feature (68)..(257): Homolog of NCBI NO: 38108268 NR Description: hypothetical protein MG02303.4 [Magnaporthe
  misc_feature (66)..(272): Homolog of NCBI NO: 40741109 NR Description: hypothetical protein AN4382.2 [Aspergillus
  misc_feature (28)..(143): Homolog of NCBI NO: 25363622 NR Description: hypothetical protein F10O3.15 - Arabidopsis >gi|4587575|gb|AAD25806.1|AC006550_14 Belongs to PF|01121 protein family UPF0038 containing ATP/GTP binding gene.
  misc_feature (116)..(270): Homolog of NCBI NO: 17988166 NR Description: PANTOTHENATE KINASE [Brucella melitensis]
  misc_feature (58)..(124): Homolog of NCBI NO: 17988166 NR Description: PANTOTHENATE KINASE [Brucella melitensis]
MPPILASFQPASPQYPSFQDANGKRRNVPCYQRQQTPQVEVRSMEEVYDTLAEHLLSVLKNIEHLDSKYIVGLAGPPGAGKSTVASEVVRRVNTFWSQKHTKGSAALLPTKEIAAMLPMDGFHLYRAQLDAMEDPKEAHARRGAPWTFNPSLFLKCLHTLRTEGSVYAPSFDHGVGDPVENDIFVKPQHKIVIVEGNYLLLEEDVWTEIRDLFDEKWFIDIDIDISMQRVLKRHIATGKEPDVAAWRISYNDRPNAELILESRKNADLVIRSVDFSS

SEQ ID NO: 4744 - protein, 234 aa, Zea mays subsp. mays
  peptide (1)..(234): Ceres Seq. ID no. 12373714
  misc_feature (27)..(230): Pfam Name: Phosphoribulokinase / Uridine kinase family Pfam Description: Phosphoribulokinase / Uridine kinase family
  misc_feature (1)..(231): Homolog of NCBI NO: 15218676 NR Description: unknown protein; protein id: At1g03030.1
  misc_feature (1)..(100): Homolog of NCBI NO: 25363622 NR Description: hypothetical protein F10O3.15 - Arabidopsis >gi|4587575|gb|AAD25806.1|AC006550_14 Belongs to PF|01121 protein family UPF0038 containing ATP/GTP binding gene.
  misc_feature (123)..(231): Homolog of NCBI NO: 25363622 NR Description: hypothetical protein F10O3.15 - Arabidopsis >gi|4587575|gb|AAD25806.1|AC006550_14 Belongs to PF|01121 protein family UPF0038 containing ATP/GTP binding gene.
  misc_feature (23)..(229): Homolog of NCBI NO: 40741109 NR Description: hypothetical protein AN4382.2 [Aspergillus
  misc_feature (1)..(230): Homolog of NCBI NO: 19113880 NR Description: similarity to uridine kinase [Schizosaccharomyces
  misc_feature (25)..(214): Homolog of NCBI NO: 38108268 NR Description: hypothetical protein MG02303.4 [Magnaporthe
  misc_feature (73)..(227): Homolog of NCBI NO: 23500977 NR Description: kinase-related protein [Brucella suis 1330]
  misc_feature (15)..(81): Homolog of NCBI NO: 23500977 NR Description: kinase-related protein [Brucella suis 1330]
  misc_feature (73)..(227): Homolog of NCBI NO: 17988166 NR Description: PANTOTHENATE KINASE [Brucella melitensis]
  misc_feature (15)..(81): Homolog of NCBI NO: 17988166 NR Description: PANTOTHENATE KINASE [Brucella melitensis]
MEEVYDTLAEHLLSVLKNIEHLDSKYIVGLAGPPGAGKSTVASEVVRRVNTFWSQKHTKGSAALLPTKEIAAMLPMDGFHLYRAQLDAMEDPKEAHARRGAPWTFNPSLFLKCLHTLRTEGSVYAPSFDHGVGDPVENDIFVKPQHKIVIVEGNYLLLEEDVWTEIRDLFDEKWFIDIDIDISMQRVLKRHIATGKEPDVAAWRISYNDRPNAELILESRKNADLVIRSVDFSS

SEQ ID NO: 4745 - protein, 162 aa, Zea mays subsp. mays
  peptide (1)..(162): Ceres Seq. ID no. 12373715
  misc_feature (1)..(158): Pfam Name: Phosphoribulokinase / Uridine kinase family Pfam Description: Phosphoribulokinase / Uridine kinase family
  misc_feature (1)..(159): Homolog of NCBI NO: 15218676 NR Description: unknown protein; protein id: At1g03030.1
  misc_feature (1)..(28): Homolog of NCBI NO: 25363622 NR Description: hypothetical protein F10O3.15 - Arabidopsis >gi|4587575|gb|AAD25806.1|AC006550_14 Belongs to PF|01121 protein family UPF0038 containing ATP/GTP binding gene.
  misc_feature (51)..(159): Homolog of NCBI NO: 25363622 NR Description: hypothetical protein F10O3.15 - Arabidopsis >gi|4587575|gb|AAD25806.1|AC006550_14 Belongs to PF|01121 protein family UPF0038 containing ATP/GTP binding gene.
  misc_feature (1)..(157): Homolog of NCBI NO: 40741109 NR Description: hypothetical protein AN4382.2 [Aspergillus
  misc_feature (1)..(158): Homolog of NCBI NO: 19113880 NR Description: similarity to uridine kinase [Schizosaccharomyces
  misc_feature (1)..(142): Homolog of NCBI NO: 38108268 NR Description: hypothetical protein MG02303.4 [Magnaporthe
  misc_feature (1)..(155): Homolog of NCBI NO: 23500977 NR Description: kinase-related protein [Brucella suis 1330]
  misc_feature (1)..(155): Homolog of NCBI NO: 17988166 NR Description: PANTOTHENATE KINASE [Brucella melitensis]
  misc_feature (1)..(155): Homolog of NCBI NO: 15887420 NR Description: AGR_C_100p [Agrobacterium tumefaciens] pantothenate kinase [Agrobacterium tumefaciens str. C58 (U.
  misc_feature (1)..(156): Homolog of NCBI NO: 22959901 NR Description: hypothetical protein [Rhodobacter sphaeroides]
MLPMDGFHLYRAQLDAMEDPKEAHARRGAPWTFNPSLFLKCLHTLRTEGSVYAPSFDHGVGDPVENDIFVKPQHKIVIVEGNYLLLEEDVWTEIRDLFDEKWFIDIDIDISMQRVLKRHIATGKEPDVAAWRISYNDRPNAELILESRKNADLVIRSVDFSS

SEQ ID NO: 4746 - DNA, 1825 bp, Zea mays subsp. mays
  misc_feature (1)..(1825): Ceres Seq. ID no. 12406786
  misc_feature: MA Experiment ID: 108523 Result: Up-regulated in Transcription
  misc_feature: MA Experiment 108523 PARAMETER Experiment Name: Zm_42deg_Heat_P Parameter: Age (day) Value: 8
  misc_feature: MA Experiment 108523 PARAMETER Experiment Name: Zm_42deg_Heat_P Parameter: Organism Value: Zea mays
  misc_feature: MA Experiment 108523 PARAMETER Experiment Name: Zm_42deg_Heat_P Parameter: Plant Line Value: 35A19
  misc_feature: MA Experiment 108523 PARAMETER Experiment Name: Zm_42deg_Heat_P Parameter: Temperature (deg C) Value: 42 vs. 22
  misc_feature: MA Experiment 108523 PARAMETER Experiment Name: Zm_42deg_Heat_P Parameter: Timepoint (hr) Value: 6
  misc_feature: MA Experiment 108523 PARAMETER Experiment Name: Zm_42deg_Heat_P Parameter: Tissue Value: Aerial
  misc_feature: MA Experiment ID: 108536 Result: Up-regulated in Transcription
  misc_feature: MA Experiment 108536 PARAMETER Experiment Name: Zm_Meristem_P Parameter: Age (day) Value: 8
  misc_feature: MA Experiment 108536 PARAMETER Experiment Name: Zm_Meristem_P Parameter: Organism Value: Zea mays
  misc_feature: MA Experiment 108536 PARAMETER Experiment Name: Zm_Meristem_P Parameter: Plant Line Value: 35A19
  misc_feature: MA Experiment 108536 PARAMETER Experiment Name: Zm_Meristem_P Parameter: Tissue Value: Shoot Meristem vs. Above Shoot Meristem
  misc_feature: MA Experiment ID: 108543 Result: Down-regulated in Transcription
  misc_feature: MA Experiment ID: 20000478 Result: Down-regulated in Transcription
  misc_feature: MA Experiment 20000478 PARAMETER Experiment Name: Zm_5mM_SA_P Parameter: Age (day) Value: 11
  misc_feature: MA Experiment 20000478 PARAMETER Experiment Name: Zm_5mM_SA_P Parameter: Organism Value: Zea mays
  misc_feature: MA Experiment 20000478 PARAMETER Experiment Name: Zm_5mM_SA_P Parameter: Plant Line Value: 35A19
  misc_feature: MA Experiment 20000478 PARAMETER Experiment Name: Zm_5mM_SA_P Parameter: Timepoint (hr) Value: 72
  misc_feature: MA Experiment 20000478 PARAMETER Experiment Name: Zm_5mM_SA_P Parameter: Tissue Value: Aerial
  misc_feature: MA Experiment 20000478 PARAMETER Experiment Name: Zm_5mM_SA_P Parameter: Treatment Value: 5mM SA vs. No Treatment
  misc_feature: MA Experiment ID: 20000492 Result: Up-regulated in Transcription
  misc_feature: MA Experiment 20000492 PARAMETER Experiment Name: Zm_Hybrid_Seed_Dev_P Parameter: DAP Value: 12
  misc_feature: MA Experiment 20000492 PARAMETER Experiment Name: Zm_Hybrid_Seed_Dev_P Parameter: Organism Value: Zea mays
  misc_feature: MA Experiment 20000492 PARAMETER Experiment Name: Zm_Hybrid_Seed_Dev_P Parameter: Plant Line Value: 35A19
  misc_feature: MA Experiment 20000492 PARAMETER Experiment Name: Zm_Hybrid_Seed_Dev_P Parameter: Tissue Value: Fert Kernel vs. Unfert Floret
  misc_feature: MA Experiment ID: 20000535 Result: Up-regulated in Transcription
  misc_feature: MA Experiment 20000535 PARAMETER Experiment Name: Zm_Hybrid_Seed_Dev_P Parameter: DAP Value: 30 vs. 12
  misc_feature: MA Experiment 20000535 PARAMETER Experiment Name: Zm_Hybrid_Seed_Dev_P Parameter: Organism Value: Zea mays
  misc_feature: MA Experiment 20000535 PARAMETER Experiment Name: Zm_Hybrid_Seed_Dev_P Parameter: Plant Line Value: 35A19
  misc_feature: MA Experiment 20000535 PARAMETER Experiment Name: Zm_Hybrid_Seed_Dev_P Parameter: Tissue Value: Embryo vs. Unfert Floret
agtgctgtgctgtgctgtgctgtgcagcggttgctcctcctggtcctgctactgctccgctctcctcgtcgcttgctcgtcttttttccacactgggcggatttctttctcgcaaggagcaggaggaggaggagggggaaaggtttgtccgtttcttgcgagagcccgttgcagagatccagccaggcagcaggattcaagaacctgacctttttgtgctctactccccgagagattttcacccaaagtttggtccttggagccgattcgatccctggaaacaaccaagtgaaggtgccgcaaatccgttgtgactgcacaaaatcccaaaacgcctctgccacctatctatttgatcgttgggaacctagctccatccatctgagccaagaaagcagcagccgcagggcggaggggaggggagaggataggagagggcgtcctcttccgagcagcccgcattgccgcctgtcgatgagtgagcgctgcctccgatgccgtcggggtgctcggtgtccagtctcgcggcgcggttcgccttcttcccgccggagccggcgacgtacgccgtccggaaggacgaggccacgggccgcctcgtcgcctccggcgtgccgcgggacaacgccatggacgtcctgctcgtcgacaccagcagggggaacaaggtggtggccttctacttccggaacccctgcgcgcgcctcaccctgctctactcgcacggcaacgctgccgacctcggccagctgtacgacctctttgtgcagctcaaggtcaatctcaagatcaacctgatgggatatgactattctggctatggtgcatctactggcaagccaagtgaagagaatacatatgcagacattgaagcagtgtaccaatgcttagaaactgagtatgggatcagccagggaagacattatcttgtacggacaatctgtcggcagtggaccaacattacatttagcctctcgtttgcctagattgcgtggggtggttctccacagcgctatactgtcaggcctccgtgtggtttgccatgtgaactttactttctgctttgacatttacaaaaatgtcaagaaaataaaaaaggtcaaatgcccagtgctcgttattcatgggacggacgacgacgtggtggactggtcgcacgggaaggagctgtggaggctggcgagggagcctcacgacccgctctggatcaagggcggcgggcactgcaacctggagctgtacccggacttcatccgccacctgtcgcggttcgtccgcgagatggagaccgtgacgacgaaggcccggctgaggaagatccggccggccctccaccagctccgcaagaaggcggcgcaccgggcaagcacggcggcgacgacgaccaccaccaccaccttcaccgccaactgctgctgccgcgtccgcgtccgcaagccgacctgccccagctgcggctccttcggctgtggctgctgcgggccgcttaggagctgcctcgcgctccggtttcccaggtgctgccggcctcctgctgcctgcttcacctgcggcggctgctgttggtcatgcaggtgcaggagctgcttcaagtgctgctgctgctgatgatgatgttgagacgtgcgtcaatgagtgccgcccgccgatcgatccctgcgcgcgcgcgcgcgcgtatggtataatgaagaggaatgacagtggtcatgggatccctgctaacaaaccctttaaacgccgtagactataaaaaaaacctagatttgagctggtggctgctgaacgttgtattaacagatcccaggactccccgccgtttgtggtc

SEQ ID NO: 4747 - protein, 265 aa, Zea mays subsp. mays
  peptide (1)..(265): Ceres Seq. ID no. 12406787
  misc_feature (76)..(265): Homolog of NCBI NO: 13592175 NR Description: ppg3 [Leishmania major]
  misc_feature (166)..(265): Homolog of NCBI NO: 11360494 NR Description: antifreeze glycopeptide AFGP polyprotein precursor
  misc_feature (88)..(265): Homolog of NCBI NO: 13592175 NR Description: ppg3 [Leishmania major]
SAVLCCAVQRLLLLVLLLLRSPRRLLVFFPHWADFFLARSRRRRRGKGLSVSCESPLQRSSQAAGFKNLTFLCSTPREIFTQSLVLGADSIPGNNQVKVPQIRCDCTKSQNASATYLFDRWEPSSIHLSQESSSRRAEGRGEDRRGRPLPSSPHCRLSMSERCLRCRRGARCPVSRRGSPSSRRSRRRTPSGRTRPRAASSPPACRGTTPWTSCSSTPAGGTRWWPSTSGTPARASPCSTRTATLPTSASCTTSLCSSRSISRST

SEQ ID NO: 4748 - protein, 235 aa, Zea mays subsp. mays
  peptide (1)..(235): Ceres Seq. ID no. 12406788
  misc_feature (172)..(235): Pfam Name: Keratin, high sulfur B2 protein Pfam Description: Keratin, high sulfur B2 protein
  misc_feature (1)..(235): Homolog of NCBI NO: 34905260 NR Description: P0577B11.1 [Oryza sativa (japonica >gi|29170589|dbj|BAC57808.2| putative TPA: Cgi67 serine protease
  misc_feature (2)..(235): Homolog of NCBI NO: 15222598 NR Description: hypothetical protein; protein id: At1g32190.1
  misc_feature (2)..(132): Homolog of NCBI NO: 28393521 NR Description: unknown protein [Arabidopsis thaliana]
  misc_feature (57)..(132): Homolog of NCBI NO: 30688887 NR Description: expressed protein [Arabidopsis thaliana]
  misc_feature (2)..(63): Homolog of NCBI NO: 30688887 NR Description: expressed protein [Arabidopsis thaliana]
  misc_feature (57)..(129): Homolog of NCBI NO: 15224121 NR Description: hypothetical protein; protein id: At2g24320.1
  misc_feature (1)..(59): Homolog of NCBI NO: 15224121 NR Description: hypothetical protein; protein id: At2g24320.1
  misc_feature (2)..(129): Homolog of NCBI NO: 15230760 NR Description: unknown protein; protein id: At3g30380.1 thaliana] >gi|9294341|dbj|BAB02238.1| contains similarity to
  misc_feature (1)..(129): Homolog of NCBI NO: 15232168 NR Description: unknown protein; protein id: At3g01690.1 thaliana] >gi|6016726|gb|AAF01552.1|AC009325_22 unknown protein thaliana] >gi|6091713|gb|AAF03425.1|AC010797_1 unknown protein
  misc_feature (2)..(154): Homolog of NCBI NO: 15241394 NR Description: putative protein; protein id: At5g14390.1, by cDNA: gi_17529313 [Arabidopsis thaliana]
MGSAREDIILYGQSVGSGPTLHLASRLPRLRGVVLHSAILSGLRVVCHVNFTFCFDIYKNVKKIKKVKCPVLVIHGTDDDVVDWSHGKELWRLAREPHDPLWIKGGGHCNLELYPDFIRHLSRFVREMETVTTKARLRKIRPALHQLRKKAAHRASTAATTTTTTTFTANCCCRVRVRKPTCPSCGSFGCGCCGPLRSCLALRFPRCCRPPAACFTCGGCCWSCRCRSCFKCCCC

SEQ ID NO: 4749 - protein, 163 aa, Zea mays subsp. mays
  peptide (1)..(163): Ceres Seq. ID no. 12406789
  misc_feature (1)..(140): Homolog of NCBI NO: 34905260 NR Description: P0577B11.1 [Oryza sativa (japonica >gi|29170589|dbj|BAC57808.2| putative TPA: Cgi67 serine protease
  misc_feature (4)..(140): Homolog of NCBI NO: 15222598 NR Description: hypothetical protein; protein id: At1g32190.1
  misc_feature (4)..(140): Homolog of NCBI NO: 28393521 NR Description: unknown protein [Arabidopsis thaliana]
  misc_feature (4)..(140): Homolog of NCBI NO: 30688887 NR Description: expressed protein [Arabidopsis thaliana]
  misc_feature (4)..(140): Homolog of NCBI NO: 15224121 NR Description: hypothetical protein; protein id: At2g24320.1
  misc_feature (4)..(140): Homolog of NCBI NO: 15230760 NR Description: unknown protein; protein id: At3g30380.1 thaliana] >gi|9294341|dbj|BAB02238.1| contains similarity to
  misc_feature (4)..(140): Homolog of NCBI NO: 15232168 NR Description: unknown protein; protein id: At3g01690.1 thaliana] >gi|6016726|gb|AAF01552.1|AC009325_22 unknown protein thaliana] >gi|6091713|gb|AAF03425.1|AC010797_1 unknown protein
  misc_feature (4)..(140): Homolog of NCBI NO: 15241394 NR Description: putative protein; protein id: At5g14390.1, by cDNA: gi_17529313 [Arabidopsis thaliana]
  misc_feature (4)..(140): Homolog of NCBI NO: 15233975 NR Description: putative protein; protein id: At4g24760.1, by cDNA: 121159., supported by cDNA: gi_18175920 [Arabidopsis
  misc_feature (4)..(138): Homolog of NCBI NO: 10177798 NR Description: emb|CAB87778.1~gene_id:MXA21.9~strong similarity unknown protein [Arabidopsis thaliana] unknown protein [Arabidopsis thaliana]
MPSGCSVSSLAARFAFFPPEPATYAVRKDEATGRLVASGVPRDNAMDVLLVDTSRGNKVVAFYFRNPCARLTLLYSHGNAADLGQLYDLFVQLKVNLKINLMGYDYSGYGASTGKPSEENTYADIEAVYQCLETEYGISQGRHYLVRTICRQWTNITFSLSFA

SEQ ID NO: 4750 - DNA, 498 bp, Zea mays subsp. mays
  misc_feature (1)..(498): Ceres Seq. ID no. 13572049
  misc_feature: MA Experiment ID: 108504 Result: Up-regulated in Transcription
  misc_feature: MA Experiment 108504 PARAMETER Experiment Name: Zm_Drought_P Parameter: Age (day) Value: 8
  misc_feature: MA Experiment 108504 PARAMETER Experiment Name: Zm_Drought_P Parameter: Organism Value: Zea mays
  misc_feature: MA Experiment 108504 PARAMETER Experiment Name: Zm_Drought_P Parameter: Plant Line Value: 35A19
  misc_feature: MA Experiment 108504 PARAMETER Experiment Name: Zm_Drought_P Parameter: Timepoint (hr) Value: 12
  misc_feature: MA Experiment 108504 PARAMETER Experiment Name: Zm_Drought_P Parameter: Tissue Value: Aerial
  misc_feature: MA Experiment 108504 PARAMETER Experiment Name: Zm_Drought_P Parameter: Treatment Value: Drought vs. No Drought
  misc_feature: MA Experiment ID: 108522 Result: Up-regulated in Transcription
  misc_feature: MA Experiment 108522 PARAMETER Experiment Name: Zm_42deg_Heat_P Parameter: Age (day) Value: 8
  misc_feature: MA Experiment 108522 PARAMETER Experiment Name: Zm_42deg_Heat_P Parameter: Organism Value: Zea mays
  misc_feature: MA Experiment 108522 PARAMETER Experiment Name: Zm_42deg_Heat_P Parameter: Plant Line Value: 35A19
  misc_feature: MA Experiment 108522 PARAMETER Experiment Name: Zm_42deg_Heat_P Parameter: Temperature (deg C) Value: 42 vs. 22
  misc_feature: MA Experiment 108522 PARAMETER Experiment Name: Zm_42deg_Heat_P Parameter: Timepoint (hr) Value: 1
  misc_feature: MA Experiment 108522 PARAMETER Experiment Name: Zm_42deg_Heat_P Parameter: Tissue Value: Aerial
  misc_feature: MA Experiment ID: 108523 Result: Up-regulated in Transcription
  misc_feature: MA Experiment 108523 PARAMETER Experiment Name: Zm_42deg_Heat_P Parameter: Age (day) Value: 8
  misc_feature: MA Experiment 108523 PARAMETER Experiment Name: Zm_42deg_Heat_P Parameter: Organism Value: Zea mays
  misc_feature: MA Experiment 108523 PARAMETER Experiment Name: Zm_42deg_Heat_P Parameter: Plant Line Value: 35A19
  misc_feature: MA Experiment 108523 PARAMETER Experiment Name: Zm_42deg_Heat_P Parameter: Temperature (deg C) Value: 42 vs. 22
  misc_feature: MA Experiment 108523 PARAMETER Experiment Name: Zm_42deg_Heat_P Parameter: Timepoint (hr) Value: 6
  misc_feature: MA Experiment 108523 PARAMETER Experiment Name: Zm_42deg_Heat_P Parameter: Tissue Value: Aerial
  misc_feature: MA Experiment ID: 108556 Result: Up-regulated in Transcription
  misc_feature: MA Experiment 108556 PARAMETER Experiment Name: Zm_Drought_P Parameter: Age (day) Value: 9
  misc_feature: MA Experiment 108556 PARAMETER Experiment Name: Zm_Drought_P Parameter: Organism Value: Zea mays
  misc_feature: MA Experiment 108556 PARAMETER Experiment Name: Zm_Drought_P Parameter: Plant Line Value: 35A19
  misc_feature: MA Experiment 108556 PARAMETER Experiment Name: Zm_Drought_P Parameter: Timepoint (hr) Value: 24
  misc_feature: MA Experiment 108556 PARAMETER Experiment Name: Zm_Drought_P Parameter: Tissue Value: Aerial
  misc_feature: MA Experiment 108556 PARAMETER Experiment Name: Zm_Drought_P Parameter: Treatment Value: Drought vs. No Drought
  misc_feature: MA Experiment ID: 108597 Result: Up-regulated in Transcription
  misc_feature: MA Experiment 108597 PARAMETER Experiment Name: Zm_100uM_ABA_P Parameter: Age (day) Value: 9
  misc_feature: MA Experiment 108597 PARAMETER Experiment Name: Zm_100uM_ABA_P Parameter: Organism Value: Zea mays
  misc_feature: MA Experiment 108597 PARAMETER Experiment Name: Zm_100uM_ABA_P Parameter: Plant Line Value: 35A19
  misc_feature: MA Experiment 108597 PARAMETER Experiment Name: Zm_100uM_ABA_P Parameter: Timepoint (hr) Value: 24
  misc_feature: MA Experiment 108597 PARAMETER Experiment Name: Zm_100uM_ABA_P Parameter: Tissue Value: Aerial
  misc_feature: MA Experiment 108597 PARAMETER Experiment Name: Zm_100uM_ABA_P Parameter: Treatment Value: 100uM ABA vs. No Treatment
  misc_feature: MA Experiment ID: 108689 Result: Up-regulated in Transcription
  misc_feature: MA Experiment 108689 PARAMETER Experiment Name: Zm_Drought_Roots_P Parameter: Age (day) Value: 9
  misc_feature: MA Experiment 108689 PARAMETER Experiment Name: Zm_Drought_Roots_P Parameter: Organism Value: Zea mays
  misc_feature: MA Experiment 108689 PARAMETER Experiment Name: Zm_Drought_Roots_P Parameter: Plant Line Value: 35A19
  misc_feature: MA Experiment 108689 PARAMETER Experiment Name: Zm_Drought_Roots_P Parameter: Timepoint (hr) Value: 24
  misc_feature: MA Experiment 108689 PARAMETER Experiment Name: Zm_Drought_Roots_P Parameter: Tissue Value: Roots
  misc_feature: MA Experiment 108689 PARAMETER Experiment Name: Zm_Drought_Roots_P Parameter: Treatment Value: Drought vs. No Drought
  misc_feature: MA Experiment ID: 20000478 Result: Up-regulated in Transcription
  misc_feature: MA Experiment 20000478 PARAMETER Experiment Name: Zm_5mM_SA_P Parameter: Age (day) Value: 11
  misc_feature: MA Experiment 20000478 PARAMETER Experiment Name: Zm_5mM_SA_P Parameter: Organism Value: Zea mays
  misc_feature: MA Experiment 20000478 PARAMETER Experiment Name: Zm_5mM_SA_P Parameter: Plant Line Value: 35A19
  misc_feature: MA Experiment 20000478 PARAMETER Experiment Name: Zm_5mM_SA_P Parameter: Timepoint (hr) Value: 72
  misc_feature: MA Experiment 20000478 PARAMETER Experiment Name: Zm_5mM_SA_P Parameter: Tissue Value: Aerial
  misc_feature: MA Experiment 20000478 PARAMETER Experiment Name: Zm_5mM_SA_P Parameter: Treatment Value: 5mM SA vs. No Treatment
  misc_feature: MA Experiment ID: 20000479 Result: Up-regulated in Transcription
  misc_feature: MA Experiment 20000479 PARAMETER Experiment Name: Zm_Drought_P Parameter: Age (day) Value: 10
  misc_feature: MA Experiment 20000479 PARAMETER Experiment Name: Zm_Drought_P Parameter: Organism Value: Zea mays
  misc_feature: MA Experiment 20000479 PARAMETER Experiment Name: Zm_Drought_P Parameter: Plant Line Value: 35A19
  misc_feature: MA Experiment 20000479 PARAMETER Experiment Name: Zm_Drought_P Parameter: Timepoint (hr) Value: 48
  misc_feature: MA Experiment 20000479 PARAMETER Experiment Name: Zm_Drought_P Parameter: Tissue Value: Aerial
  misc_feature: MA Experiment 20000479 PARAMETER Experiment Name: Zm_Drought_P Parameter: Treatment Value: Drought vs. No Drought
  misc_feature: MA Experiment ID: 20000480 Result: Up-regulated in Transcription
  misc_feature: MA Experiment 20000480 PARAMETER Experiment Name: Zm_Drought_P Parameter: Age (day) Value: 11
  misc_feature: MA Experiment 20000480 PARAMETER Experiment Name: Zm_Drought_P Parameter: Organism Value: Zea mays
  misc_feature: MA Experiment 20000480 PARAMETER Experiment Name: Zm_Drought_P Parameter: Plant Line Value: 35A19
  misc_feature: MA Experiment 20000480 PARAMETER Experiment Name: Zm_Drought_P Parameter: Timepoint (hr) Value: 72
  misc_feature: MA Experiment 20000480 PARAMETER Experiment Name: Zm_Drought_P Parameter: Tissue Value: Aerial
  misc_feature: MA Experiment 20000480 PARAMETER Experiment Name: Zm_Drought_P Parameter: Treatment Value: Drought vs. No Drought
  misc_feature: MA Experiment ID: 20000535 Result: Up-regulated in Transcription
  misc_feature: MA Experiment 20000535 PARAMETER Experiment Name: Zm_Hybrid_Seed_Dev_P Parameter: DAP Value: 30 vs. 12
  misc_feature: MA Experiment 20000535 PARAMETER Experiment Name: Zm_Hybrid_Seed_Dev_P Parameter: Organism Value: Zea mays
  misc_feature: MA Experiment 20000535 PARAMETER Experiment Name: Zm_Hybrid_Seed_Dev_P Parameter: Plant Line Value: 35A19
  misc_feature: MA Experiment 20000535 PARAMETER Experiment Name: Zm_Hybrid_Seed_Dev_P Parameter: Tissue Value: Embryo vs. Unfert Floret
aggttccagtattccaccacgcggcgtcgctgcycgaaccccgaaccttctcgaggtcgaggcccctcccctttcgccaggagaaaacaatgagcaggcgcaacagccgtaccatctatgtaggcaatctccctggggacatccgtgagagggaggttgaggatctcttctacaagtatggccgtattttggatattgacttgaaaatacctccgagacctcctggatacgcattcgttgagtttgaggatccacgtgatgctgatgatgcaatttatggccgtgatgggtataactttgatggctacaggttgagggttgaattagctcatggtggcagaggccagtcttattcttatgatcgttcaagcagctatagcagtgcatgccgtggaggtgtttctaggcgctctgatttccgtgttatggtcactggtttacctcatcggcatcgtggcaagatctgaaggaccacatgcggcgcgctggtgatgtctg

SEQ ID NO: 4751 - protein, 154 aa, Zea mays subsp. mays
  peptide (1)..(154): Ceres Seq. ID no. 13572050
  misc_feature (38)..(106): Pfam Name: RNA recognition motif. (a.k.a. RRM, RBD, or RNP domain) Pfam Description: RNA recognition motif. (a.k.a. RRM, RBD, or RNP
  misc_feature (30)..(147): Homolog of NCBI NO: 34894608 NR Description: putative pre-mRNA splicing factor SF2 [Oryza
  misc_feature (27)..(147): Homolog of NCBI NO: 33146854 NR Description: putative pre-mRNA splicing factor SF2 [Oryza
  misc_feature (30)..(147): Homolog of NCBI NO: 4775270 NR Description: SF2/ASF-like splicing modulator Srp30 thaliana] >gi|23297699|gb|AAN13011.1| putative SF2/ASF splicing
  misc_feature (30)..(147): Homolog of NCBI NO: 4775271 NR Description: SF2/ASF-like splicing modulator Srp30, variant 1
  misc_feature (30)..(147): Homolog of NCBI NO: 22329428 NR Description: arginine/serine-rich splicing factor, atSRp30
  misc_feature (30)..(147): Homolog of NCBI NO: 25386570 NR Description: hypothetical protein [imported] - Arabidopsis
  misc_feature (30)..(147): Homolog of NCBI NO: 7484802 NR Description: alternative splicing factor ASF-2 homolog - Arabidopsis thaliana >gi|3193304|gb|AAC19288.1| contains
  misc_feature (30)..(147): Homolog of NCBI NO: 30679138 NR Description: arginine/serine-rich splicing factor (atSRp34), [Arabidopsis thaliana] >gi|26451203|dbj|BAC42705.1| unknown
  misc_feature (30)..(147): Homolog of NCBI NO: 30679143 NR Description: arginine/serine-rich splicing factor (atSRp34),
  misc_feature (30)..(147): Homolog of NCBI NO: 2443473 NR Description: ASF/SF2 homolog [Arabidopsis thaliana]
  misc_feature (11)..(11): Xaa is any aa, unknown or other
VPVFHHAASLXEPRTFSRSRPLPFRQEKTMSRRNSRTIYVGNLPGDIREREVEDLFYKYGRILDIDLKIPPRPPGYAFVEFEDPRDADDAIYGRDGYNFDGYRLRVELAHGGRGQSYSYDRSSSYSSACRGGVSRRSDFRVMVTGLPHRHRGKI

SEQ ID NO: 4752 - protein, 125 aa, Zea mays subsp. mays
  peptide (1)..(125): Ceres Seq. ID no. 13572051
  misc_feature (9)..(77): Pfam Name: RNA recognition motif. (a.k.a. RRM, RBD, or RNP domain) Pfam Description: RNA recognition motif. (a.k.a. RRM, RBD, or RNP
  misc_feature (1)..(118): Homolog of NCBI NO: 34894608 NR Description: putative pre-mRNA splicing factor SF2 [Oryza
  misc_feature (1)..(118): Homolog of NCBI NO: 33146854 NR Description: putative pre-mRNA splicing factor SF2 [Oryza
  misc_feature (1)..(118): Homolog of NCBI NO: 4775270 NR Description: SF2/ASF-like splicing modulator Srp30 thaliana] >gi|23297699|gb|AAN13011.1| putative SF2/ASF splicing
  misc_feature (1)..(118): Homolog of NCBI NO: 22329428 NR Description: arginine/serine-rich splicing factor, atSRp30
  misc_feature (1)..(118): Homolog of NCBI NO: 25386570 NR Description: hypothetical protein [imported] - Arabidopsis
  misc_feature (1)..(118): Homolog of NCBI NO: 4775271 NR Description: SF2/ASF-like splicing modulator Srp30, variant 1
  misc_feature (1)..(118): Homolog of NCBI NO: 7484802 NR Description: alternative splicing factor ASF-2 homolog - Arabidopsis thaliana >gi|3193304|gb|AAC19288.1| contains
  misc_feature (1)..(118): Homolog of NCBI NO: 30679138 NR Description: arginine/serine-rich splicing factor (atSRp34), [Arabidopsis thaliana] >gi|26451203|dbj|BAC42705.1| unknown
  misc_feature (1)..(118): Homolog of NCBI NO: 30679143 NR Description: arginine/serine-rich splicing factor (atSRp34),
  misc_feature (1)..(118): Homolog of NCBI NO: 2443473 NR Description: ASF/SF2 homolog [Arabidopsis thaliana]
MSRRNSRTIYVGNLPGDIREREVEDLFYKYGRILDIDLKIPPRPPGYAFVEFEDPRDADDAIYGRDGYNFDGYRLRVELAHGGRGQSYSYDRSSSYSSACRGGVSRRSDFRVMVTGLPHRHRGKI

SEQ ID NO: 4753 - DNA, 2103 bp, Zea mays subsp. mays
  misc_feature (1)..(2103): Ceres Seq. ID no. 12344495
  misc_feature: MA Experiment ID: 108535 Result: Up-regulated in Transcription
  misc_feature: MA Experiment 108535 PARAMETER Experiment Name: Zm_Meristem_P Parameter: Age (day) Value: 8
  misc_feature: MA Experiment 108535 PARAMETER Experiment Name: Zm_Meristem_P Parameter: Organism Value: Zea mays
  misc_feature: MA Experiment 108535 PARAMETER Experiment Name: Zm_Meristem_P Parameter: Plant Line Value: 35A19
  misc_feature: MA Experiment 108535 PARAMETER Experiment Name: Zm_Meristem_P Parameter: Tissue Value: Root Meristem vs. Above Root Meristem
gtcgcattccgcaacacctgctcctcgcccccttctctcagaggcgacgcctcgggcgctcctaccctgccccgtctccggtccccccgcgccgtcggcgaggcagccggccgtcacagaagcccgatccggaccccgcgagaaatccttgttatacctgatggctatgattgatgagcctctttatccaattgctgtactgattgacgagctcaagaatgaagacatccagttgcgtctaaactccattagaagactttcaacaattgcacggctcttggagaagaaagaaccaggaaggagctgattccttttcttagtgaaaacaacgatgatgaagacgaggtgcttcttgcaatggctgaggaattgggtgtgttcattccgtatgttggtggtgtagaacatgctcatgttttgctcccacctttggagacattgtgtacagtggaggaaacttgtgtccgtgataaagcagttgaatctctgtgccgtattggtgcacaaatgaaggaaactgacattgtcgactggttcattccagtagtaaagaggctagcagctggagagtggtttacagctcgcgtatcgtcctgtggtcttttccacatagcctatccaagtgcgtcggaccaattgaaaacagaattgaggactatctatggtcagctatgtcaggatgacatgcctatggtcagaagagcagcagcatcaaatcttggaaagtttgcagctacagttgaacagaatcatttgaagacagaaataatgtcaatatttgatgatttaacccaagatgatcaagattcagtgcgtctgttggctgttgaaggctgtgctgcccttggtaaattgttggaaccacaagattgcgtagcacacattcttccagtcattgtcaatttctcccaggataaatcatggcgtgttcgttatatggtcgccaatcaattatatgagctctgtgaggctgttggccctgagcctacaagagctgatttggtgcctgcctatgttcgcctccttcgtgataatgaggctgaagtgcggatagcagctgctggaaaagtaactaagttttgccgcatattaaatcctcagctctcagtccaacatattcttccatgcgttaaggaattgtcatcagattcatcccagcatgttcgttcagctttagcctcagtgattatgggaatggctcctgtactgggaaaggatgctaccattgaacagcttgttccaattttcctctctttgttgaaagacgaatttcctgatgttcgacttaacataatcagcaaacttgatcaagttaatcaggttattggaattgacttgctatctcaatcactgctaccagcaattgtagaacttgcagaggataggcactggagagtccggcttgcaataattgagtacatcccattgttggcgagtcaattaggtgttgggtttttcgatgacaagctgggggcgctctgcatgcaatggttggaagacaaggtcttttcaatcagagatgctgccgctaacaacttgaagcgccttgcagaagagtttggtccagagtgggcaatgcagcatataatccctcaggtgctggagaagatcaacaacccacactatttataccgcatgacgattctgcaggcaatctccttgctagctcctgtcatgggtgcagagatcacctgtcaaaagctgcttccagtcgtcattaattcttcgaaggacagggttcccaacatcaagttcaatgttgcgaaagtactacagtcacttgtaccgatcctcgaccaatctgtggtggagaagaccgtgaaaccgtgcctcgttgagctcagcgaggaccctgacgtcgacgtaaggtactacgcaaaccaggcactgcaggcgtgcgaccagatgatggtgtcaagctaactagcctttgtgtcaagtatttagagagttcgatcgatgctccatagtccaattttggattacctgtaatttggcctttagatttgaagagttgtttgtgtccagcctcggtaacagataaaaacggacggtcctgatccccttgttcgtttgtgttaattaatgttgtaattgagcagg

SEQ ID NO: 4754 - protein, 521 aa, Zea mays subsp. mays
  peptide (1)..(521): Ceres Seq. ID no. 12344496
  misc_feature (168)..(206): Pfam Name: HEAT repeat Pfam Description: HEAT repeat
  misc_feature (1)..(521): Homolog of NCBI NO: 5679684 NR Description: phosphatase 2A regulatory A subunit [Oryza >gi|5679686|emb|CAB51804.1| protein phosphatase 2A A subunit
  misc_feature (1)..(521): Homolog of NCBI NO: 15230896 NR Description: protein phosphatase 2A 65 kDa regulatory subunit; id: At3g25800.1 [Arabidopsis thaliana] protein phosphotase 2a 65kd regulatory subunit [Arabidopsis
  misc_feature (1)..(521): Homolog of NCBI NO: 1076389 NR Description: phosphoprotein phosphatase 2A 65K regulatory
  misc_feature (1)..(521): Homolog of NCBI NO: 11094365 NR Description: Ser/Thr specific protein phosphatase 2A A
  misc_feature (1)..(521): Homolog of NCBI NO: 11094367 NR Description: Ser/Thr specific protein phosphatase 2A A
  misc_feature (1)..(521): Homolog of NCBI NO: 22329534 NR Description: protein phosphatase 2A regulatory subunit, protein id: At1g13320.1, supported by cDNA: gi_20466587 thaliana] >gi|20466588|gb|AAM20611.1| protein phosphatase 2A
  misc_feature (1)..(520): Homolog of NCBI NO: 7447393 NR Description: phosphoprotein phosphatase (EC 3.1.3.16) 2A
  misc_feature (1)..(521): Homolog of NCBI NO: 25313492 NR Description: probable protein phosphotase 2a 65K chain - thaliana >gi|9958062|gb|AAG09551.1|AC011810_10 Putative protein
  misc_feature (1)..(515): Homolog of NCBI NO: 15222601 NR Description: phosphoprotein phosphatase 2A, regulatory subunit protein id: At1g25490.1, supported by cDNA: gi_1254995, supported cDNA: gi_1262170 [Arabidopsis thaliana] >gi|25313494|pir||B86385
  misc_feature (1)..(515): Homolog of NCBI NO: 1254996 NR Description: serine/threonine protein phosphatase type 2A
MAEELGVFIPYVGGVEHAHVLLPPLETLCTVEETCVRDKAVESLCRIGAQMKETDIVDWFIPVVKRLAAGEWFTARVSSCGLFHIAYPSASDQLKTELRTIYGQLCQDDMPMVRRAAASNLGKFAATVEQNHLKTEIMSIFDDLTQDDQDSVRLLAVEGCAALGKLLEPQDCVAHILPVIVNFSQDKSWRVRYMVANQLYELCEAVGPEPTRADLVPAYVRLLRDNEAEVRIAAAGKVTKFCRILNPQLSVQHILPCVKELSSDSSQHVRSALASVIMGMAPVLGKDATIEQLVPIFLSLLKDEFPDVRLNIISKLDQVNQVIGIDLLSQSLLPAIVELAEDRHWRVRLAIIEYIPLLASQLGVGFFDDKLGALCMQWLEDKVFSIRDAAANNLKRLAEEFGPEWAMQHIIPQVLEKINNPHYLYRMTILQAISLLAPVMGAEITCQKLLPVVINSSKDRVPNIKFNVAKVLQSLVPILDQSVVEKTVKPCLVELSEDPDVDVRYYANQALQACDQMMVSS

SEQ ID NO: 4755 - protein, 471 aa, Zea mays subsp. mays
  peptide (1)..(471): Ceres Seq. ID no. 12344497
  misc_feature (118)..(156): Pfam Name: HEAT repeat Pfam Description: HEAT repeat
  misc_feature (1)..(471): Homolog of NCBI NO: 5679684 NR Description: phosphatase 2A regulatory A subunit [Oryza >gi|5679686|emb|CAB51804.1| protein phosphatase 2A A subunit
  misc_feature (1)..(471): Homolog of NCBI NO: 15230896 NR Description: protein phosphatase 2A 65 kDa regulatory subunit; id: At3g25800.1 [Arabidopsis thaliana] protein phosphotase 2a 65kd regulatory subunit [Arabidopsis
  misc_feature (1)..(471): Homolog of NCBI NO: 1076389 NR Description: phosphoprotein phosphatase 2A 65K regulatory
  misc_feature (1)..(471): Homolog of NCBI NO: 11094365 NR Description: Ser/Thr specific protein phosphatase 2A A
  misc_feature (1)..(471): Homolog of NCBI NO: 11094367 NR Description: Ser/Thr specific protein phosphatase 2A A
  misc_feature (1)..(471): Homolog of NCBI NO: 22329534 NR Description: protein phosphatase 2A regulatory subunit, protein id: At1g13320.1, supported by cDNA: gi_20466587 thaliana] >gi|20466588|gb|AAM20611.1| protein phosphatase 2A
  misc_feature (1)..(470): Homolog of NCBI NO: 7447393 NR Description: phosphoprotein phosphatase (EC 3.1.3.16) 2A
  misc_feature (1)..(471): Homolog of NCBI NO: 25313492 NR Description: probable protein phosphotase 2a 65K chain - thaliana >gi|9958062|gb|AAG09551.1|AC011810_10 Putative protein
  misc_feature (1)..(465): Homolog of NCBI NO: 15222601 NR Description: phosphoprotein phosphatase 2A, regulatory subunit protein id: At1g25490.1, supported by cDNA: gi_1254995, supported cDNA: gi_1262170 [Arabidopsis thaliana] >gi|25313494|pir||B86385
  misc_feature (1)..(465): Homolog of NCBI NO: 1254996 NR Description: serine/threonine protein phosphatase type 2A
MKETDIVDWFIPVVKRLAAGEWFTARVSSCGLFHIAYPSASDQLKTELRTIYGQLCQDDMPMVRRAAASNLGKFAATVEQNHLKTEIMSIFDDLTQDDQDSVRLLAVEGCAALGKLLEPQDCVAHILPVIVNFSQDKSWRVRYMVANQLYELCEAVGPEPTRADLVPAYVRLLRDNEAEVRIAAAGKVTKFCRILNPQLSVQHILPCVKELSSDSSQHVRSALASVIMGMAPVLGKDATIEQLVPIFLSLLKDEFPDVRLNIISKLDQVNQVIGIDLLSQSLLPAIVELAEDRHWRVRLAIIEYIPLLASQLGVGFFDDKLGALCMQWLEDKVFSIRDAAANNLKRLAEEFGPEWAMQHIIPQVLEKINNPHYLYRMTILQAISLLAPVMGAEITCQKLLPVVINSSKDRVPNIKFNVAKVLQSLVPILDQSVVEKTVKPCLVELSEDPDVDVRYYANQALQACDQMMVSS

SEQ ID NO: 4756 - protein, 412 aa, Zea mays subsp. mays
  peptide (1)..(412): Ceres Seq. ID no. 12344498
  misc_feature (59)..(97): Pfam Name: HEAT repeat Pfam Description: HEAT repeat
  misc_feature (1)..(406): Homolog of NCBI NO: 15222601 NR Description: phosphoprotein phosphatase 2A, regulatory subunit protein id: At1g25490.1, supported by cDNA: gi_1254995, supported cDNA: gi_1262170 [Arabidopsis thaliana] >gi|25313494|pir||B86385
  misc_feature (1)..(412): Homolog of NCBI NO: 5679684 NR Description: phosphatase 2A regulatory A subunit [Oryza >gi|5679686|emb|CAB51804.1| protein phosphatase 2A A subunit
  misc_feature (1)..(412): Homolog of NCBI NO: 1076389 NR Description: phosphoprotein phosphatase 2A 65K regulatory
  misc_feature (1)..(412): Homolog of NCBI NO: 11094367 NR Description: Ser/Thr specific protein phosphatase 2A A
  misc_feature (1)..(411): Homolog of NCBI NO: 7447393 NR Description: phosphoprotein phosphatase (EC 3.1.3.16) 2A
  misc_feature (1)..(412): Homolog of NCBI NO: 25313492 NR Description: probable protein phosphotase 2a 65K chain - thaliana >gi|9958062|gb|AAG09551.1|AC011810_10 Putative protein
  misc_feature (1)..(412): Homolog of NCBI NO: 22329534 NR Description: protein phosphatase 2A regulatory subunit, protein id: At1g13320.1, supported by cDNA: gi_20466587 thaliana] >gi|20466588|gb|AAM20611.1| protein phosphatase 2A
  misc_feature (1)..(412): Homolog of NCBI NO: 11094365 NR Description: Ser/Thr specific protein phosphatase 2A A
  misc_feature (1)..(412): Homolog of NCBI NO: 15230896 NR Description: protein phosphatase 2A 65 kDa regulatory subunit; id: At3g25800.1 [Arabidopsis thaliana] protein phosphotase 2a 65kd regulatory subunit [Arabidopsis
  misc_feature (1)..(406): Homolog of NCBI NO: 1254996 NR Description: serine/threonine protein phosphatase type 2A
MPMVRRAAASNLGKFAATVEQNHLKTEIMSIFDDLTQDDQDSVRLLAVEGCAALGKLLEPQDCVAHILPVIVNFSQDKSWRVRYMVANQLYELCEAVGPEPTRADLVPAYVRLLRDNEAEVRIAAAGKVTKFCRILNPQLSVQHILPCVKELSSDSSQHVRSALASVIMGMAPVLGKDATIEQLVPIFLSLLKDEFPDVRLNIISKLDQVNQVIGIDLLSQSLLPAIVELAEDRHWRVRLAIIEYIPLLASQLGVGFFDDKLGALCMQWLEDKVFSIRDAAANNLKRLAEEFGPEWAMQHIIPQVLEKINNPHYLYRMTILQAISLLAPVMGAEITCQKLLPVVINSSKDRVPNIKFNVAKVLQSLVPILDQSVVEKTVKPCLVELSEDPDVDVRYYANQALQACDQMMVSS

SEQ ID NO: 4757 - DNA, 1638 bp, Zea mays subsp. mays
  misc_feature (1)..(1638): Ceres Seq. ID no. 12344499
  misc_feature: MA Experiment ID: 108543 Result: Up-regulated in Transcription
  misc_feature: MA Experiment ID: 108545 Result: Down-regulated in Transcription
  misc_feature: MA Experiment 108545 PARAMETER Experiment Name: Zm_Imbibed_Seeds_P Parameter: Age (day) Value: 3 vs. 2
  misc_feature: MA Experiment 108545 PARAMETER Experiment Name: Zm_Imbibed_Seeds_P Parameter: Organism Value: Zea mays
  misc_feature: MA Experiment 108545 PARAMETER Experiment Name: Zm_Imbibed_Seeds_P Parameter: Plant Line Value: 35A19
  misc_feature: MA Experiment 108545 PARAMETER Experiment Name: Zm_Imbibed_Seeds_P Parameter: Tissue Value: Aerial vs. Embryo
  misc_feature: MA Experiment ID: 20000492 Result: Down-regulated in Transcription
  misc_feature: MA Experiment 20000492 PARAMETER Experiment Name: Zm_Hybrid_Seed_Dev_P Parameter: DAP Value: 12
  misc_feature: MA Experiment 20000492 PARAMETER Experiment Name: Zm_Hybrid_Seed_Dev_P Parameter: Organism Value: Zea mays
  misc_feature: MA Experiment 20000492 PARAMETER Experiment Name: Zm_Hybrid_Seed_Dev_P Parameter: Plant Line Value: 35A19
  misc_feature: MA Experiment 20000492 PARAMETER Experiment Name: Zm_Hybrid_Seed_Dev_P Parameter: Tissue Value: Fert Kernel vs. Unfert Floret
  misc_feature: MA Experiment ID: 20000535 Result: Down-regulated in Transcription
  misc_feature: MA Experiment 20000535 PARAMETER Experiment Name: Zm_Hybrid_Seed_Dev_P Parameter: DAP Value: 30 vs. 12
  misc_feature: MA Experiment 20000535 PARAMETER Experiment Name: Zm_Hybrid_Seed_Dev_P Parameter: Organism Value: Zea mays
  misc_feature: MA Experiment 20000535 PARAMETER Experiment Name: Zm_Hybrid_Seed_Dev_P Parameter: Plant Line Value: 35A19
  misc_feature: MA Experiment 20000535 PARAMETER Experiment Name: Zm_Hybrid_Seed_Dev_P Parameter: Tissue Value: Embryo vs. Unfert Floret
tgatttctctctgcctgcccagaatcccgccagttgccttccacttccgccagactccgcgttcctcctgagcagctgccgccggcccgagagtggagggggaggcaggcgcccaggcggccaatggggacggggagcgcgacggcggcgcaggccctggcgctcgccgccttgctcctcgcctgctctggcgtcgcagtcgtcacggcgcaggacatcgagcggatccaaggaagtgccggcgacgtgctggaggacgaccccgtcgggcggctcaaggtgtacgtgtacgagctgccccccaagtacaacaagaacgtggtggcgaaggactcgcggtgcctgagccacatgttcgccacggagatcttcatgcaccgcttcctgctggcgagcgcggtccggaccctgaacccggacgaggcggactggttctacaccccggtctacaccacgtgcgacctcacgccgtggggccatcccctcaccgtcaagtccccgcggatgatgaggagcgccatccagtacgtctccaagcgctggccctactggaacaggacggagggggccgaccatttcttcgtcactccacatgactttggagcgtgcttctacttccaggaagagaaggccatccagcgaggtgtcctcccggtgctgcgccgcgctacgctggtccagacgtttgggcagaagaaccatgtctgcctcagggaaggctccatcaccatcccgccatacgctccgcctcacaagataagagctcatatcgtcccgccagagacgcctcggtcgatcttcgtctacttccgcggcctgttctacgacaccgcgaacgaccccgagggtggttactatgcaaggggcgcccgtgcgtcggtgtgggagaacttcaagaacaacgcgctgttcgacatctcgacggagcacccgccgacgtactacgaggacatgcagcgcgccatcttctgcctgtgcccgctgggctgggcgccgtggagcccgcgcctggtggaggccgtggtgttcggctgcatccccgtcatcatcgccgacgacatcgtgctgcccttcgcggacgccatcccgtgggaggagatcgccgtgttcgtgcccgaggacgacgtcctgaggctggacaccatcctcacgtccatccccatggacgagatcctccgcaagcagaggctgctggccaacccgtccatgaagcaggcgatgctgttcccgcagcccgcggagccgagggacgccttccaccaggtcctcaacgggctggcgcgcaagctgccccacgccaaggacgtcttcctcaagcccggccagaaggtgctcaactggacagagggcaccccaggatgacctcaagccgtggtaggccgtggctgctgctcttttggaaacgacacaaccagatcgatgatggtgaggctgatgaatgaacgacacaacaaccattggttaaatgtaaagctcttaatcctcttgctcctccaacctttcttctttttgaggcaatgtgcatgtcttgcctgtatatattacatgacaatcagggtggccggccggggcaagacaagttgaggtgccaacatactaatagtattagtattatattctagcatgtatgttttgacg

SEQ ID NO: 4758 - protein, 412 aa, Zea mays subsp. mays
  peptide (1)..(412): Ceres Seq. ID no. 12344500
  misc_feature (53)..(357): Pfam Name: Exostosin family Pfam Description: Exostosin family
  misc_feature (8)..(412): Homolog of NCBI NO: 34907046 NR Description: contains EST D39982(S1682)~similar to Arabidopsis
  misc_feature (12)..(410): Homolog of NCBI NO: 18642697 NR Description: Unknown protein [Oryza sativa]
  misc_feature (14)..(409): Homolog of NCBI NO: 15223522 NR Description: unknown protein; protein id: At1g27440.1 thaliana] >gi|9802541|gb|AAF99743.1|AC004557_22 F17L21.23
  misc_feature (29)..(409): Homolog of NCBI NO: 18424516 NR Description: putative protein; protein id: At5g61840.1, by cDNA: 34861., supported by cDNA: gi_15809825, supported by gi_17978868 [Arabidopsis thaliana] >gi|15809826|gb|AAL06841.1|
  misc_feature (29)..(409): Homolog of NCBI NO: 21592991 NR Description: unknown [Arabidopsis thaliana]
  misc_feature (77)..(412): Homolog of NCBI NO: 23821292 NR Description: pectin-glucuronyltransferase [Nicotiana
  misc_feature (77)..(409): Homolog of NCBI NO: 10176877 NR Description: gb|AAC80624.1~gene_id:MAC9.17~strong similarity unknown protein [Arabidopsis thaliana]
  misc_feature (51)..(389): Homolog of NCBI NO: 15237173 NR Description: putative protein; protein id: At5g22940.1 thaliana] >gi|10177241|dbj|BAB10615.1|
  misc_feature (43)..(389): Homolog of NCBI NO: 25407954 NR Description: hypothetical protein At2g28110 [imported] - thaliana >gi|4063747|gb|AAC98455.1| hypothetical protein
  misc_feature (50)..(389): Homolog of NCBI NO: 9758008 NR Description: contains similarity to limonene
MGTGSATAAQALALAALLLACSGVAVVTAQDIERIQGSAGDVLEDDPVGRLKVYVYELPPKYNKNVVAKDSRCLSHMFATEIFMHRFLLASAVRTLNPDEADWFYTPVYTTCDLTPWGHPLTVKSPRMMRSAIQYVSKRWPYWNRTEGADHFFVTPHDFGACFYFQEEKAIQRGVLPVLRRATLVQTFGQKNHVCLREGSITIPPYAPPHKIRAHIVPPETPRSIFVYFRGLFYDTANDPEGGYYARGARASVWENFKNNALFDISTEHPPTYYEDMQRAIFCLCPLGWAPWSPRLVEAVVFGCIPVIIADDIVLPFADAIPWEEIAVFVPEDDVLRLDTILTSIPMDEILRKQRLLANPSMKQAMLFPQPAEPRDAFHQVLNGLARKLPHAKDVFLKPGQKVLNWTEGTPG

SEQ ID NO: 4759 - protein, 336 aa, Zea mays subsp. mays
  peptide (1)..(336): Ceres Seq. ID no. 12344501
  misc_feature (1)..(281): Pfam Name: Exostosin family Pfam Description: Exostosin family
  misc_feature (1)..(336): Homolog of NCBI NO: 34907046 NR Description: contains EST D39982(S1682)~similar to Arabidopsis
  misc_feature (1)..(334): Homolog of NCBI NO: 18642697 NR Description: Unknown protein [Oryza sativa]
  misc_feature (1)..(333): Homolog of NCBI NO: 15223522 NR Description: unknown protein; protein id: At1g27440.1 thaliana] >gi|9802541|gb|AAF99743.1|AC004557_22 F17L21.23
  misc_feature (1)..(333): Homolog of NCBI NO: 18424516 NR Description: putative protein; protein id: At5g61840.1, by cDNA: 34861., supported by cDNA: gi_15809825, supported by gi_17978868 [Arabidopsis thaliana] >gi|15809826|gb|AAL06841.1|
  misc_feature (1)..(333): Homolog of NCBI NO: 21592991 NR Description: unknown [Arabidopsis thaliana]
  misc_feature (1)..(336): Homolog of NCBI NO: 23821292 NR Description: pectin-glucuronyltransferase [Nicotiana
  misc_feature (1)..(333): Homolog of NCBI NO: 10176877 NR Description: gb|AAC80624.1~gene_id:MAC9.17~strong similarity unknown protein [Arabidopsis thaliana]
  misc_feature (1)..(313): Homolog of NCBI NO: 15237173 NR Description: putative protein; protein id: At5g22940.1 thaliana] >gi|10177241|dbj|BAB10615.1|
  misc_feature (1)..(313): Homolog of NCBI NO: 25407954 NR Description: hypothetical protein At2g28110 [imported] - thaliana >gi|4063747|gb|AAC98455.1| hypothetical protein
  misc_feature (1)..(313): Homolog of NCBI NO: 9758008 NR Description: contains similarity to limonene
MFATEIFMHRFLLASAVRTLNPDEADWFYTPVYTTCDLTPWGHPLTVKSPRMMRSAIQYVSKRWPYWNRTEGADHFFVTPHDFGACFYFQEEKAIQRGVLPVLRRATLVQTFGQKNHVCLREGSITIPPYAPPHKIRAHIVPPETPRSIFVYFRGLFYDTANDPEGGYYARGARASVWENFKNNALFDISTEHPPTYYEDMQRAIFCLCPLGWAPWSPRLVEAVVFGCIPVIIADDIVLPFADAIPWEEIAVFVPEDDVLRLDTILTSIPMDEILRKQRLLANPSMKQAMLFPQPAEPRDAFHQVLNGLARKLPHAKDVFLKPGQKVLNWTEGTPG

SEQ ID NO: 4760 - protein, 329 aa, Zea mays subsp. mays
  peptide (1)..(329): Ceres Seq. ID no. 12344502
  misc_feature (1)..(274): Pfam Name: Exostosin family Pfam Description: Exostosin family
  misc_feature (1)..(329): Homolog of NCBI NO: 34907046 NR Description: contains EST D39982(S1682)~similar to Arabidopsis
  misc_feature (1)..(327): Homolog of NCBI NO: 18642697 NR Description: Unknown protein [Oryza sativa]
  misc_feature (1)..(326): Homolog of NCBI NO: 15223522 NR Description: unknown protein; protein id: At1g27440.1 thaliana] >gi|9802541|gb|AAF99743.1|AC004557_22 F17L21.23
  misc_feature (1)..(326): Homolog of NCBI NO: 18424516 NR Description: putative protein; protein id: At5g61840.1, by cDNA: 34861., supported by cDNA: gi_15809825, supported by gi_17978868 [Arabidopsis thaliana] >gi|15809826|gb|AAL06841.1|
  misc_feature (1)..(326): Homolog of NCBI NO: 21592991 NR Description: unknown [Arabidopsis thaliana]
  misc_feature (1)..(329): Homolog of NCBI NO: 23821292 NR Description: pectin-glucuronyltransferase [Nicotiana
  misc_feature (1)..(326): Homolog of NCBI NO: 10176877 NR Description: gb|AAC80624.1~gene_id:MAC9.17~strong similarity unknown protein [Arabidopsis thaliana]
  misc_feature (1)..(306): Homolog of NCBI NO: 15237173 NR Description: putative protein; protein id: At5g22940.1 thaliana] >gi|10177241|dbj|BAB10615.1|
  misc_feature (1)..(306): Homolog of NCBI NO: 25407954 NR Description: hypothetical protein At2g28110 [imported] - thaliana >gi|4063747|gb|AAC98455.1| hypothetical protein
  misc_feature (1)..(306): Homolog of NCBI NO: 9758008 NR Description: contains similarity to limonene
MHRFLLASAVRTLNPDEADWFYTPVYTTCDLTPWGHPLTVKSPRMMRSAIQYVSKRWPYWNRTEGADHFFVTPHDFGACFYFQEEKAIQRGVLPVLRRATLVQTFGQKNHVCLREGSITIPPYAPPHKIRAHIVPPETPRSIFVYFRGLFYDTANDPEGGYYARGARASVWENFKNNALFDISTEHPPTYYEDMQRAIFCLCPLGWAPWSPRLVEAVVFGCIPVIIADDIVLPFADAIPWEEIAVFVPEDDVLRLDTILTSIPMDEILRKQRLLANPSMKQAMLFPQPAEPRDAFHQVLNGLARKLPHAKDVFLKPGQKVLNWTEGTPG

SEQ ID NO: 4761 - DNA, 1417 bp, Zea mays subsp. mays
  misc_feature (1)..(1417): Ceres Seq. ID no. 12352296
  misc_feature: MA Experiment ID: 108535 Result: Up-regulated in Transcription
  misc_feature: MA Experiment 108535 PARAMETER Experiment Name: Zm_Meristem_P Parameter: Age (day) Value: 8
  misc_feature: MA Experiment 108535 PARAMETER Experiment Name: Zm_Meristem_P Parameter: Organism Value: Zea mays
  misc_feature: MA Experiment 108535 PARAMETER Experiment Name: Zm_Meristem_P Parameter: Plant Line Value: 35A19
  misc_feature: MA Experiment 108535 PARAMETER Experiment Name: Zm_Meristem_P Parameter: Tissue Value: Root Meristem vs. Above Root Meristem
  misc_feature: MA Experiment ID: 108544 Result: Down-regulated in Transcription
  misc_feature: MA Experiment ID: 108545 Result: Down-regulated in Transcription
  misc_feature: MA Experiment 108545 PARAMETER Experiment Name: Zm_Imbibed_Seeds_P Parameter: Age (day) Value: 3 vs. 2
  misc_feature: MA Experiment 108545 PARAMETER Experiment Name: Zm_Imbibed_Seeds_P Parameter: Organism Value: Zea mays
  misc_feature: MA Experiment 108545 PARAMETER Experiment Name: Zm_Imbibed_Seeds_P Parameter: Plant Line Value: 35A19
  misc_feature: MA Experiment 108545 PARAMETER Experiment Name: Zm_Imbibed_Seeds_P Parameter: Tissue Value: Aerial vs. Embryo
  misc_feature: MA Experiment ID: 20000626 Result: Up-regulated in Transcription
  misc_feature: MA Experiment 20000626 PARAMETER Experiment Name: Zm_Herbicide-Treatments_P Parameter: Timepoint (hr) Value: 12
  misc_feature: MA Experiment 20000626 PARAMETER Experiment Name: Zm_Herbicide-Treatments_P Parameter: Tissue Value: Aerial
  misc_feature: MA Experiment 20000626 PARAMETER Experiment Name: Zm_Herbicide-Treatments_P Parameter: Treatment Value: Roundup vs. No Treatment
accgcgcgtgtaggcattctacgagcagctcggtcttgtcgttggagagatgaagaagaacaccatgagggatttcttgggtttcttgttcggagtagctgccgcggcggcctgcttcggcctgctcctgctgcatgttccatgcccccgtggcctcttgcccgcacagcaaggcctcatcatcttgggtaggagtactactaacggaacaaactctgatcccactcccagcaccaagaaacctggcatcgtatgtgcacagatttcactccaaaaatgattccgatcctatgttaccatacgcgcgttgatctccaattggtcaccctgcactggttctggtttcatatattgcatattcactggtttaatcagtcaccttcttctattttctcttaataaacaggcccctgctccagctccaggtgacgacaagctggaggcgctgctgaggcgagcgtccatggccgaccttgacaagaccgtcatactaaccttcgcgagccaagcgtggacggctccgggctcactccaggacctcttgctccagagcttccgcctgggcgtggggacggagccccttctcaagcacttggtcatcgtcgccgacggcgccaaggcgtacgaacagtgccagctcgtgcacccgctctgctaccacctcgaagccggcggcgtcgactacgccgcacagcaatcgtacatggccaagggctacctcgagatcgtgtggcgcaagttcctgtcccaggcccgggtcctcaacctcggctacagcttcgtcttcaccgacatggacatcatctggctgcggaacccgctgctgcgcatccccatcggcgccgacctggccatgtcgtgcgacaagtactacggcgacaacccctacgacctcgacaagctggccaacaccgggttcatgtacgtgaaggcgagccccaggatggtggccttctacgagagctggtacaaggcgcggctgtcctaccggtacacgcacgagcagtatgtgttccagcaggtgaaggacaagctgccggcgcagcacggcatacgggtgcagttcgtggacacggcgtacttcaccggcttctgtcagctacgcaaggattttaacaaggtatgcacggtgcatgcgaactgcctcgtcgggctcaagtccaagcaggagaagctcactcaagtcttagacgagtggaaggagttcaagaagaaggctgctttgctaggcagcaataccactactgccctaactcactgaacaattaacatcttcactgggggcggatctatctaggaaaagtgtagttgtttaaagccattctacgtttttaaacatatatagatgaataattcaaaatacagcataagatgcaatttttcaatacaaataaactaatagttcttctgtggcgct

SEQ ID NO: 4762 - protein, 265 aa, Zea mays subsp. mays
  peptide (1)..(265): Ceres Seq. ID no. 12352297
  misc_feature (1)..(248): Homolog of NCBI NO: 34897442 NR Description: putative regulatory protein [Oryza sativa
  misc_feature (1)..(260): Homolog of NCBI NO: 15235236 NR Description: hypothetical protein common family; protein id:
  misc_feature (1)..(253): Homolog of NCBI NO: 34904674 NR Description: P0446G09.1 [Oryza sativa (japonica >gi|28564589|dbj|BAC57756.1| putative regulatory protein [Oryza
  misc_feature (1)..(248): Homolog of NCBI NO: 21536907 NR Description: regulatory protein [Arabidopsis thaliana]
  misc_feature (1)..(264): Homolog of NCBI NO: 18395292 NR Description: unknown protein; protein id: At2g02060.1
  misc_feature (1)..(250): Homolog of NCBI NO: 34897440 NR Description: putative regulatory protein [Oryza sativa
  misc_feature (1)..(248): Homolog of NCBI NO: 38344278 NR Description: OSJNBa0013K16.10 [Oryza sativa (japonica
  misc_feature (1)..(250): Homolog of NCBI NO: 19386737 NR Description: P0678F11.26 [Oryza sativa (japonica
  misc_feature (5)..(252): Homolog of NCBI NO: 19386738 NR Description: P0678F11.28 [Oryza sativa (japonica
  misc_feature (1)..(248): Homolog of NCBI NO: 15235236 NR Description: hypothetical protein common family; protein id:
MADLDKTVILTFASQAWTAPGSLQDLLLQSFRLGVGTEPLLKHLVIVADGAKAYEQCQLVHPLCYHLEAGGVDYAAQQSYMAKGYLEIVWRKFLSQARVLNLGYSFVFTDMDIIWLRNPLLRIPIGADLAMSCDKYYGDNPYDLDKLANTGFMYVKASPRMVAFYESWYKARLSYRYTHEQYVFQQVKDKLPAQHGIRVQFVDTAYFTGFCQLRKDFNKVCTVHANCLVGLKSKQEKLTQVLDEWKEFKKKAALLGSNTTTALTH

SEQ ID NO: 4763 - protein, 185 aa, Zea mays subsp. mays
  peptide (1)..(185): Ceres Seq. ID no. 12352298
  misc_feature (1)..(168): Homolog of NCBI NO: 34897442 NR Description: putative regulatory protein [Oryza sativa
  misc_feature (1)..(180): Homolog of NCBI NO: 15235236 NR Description: hypothetical protein common family; protein id:
  misc_feature (1)..(173): Homolog of NCBI NO: 34904674 NR Description: P0446G09.1 [Oryza sativa (japonica >gi|28564589|dbj|BAC57756.1| putative regulatory protein [Oryza
  misc_feature (1)..(168): Homolog of NCBI NO: 21536907 NR Description: regulatory protein [Arabidopsis thaliana]
  misc_feature (1)..(184): Homolog of NCBI NO: 18395292 NR Description: unknown protein; protein id: At2g02060.1
  misc_feature (1)..(170): Homolog of NCBI NO: 34897440 NR Description: putative regulatory protein [Oryza sativa
  misc_feature (1)..(168): Homolog of NCBI NO: 38344278 NR Description: OSJNBa0013K16.10 [Oryza sativa (japonica
  misc_feature (1)..(170): Homolog of NCBI NO: 19386737 NR Description: P0678F11.26 [Oryza sativa (japonica
  misc_feature (1)..(172): Homolog of NCBI NO: 19386738 NR Description: P0678F11.28 [Oryza sativa (japonica
  misc_feature (1)..(168): Homolog of NCBI NO: 15235236 NR Description: hypothetical protein common family; protein id:
MAKGYLEIVWRKFLSQARVLNLGYSFVFTDMDIIWLRNPLLRIPIGADLAMSCDKYYGDNPYDLDKLANTGFMYVKASPRMVAFYESWYKARLSYRYTHEQYVFQQVKDKLPAQHGIRVQFVDTAYFTGFCQLRKDFNKVCTVHANCLVGLKSKQEKLTQVLDEWKEFKKKAALLGSNTTTALTH

SEQ ID NO: 4764 - protein, 155 aa, Zea mays subsp. mays
  peptide (1)..(155): Ceres Seq. ID no. 12352299
  misc_feature (1)..(138): Homolog of NCBI NO: 34897442 NR Description: putative regulatory protein [Oryza sativa
  misc_feature (1)..(150): Homolog of NCBI NO: 15235236 NR Description: hypothetical protein common family; protein id:
  misc_feature (1)..(143): Homolog of NCBI NO: 34904674 NR Description: P0446G09.1 [Oryza sativa (japonica >gi|28564589|dbj|BAC57756.1| putative regulatory protein [Oryza
  misc_feature (1)..(138): Homolog of NCBI NO: 21536907 NR Description: regulatory protein [Arabidopsis thaliana]
  misc_feature (1)..(154): Homolog of NCBI NO: 18395292 NR Description: unknown protein; protein id: At2g02060.1
  misc_feature (1)..(140): Homolog of NCBI NO: 34897440 NR Description: putative regulatory protein [Oryza sativa
  misc_feature (1)..(138): Homolog of NCBI NO: 38344278 NR Description: OSJNBa0013K16.10 [Oryza sativa (japonica
  misc_feature (1)..(140): Homolog of NCBI NO: 19386737 NR Description: P0678F11.26 [Oryza sativa (japonica
  misc_feature (1)..(142): Homolog of NCBI NO: 19386738 NR Description: P0678F11.28 [Oryza sativa (japonica
  misc_feature (1)..(138): Homolog of NCBI NO: 15235236 NR Description: hypothetical protein common family; protein id:
MDIIWLRNPLLRIPIGADLAMSCDKYYGDNPYDLDKLANTGFMYVKASPRMVAFYESWYKARLSYRYTHEQYVFQQVKDKLPAQHGIRVQFVDTAYFTGFCQLRKDFNKVCTVHANCLVGLKSKQEKLTQVLDEWKEFKKKAALLGSNTTTALTH

SEQ ID NO: 4765 - DNA, 1500 bp, Zea mays subsp. mays
  misc_feature (1)..(1500): Ceres Seq. ID no. 12405643
  misc_feature: MA Experiment ID: 108523 Result: Down-regulated in Transcription
  misc_feature: MA Experiment 108523 PARAMETER Experiment Name: Zm_42deg_Heat_P Parameter: Age (day) Value: 8
  misc_feature: MA Experiment 108523 PARAMETER Experiment Name: Zm_42deg_Heat_P Parameter: Organism Value: Zea mays
  misc_feature: MA Experiment 108523 PARAMETER Experiment Name: Zm_42deg_Heat_P Parameter: Plant Line Value: 35A19
  misc_feature: MA Experiment 108523 PARAMETER Experiment Name: Zm_42deg_Heat_P Parameter: Temperature (deg C) Value: 42 vs. 22
  misc_feature: MA Experiment 108523 PARAMETER Experiment Name: Zm_42deg_Heat_P Parameter: Timepoint (hr) Value: 6
  misc_feature: MA Experiment 108523 PARAMETER Experiment Name: Zm_42deg_Heat_P Parameter: Tissue Value: Aerial
  misc_feature: MA Experiment ID: 108527 Result: Down-regulated in Transcription
  misc_feature: MA Experiment 108527 PARAMETER Experiment Name: Zm_5mM_NO_P Parameter: Age (day) Value: 8
  misc_feature: MA Experiment 108527 PARAMETER Experiment Name: Zm_5mM_NO_P Parameter: Organism Value: Zea mays
  misc_feature: MA Experiment 108527 PARAMETER Experiment Name: Zm_5mM_NO_P Parameter: Plant Line Value: 35A19
  misc_feature: MA Experiment 108527 PARAMETER Experiment Name: Zm_5mM_NO_P Parameter: Timepoint (hr) Value: 6
  misc_feature: MA Experiment 108527 PARAMETER Experiment Name: Zm_5mM_NO_P Parameter: Tissue Value: Aerial
  misc_feature: MA Experiment 108527 PARAMETER Experiment Name: Zm_5mM_NO_P Parameter: Treatment Value: 5mM NO vs. No Treatment
  misc_feature: MA Experiment ID: 108534 Result: Down-regulated in Transcription
  misc_feature: MA Experiment 108534 PARAMETER Experiment Name: Zm_4deg_Cold_P Parameter: Age (hr) Value: 8
  misc_feature: MA Experiment 108534 PARAMETER Experiment Name: Zm_4deg_Cold_P Parameter: Organism Value: Zea mays
  misc_feature: MA Experiment 108534 PARAMETER Experiment Name: Zm_4deg_Cold_P Parameter: Plant Line Value: 35A19
  misc_feature: MA Experiment 108534 PARAMETER Experiment Name: Zm_4deg_Cold_P Parameter: Temperature (deg C) Value: 4 vs. 22
  misc_feature: MA Experiment 108534 PARAMETER Experiment Name: Zm_4deg_Cold_P Parameter: Timepoint (hr) Value: 6
  misc_feature: MA Experiment 108534 PARAMETER Experiment Name: Zm_4deg_Cold_P Parameter: Tissue Value: Aerial
  misc_feature: MA Experiment ID: 108544 Result: Down-regulated in Transcription
  misc_feature: MA Experiment ID: 108559 Result: Down-regulated in Transcription
  misc_feature: MA Experiment 108559 PARAMETER Experiment Name: Zm_5mM_NO_P Parameter: Age (day) Value: 8
  misc_feature: MA Experiment 108559 PARAMETER Experiment Name: Zm_5mM_NO_P Parameter: Organism Value: Zea mays
  misc_feature: MA Experiment 108559 PARAMETER Experiment Name: Zm_5mM_NO_P Parameter: Plant Line Value: 35A19
  misc_feature: MA Experiment 108559 PARAMETER Experiment Name: Zm_5mM_NO_P Parameter: Timepoint (hr) Value: 12
  misc_feature: MA Experiment 108559 PARAMETER Experiment Name: Zm_5mM_NO_P Parameter: Tissue Value: Aerial
  misc_feature: MA Experiment 108559 PARAMETER Experiment Name: Zm_5mM_NO_P Parameter: Treatment Value: 5mM NO vs. No Treatment
  misc_feature: MA Experiment ID: 108687 Result: Down-regulated in Transcription
  misc_feature: MA Experiment 108687 PARAMETER Experiment Name: Zm_Embryos-Flowers__P Parameter: Tissue Value: Embryo vs. Aerial+
  misc_feature: MA Experiment ID: 20000478 Result: Down-regulated in Transcription
  misc_feature: MA Experiment 20000478 PARAMETER Experiment Name: Zm_5mM_SA_P Parameter: Age (day) Value: 11
  misc_feature: MA Experiment 20000478 PARAMETER Experiment Name: Zm_5mM_SA_P Parameter: Organism Value: Zea mays
  misc_feature: MA Experiment 20000478 PARAMETER Experiment Name: Zm_5mM_SA_P Parameter: Plant Line Value: 35A19
  misc_feature: MA Experiment 20000478 PARAMETER Experiment Name: Zm_5mM_SA_P Parameter: Timepoint (hr) Value: 72
  misc_feature: MA Experiment 20000478 PARAMETER Experiment Name: Zm_5mM_SA_P Parameter: Tissue Value: Aerial
  misc_feature: MA Experiment 20000478 PARAMETER Experiment Name: Zm_5mM_SA_P Parameter: Treatment Value: 5mM SA vs. No Treatment
  misc_feature: MA Experiment ID: 20000492 Result: Up-regulated in Transcription
  misc_feature: MA Experiment 20000492 PARAMETER Experiment Name: Zm_Hybrid_Seed_Dev_P Parameter: DAP Value: 12
  misc_feature: MA Experiment 20000492 PARAMETER Experiment Name: Zm_Hybrid_Seed_Dev_P Parameter: Organism Value: Zea mays
  misc_feature: MA Experiment 20000492 PARAMETER Experiment Name: Zm_Hybrid_Seed_Dev_P Parameter: Plant Line Value: 35A19
  misc_feature: MA Experiment 20000492 PARAMETER Experiment Name: Zm_Hybrid_Seed_Dev_P Parameter: Tissue Value: Fert Kernel vs. Unfert Floret
  misc_feature: MA Experiment ID: 20000632 Result: Down-regulated in Transcription
  misc_feature: MA Experiment 20000632 PARAMETER Experiment Name: Zm_Herbicide-Treatments_P Parameter: Timepoint (hr) Value: 4
  misc_feature: MA Experiment 20000632 PARAMETER Experiment Name: Zm_Herbicide-Treatments_P Parameter: Tissue Value: Aerial
  misc_feature: MA Experiment 20000632 PARAMETER Experiment Name: Zm_Herbicide-Treatments_P Parameter: Treatment Value: Glean vs. No Treatment
  misc_feature: MA Experiment ID: 20000633 Result: Down-regulated in Transcription
  misc_feature: MA Experiment 20000633 PARAMETER Experiment Name: Zm_Herbicide-Treatments_P Parameter: Timepoint (hr) Value: 4
  misc_feature: MA Experiment 20000633 PARAMETER Experiment Name: Zm_Herbicide-Treatments_P Parameter: Tissue Value: Aerial
  misc_feature: MA Experiment 20000633 PARAMETER Experiment Name: Zm_Herbicide-Treatments_P Parameter: Treatment Value: Trimec vs. No Treatment
taagagagaaaaggaagagagatggagatgacgatgccatggatgtttcagaaaatggccatggcgattcttcattctgcaagaagccgaaggaaggtgatgttcatgtctcttccagttcaactgaagtggtaggaaccattccagagatgaatggaggcgatcatcatatacctggaagctccttttcatgtctagtgaagatctatgacatgcctgatagtcaagtgaaattaaatgatgttattgagtttattggcgtatatacatttgacccagaacttgctgctcctagtgacaacccagatgatataatgttagacctcatcgaagatgtaacagttcagttgcctccgagcaaggtgccacgtcttcactgtttggtatggagaaaattatcattccatgattttatttcaaggcctgttgttgagccttcacccagcctgttaagaggcattcggcaatctttgctctcacacctcacccttgtattaggcaatgacgagcttgcagcccagtgcttgctgttgcatcttctatccagacttcgtaatagggtggatgtggtcaccgttggcagactctccttgaatttcactggcttcaacagggaaagtgcttccatatttgggaatcagctgtattctttgatccagaaattggtgccgtattcacaagccatacctctgtcaattgagtatctcaacacagctacacttcaacctagaaaggacaacaagtcaggaaggttggtcacaggagttctgcagctacctcaaggcactcatctgatctttgatgagactcttctgcagacaggatcattgacatccaaaggtgtggagaataccatgctgctcaagaacctgatggagtcgcagaaggttgactacgattttgagtactacaagctggaaatggcagctgatgtgcagctactcactctctctgaggggaaatcaaacatccttccttcagatttggtagtgcctttccggccatcctctgttcccacaattaatgcaggtgctgaggaaactgagagctggaggtggtttttgaccacagtaaggtctcttcctcagtccactgaacctgaaacttaccagatgattcaggatgaaatggtcagtgccatgcgtgatgataggagcttgggttgttctgaacttagcagatggctaacaatggcacaaataatggcctccagctttggcgagaagagtctttctttggagcactggcagatggtgaaggagcttgagaggcttagaaagcagaggatgcaatgagatgacttaccattagcatgtgtttttgcactctaattgtttatgttggtatgctgttatgtgtatagtactagacgtttgaatcaagacatggatccaagtcatttctgtaacaactgacaacttctatgatcgtatgcatgtgtatctgctgcgcattttctttgctcaaatttgagatttactctgggagctatggaatgcc

SEQ ID NO: 4766 - protein, 430 aa, Zea mays subsp. mays
  peptide (1)..(430): Ceres Seq. ID no. 12405644
  misc_feature (68)..(430): Homolog of NCBI NO: 34896132 NR Description: P0701D05.20 [Oryza sativa (japonica >gi|13486663|dbj|BAB39900.1| contains ESTs to Arabidopsis thaliana chromosome 2, At2g40550~unknown protein
  misc_feature (146)..(430): Homolog of NCBI NO: 15226711 NR Description: hypothetical protein; protein id: At2g40550.1
  misc_feature (1)..(123): Homolog of NCBI NO: 15226711 NR Description: hypothetical protein; protein id: At2g40550.1
  misc_feature (3)..(430): Homolog of NCBI NO: 27882367 NR Description: Similar to hypothetical protein FLJ13081 [Danio
  misc_feature (21)..(430): Homolog of NCBI NO: 13278834 NR Description: Unknown (protein for MGC:2809) [Homo sapiens]
  misc_feature (57)..(430): Homolog of NCBI NO: 34859388 NR Description: similar to cDNA sequence BC025641 [Rattus
  misc_feature (2)..(430): Homolog of NCBI NO: 18129620 NR Description: CG3430-PA [Drosophila melanogaster]
  misc_feature (107)..(430): Homolog of NCBI NO: 22122389 NR Description: cDNA sequence BC025641; hypothetical protein [Mus musculus] >gi|19343665|gb|AAH25641.1| Similar to protein FLJ13081 [Mus musculus] >gi|23468364|gb|AAH38342.1|
  misc_feature (107)..(430): Homolog of NCBI NO: 13376243 NR Description: hypothetical protein FLJ13081 [Homo sapiens]
  misc_feature (1)..(430): Homolog of NCBI NO: 27769126 NR Description: Similar to hypothetical protein FLJ13081 [Xenopus
REKRKRDGDDDAMDVSENGHGDSSFCKKPKEGDVHVSSSSTEVVGTIPEMNGGDHHIPGSSFSCLVKIYDMPDSQVKLNDVIEFIGVYTFDPELAAPSDNPDDIMLDLIEDVTVQLPPSKVPRLHCLVWRKLSFHDFISRPVVEPSPSLLRGIRQSLLSHLTLVLGNDELAAQCLLLHLLSRLRNRVDVVTVGRLSLNFTGFNRESASIFGNQLYSLIQKLVPYSQAIPLSIEYLNTATLQPRKDNKSGRLVTGVLQLPQGTHLIFDETLLQTGSLTSKGVENTMLLKNLMESQKVDYDFEYYKLEMAADVQLLTLSEGKSNILPSDLVVPFRPSSVPTINAGAEETESWRWFLTTVRSLPQSTEPETYQMIQDEMVSAMRDDRSLGCSELSRWLTMAQIMASSFGEKSLSLEHWQMVKELERLRKQRMQ

SEQ ID NO: 4767 - protein, 418 aa, Zea mays subsp. mays
  peptide (1)..(418): Ceres Seq. ID no. 12405645
  misc_feature (56)..(418): Homolog of NCBI NO: 34896132 NR Description: P0701D05.20 [Oryza sativa (japonica >gi|13486663|dbj|BAB39900.1| contains ESTs to Arabidopsis thaliana chromosome 2, At2g40550~unknown protein
  misc_feature (134)..(418): Homolog of NCBI NO: 15226711 NR Description: hypothetical protein; protein id: At2g40550.1
  misc_feature (1)..(111): Homolog of NCBI NO: 15226711 NR Description: hypothetical protein; protein id: At2g40550.1
  misc_feature (1)..(418): Homolog of NCBI NO: 27882367 NR Description: Similar to hypothetical protein FLJ13081 [Danio
  misc_feature (9)..(418): Homolog of NCBI NO: 13278834 NR Description: Unknown (protein for MGC:2809) [Homo sapiens]
  misc_feature (45)..(418): Homolog of NCBI NO: 34859388 NR Description: similar to cDNA sequence BC025641 [Rattus
  misc_feature (1)..(418): Homolog of NCBI NO: 18129620 NR Description: CG3430-PA [Drosophila melanogaster]
  misc_feature (95)..(418): Homolog of NCBI NO: 22122389 NR Description: cDNA sequence BC025641; hypothetical protein [Mus musculus] >gi|19343665|gb|AAH25641.1| Similar to protein FLJ13081 [Mus musculus] >gi|23468364|gb|AAH38342.1|
  misc_feature (95)..(418): Homolog of NCBI NO: 13376243 NR Description: hypothetical protein FLJ13081 [Homo sapiens]
  misc_feature (1)..(418): Homolog of NCBI NO: 27769126 NR Description: Similar to hypothetical protein FLJ13081 [Xenopus
MDVSENGHGDSSFCKKPKEGDVHVSSSSTEVVGTIPEMNGGDHHIPGSSFSCLVKIYDMPDSQVKLNDVIEFIGVYTFDPELAAPSDNPDDIMLDLIEDVTVQLPPSKVPRLHCLVWRKLSFHDFISRPVVEPSPSLLRGIRQSLLSHLTLVLGNDELAAQCLLLHLLSRLRNRVDVVTVGRLSLNFTGFNRESASIFGNQLYSLIQKLVPYSQAIPLSIEYLNTATLQPRKDNKSGRLVTGVLQLPQGTHLIFDETLLQTGSLTSKGVENTMLLKNLMESQKVDYDFEYYKLEMAADVQLLTLSEGKSNILPSDLVVPFRPSSVPTINAGAEETESWRWFLTTVRSLPQSTEPETYQMIQDEMVSAMRDDRSLGCSELSRWLTMAQIMASSFGEKSLSLEHWQMVKELERLRKQRMQ

SEQ ID NO: 4768 - protein, 381 aa, Zea mays subsp. mays
  peptide (1)..(381): Ceres Seq. ID no. 12405646
  misc_feature (19)..(381): Homolog of NCBI NO: 34896132 NR Description: P0701D05.20 [Oryza sativa (japonica >gi|13486663|dbj|BAB39900.1| contains ESTs to Arabidopsis thaliana chromosome 2, At2g40550~unknown protein
  misc_feature (97)..(381): Homolog of NCBI NO: 15226711 NR Description: hypothetical protein; protein id: At2g40550.1
  misc_feature (1)..(74): Homolog of NCBI NO: 15226711 NR Description: hypothetical protein; protein id: At2g40550.1
  misc_feature (1)..(381): Homolog of NCBI NO: 27882367 NR Description: Similar to hypothetical protein FLJ13081 [Danio
  misc_feature (1)..(381): Homolog of NCBI NO: 13278834 NR Description: Unknown (protein for MGC:2809) [Homo sapiens]
  misc_feature (8)..(381): Homolog of NCBI NO: 34859388 NR Description: similar to cDNA sequence BC025641 [Rattus
  misc_feature (1)..(381): Homolog of NCBI NO: 18129620 NR Description: CG3430-PA [Drosophila melanogaster]
  misc_feature (58)..(381): Homolog of NCBI NO: 22122389 NR Description: cDNA sequence BC025641; hypothetical protein [Mus musculus] >gi|19343665|gb|AAH25641.1| Similar to protein FLJ13081 [Mus musculus] >gi|23468364|gb|AAH38342.1|
  misc_feature (58)..(381): Homolog of NCBI NO: 13376243 NR Description: hypothetical protein FLJ13081 [Homo sapiens]
  misc_feature (1)..(381): Homolog of NCBI NO: 27769126 NR Description: Similar to hypothetical protein FLJ13081 [Xenopus
MNGGDHHIPGSSFSCLVKIYDMPDSQVKLNDVIEFIGVYTFDPELAAPSDNPDDIMLDLIEDVTVQLPPSKVPRLHCLVWRKLSFHDFISRPVVEPSPSLLRGIRQSLLSHLTLVLGNDELAAQCLLLHLLSRLRNRVDVVTVGRLSLNFTGFNRESASIFGNQLYSLIQKLVPYSQAIPLSIEYLNTATLQPRKDNKSGRLVTGVLQLPQGTHLIFDETLLQTGSLTSKGVENTMLLKNLMESQKVDYDFEYYKLEMAADVQLLTLSEGKSNILPSDLVVPFRPSSVPTINAGAEETESWRWFLTTVRSLPQSTEPETYQMIQDEMVSAMRDDRSLGCSELSRWLTMAQIMASSFGEKSLSLEHWQMVKELERLRKQRMQ

SEQ ID NO: 4769 - DNA, 908 bp, Zea mays subsp. mays
  misc_feature (1)..(908): Ceres Seq. ID no. 12366814
  misc_feature: MA Experiment ID: 108528 Result: Up-regulated in Transcription
  misc_feature: MA Experiment 108528 PARAMETER Experiment Name: Zm_Imbibed_Seeds_P Parameter: Age (day) Value: 5 vs. 2
  misc_feature: MA Experiment 108528 PARAMETER Experiment Name: Zm_Imbibed_Seeds_P Parameter: Organism Value: Zea mays
  misc_feature: MA Experiment 108528 PARAMETER Experiment Name: Zm_Imbibed_Seeds_P Parameter: Plant Line Value: 35A19
  misc_feature: MA Experiment 108528 PARAMETER Experiment Name: Zm_Imbibed_Seeds_P Parameter: Tissue Value: Aerial vs. Embryo
  misc_feature: MA Experiment ID: 108529 Result: Down-regulated in Transcription
  misc_feature: MA Experiment 108529 PARAMETER Experiment Name: Zm_Imbibed_Seeds_P Parameter: Age (day) Value: 5 vs. 2
  misc_feature: MA Experiment 108529 PARAMETER Experiment Name: Zm_Imbibed_Seeds_P Parameter: Organism Value: Zea mays
  misc_feature: MA Experiment 108529 PARAMETER Experiment Name: Zm_Imbibed_Seeds_P Parameter: Plant Line Value: 35A19
  misc_feature: MA Experiment 108529 PARAMETER Experiment Name: Zm_Imbibed_Seeds_P Parameter: Tissue Value: Roots vs. Embryo
  misc_feature: MA Experiment ID: 108530 Result: Up-regulated in Transcription
  misc_feature: MA Experiment 108530 PARAMETER Experiment Name: Zm_Imbibed_Seeds_P Parameter: Age (day) Value: 6 vs. 2
  misc_feature: MA Experiment 108530 PARAMETER Experiment Name: Zm_Imbibed_Seeds_P Parameter: Organism Value: Zea mays
  misc_feature: MA Experiment 108530 PARAMETER Experiment Name: Zm_Imbibed_Seeds_P Parameter: Plant Line Value: 35A19
  misc_feature: MA Experiment 108530 PARAMETER Experiment Name: Zm_Imbibed_Seeds_P Parameter: Tissue Value: Aerial vs. Embryo
  misc_feature: MA Experiment ID: 108535 Result: Down-regulated in Transcription
  misc_feature: MA Experiment 108535 PARAMETER Experiment Name: Zm_Meristem_P Parameter: Age (day) Value: 8
  misc_feature: MA Experiment 108535 PARAMETER Experiment Name: Zm_Meristem_P Parameter: Organism Value: Zea mays
  misc_feature: MA Experiment 108535 PARAMETER Experiment Name: Zm_Meristem_P Parameter: Plant Line Value: 35A19
  misc_feature: MA Experiment 108535 PARAMETER Experiment Name: Zm_Meristem_P Parameter: Tissue Value: Root Meristem vs. Above Root Meristem
  misc_feature: MA Experiment ID: 108544 Result: Down-regulated in Transcription
  misc_feature: MA Experiment ID: 108545 Result: Up-regulated in Transcription
  misc_feature: MA Experiment 108545 PARAMETER Experiment Name: Zm_Imbibed_Seeds_P Parameter: Age (day) Value: 3 vs. 2
  misc_feature: MA Experiment 108545 PARAMETER Experiment Name: Zm_Imbibed_Seeds_P Parameter: Organism Value: Zea mays
  misc_feature: MA Experiment 108545 PARAMETER Experiment Name: Zm_Imbibed_Seeds_P Parameter: Plant Line Value: 35A19
  misc_feature: MA Experiment 108545 PARAMETER Experiment Name: Zm_Imbibed_Seeds_P Parameter: Tissue Value: Aerial vs. Embryo
  misc_feature: MA Experiment ID: 108546 Result: Down-regulated in Transcription
  misc_feature: MA Experiment 108546 PARAMETER Experiment Name: Zm_Imbibed_Seeds_P Parameter: Age (day) Value: 3 vs. 2
  misc_feature: MA Experiment 108546 PARAMETER Experiment Name: Zm_Imbibed_Seeds_P Parameter: Organism Value: Zea mays
  misc_feature: MA Experiment 108546 PARAMETER Experiment Name: Zm_Imbibed_Seeds_P Parameter: Plant Line Value: 35A19
  misc_feature: MA Experiment 108546 PARAMETER Experiment Name: Zm_Imbibed_Seeds_P Parameter: Tissue Value: Roots vs. Embryo
  misc_feature: MA Experiment ID: 108547 Result: Up-regulated in Transcription
  misc_feature: MA Experiment 108547 PARAMETER Experiment Name: Zm_Imbibed_Seeds_P Parameter: Age (day) Value: 4 vs. 2
  misc_feature: MA Experiment 108547 PARAMETER Experiment Name: Zm_Imbibed_Seeds_P Parameter: Organism Value: Zea mays
  misc_feature: MA Experiment 108547 PARAMETER Experiment Name: Zm_Imbibed_Seeds_P Parameter: Plant Line Value: 35A19
  misc_feature: MA Experiment 108547 PARAMETER Experiment Name: Zm_Imbibed_Seeds_P Parameter: Tissue Value: Aerial vs. Embryo
  misc_feature: MA Experiment ID: 108599 Result: Up-regulated in Transcription
  misc_feature: MA Experiment 108599 PARAMETER Experiment Name: Zm_RT1_P Parameter: Age (day) Value: 11
  misc_feature: MA Experiment 108599 PARAMETER Experiment Name: Zm_RT1_P Parameter: Organism Value: Zea mays
  misc_feature: MA Experiment 108599 PARAMETER Experiment Name: Zm_RT1_P Parameter: Plant Line Value: rt1 mut vs. rt1 wt
  misc_feature: MA Experiment 108599 PARAMETER Experiment Name: Zm_RT1_P Parameter: Tissue Value: Roots
  misc_feature: MA Experiment ID: 108687 Result: Down-regulated in Transcription
  misc_feature: MA Experiment 108687 PARAMETER Experiment Name: Zm_Embryos-Flowers__P Parameter: Tissue Value: Embryo vs. Aerial+
  misc_feature: MA Experiment ID: 108688 Result: Down-regulated in Transcription
  misc_feature: MA Experiment 108688 PARAMETER Experiment Name: Zm_Embryos-Flowers__P Parameter: Tissue Value: Immature Flowers vs. Aerial+
  misc_feature: MA Experiment ID: 20000492 Result: Down-regulated in Transcription
  misc_feature: MA Experiment 20000492 PARAMETER Experiment Name: Zm_Hybrid_Seed_Dev_P Parameter: DAP Value: 12
  misc_feature: MA Experiment 20000492 PARAMETER Experiment Name: Zm_Hybrid_Seed_Dev_P Parameter: Organism Value: Zea mays
  misc_feature: MA Experiment 20000492 PARAMETER Experiment Name: Zm_Hybrid_Seed_Dev_P Parameter: Plant Line Value: 35A19
  misc_feature: MA Experiment 20000492 PARAMETER Experiment Name: Zm_Hybrid_Seed_Dev_P Parameter: Tissue Value: Fert Kernel vs. Unfert Floret
  misc_feature: MA Experiment ID: 20001610 Result: Up-regulated in Transcription
  misc_feature: MA Experiment 20001610 PARAMETER Experiment Name: Zm_50ppm_KNO3_L-to-H_P Parameter: Age (day) Value: 19
  misc_feature: MA Experiment 20001610 PARAMETER Experiment Name: Zm_50ppm_KNO3_L-to-H_P Parameter: Organism Value: Zea mays
  misc_feature: MA Experiment 20001610 PARAMETER Experiment Name: Zm_50ppm_KNO3_L-to-H_P Parameter: Plant Line Value: 35A19
  misc_feature: MA Experiment 20001610 PARAMETER Experiment Name: Zm_50ppm_KNO3_L-to-H_P Parameter: Timepoint (hr) Value: 2
  misc_feature: MA Experiment 20001610 PARAMETER Experiment Name: Zm_50ppm_KNO3_L-to-H_P Parameter: Tissue Value: Roots
  misc_feature: MA Experiment 20001610 PARAMETER Experiment Name: Zm_50ppm_KNO3_L-to-H_P Parameter: Treatment Value: 50ppm KNO3 vs. 50ppm KCl
gtgtggatgattccagtcctcctcctgttctttgtttcccgtcccatcgtgtgtgagcgcgtctgctggtctgccaagaggaggaaaggaaggagagagatggcttgccctgcgcagtccatgctctccgccagcggctgcatcttcctgaggagcaagcctcaggcggcatcccaagtgcgagggggcatcatcggcggtggccgcagcagcaggccgttcctgctcacctgcaacgcttcctcttctccgtccccttcctcgccggcgccggcgcaggaagaccccgactgcaacgaggaggagtgcgccccggagaaggaggtcgggagcctgagcgctgagtggctggccgaggagaggacccaggtcgtcggcactttccctcccaagaagagagggtggaaccggcttagtggagaaggacaccgccggccagaccaacatctactccgtcgagccgatggtgtacgtggccgagagcgccatcagctccggcacggcgggtacgtcggcggagggcgccgagaacacggccgccatcgccgcggggctcgtcctcatcaccgtagccgcggcctcgtccatcctcatccaggtgaacaagagccaggtgccgcaggtgccggaagccgcctacagcggcccgccgctcagctactacgtcaccaagttccagccggcggtggctgcgccggcgcagaccctcgaggcccccgcccccgccgaggcacaagacggcgccgccgccaccgtcgaggctccggaggtaccggcaccgcagctgtcgtcgtgagctgattcggttttgtggcatgcagctttatactacggatgagccagtagcgcatgatgatggaagatatgtatccatgatacaagcatttcggaattgtattaaagtttgt

SEQ ID NO: 4770 - protein, 266 aa, Zea mays subsp. mays
  peptide (1)..(266): Ceres Seq. ID no. 12366815
  misc_feature (92)..(135): Homolog of NCBI NO: 18415378 NR Description: expressed protein; protein id: At5g07020.1, by cDNA: 17482., supported by cDNA: gi_15293030, supported by gi_20258892 [Arabidopsis thaliana] >gi|9759558|dbj|BAB11160.1|
  misc_feature (92)..(135): Homolog of NCBI NO: 21553857 NR Description: unknown [Arabidopsis thaliana]
VWMIPVLLLFFVSRPIVCERVCWSAKRRKGRREMACPAQSMLSASGCIFLRSKPQAASQVRGGIIGGGRSSRPFLLTCNASSSPSPSSPAPAQEDPDCNEEECAPEKEVGSLSAEWLAEERTQVVGTFPPKKRGWNRLSGEGHRRPDQHLLRRADGVRGRERHQLRHGGYVGGGRREHGRHRRGARPHHRSRGLVHPHPGEQEPGAAGAGSRLQRPAAQLLRHQVPAGGGCAGADPRGPRPRRGTRRRRRHRRGSGGTGTAAVVVS

SEQ ID NO: 4771 - protein, 264 aa, Zea mays subsp. mays
  peptide (1)..(264): Ceres Seq. ID no. 12366816
  misc_feature (90)..(133): Homolog of NCBI NO: 18415378 NR Description: expressed protein; protein id: At5g07020.1, by cDNA: 17482., supported by cDNA: gi_15293030, supported by gi_20258892 [Arabidopsis thaliana] >gi|9759558|dbj|BAB11160.1|
  misc_feature (90)..(133): Homolog of NCBI NO: 21553857 NR Description: unknown [Arabidopsis thaliana]
MIPVLLLFFVSRPIVCERVCWSAKRRKGRREMACPAQSMLSASGCIFLRSKPQAASQVRGGIIGGGRSSRPFLLTCNASSSPSPSSPAPAQEDPDCNEEECAPEKEVGSLSAEWLAEERTQVVGTFPPKKRGWNRLSGEGHRRPDQHLLRRADGVRGRERHQLRHGGYVGGGRREHGRHRRGARPHHRSRGLVHPHPGEQEPGAAGAGSRLQRPAAQLLRHQVPAGGGCAGADPRGPRPRRGTRRRRRHRRGSGGTGTAAVVVS

SEQ ID NO: 4772 - protein, 233 aa, Zea mays subsp. mays
  peptide (1)..(233): Ceres Seq. ID no. 12366817
  misc_feature (59)..(102): Homolog of NCBI NO: 18415378 NR Description: expressed protein; protein id: At5g07020.1, by cDNA: 17482., supported by cDNA: gi_15293030, supported by gi_20258892 [Arabidopsis thaliana] >gi|9759558|dbj|BAB11160.1|
  misc_feature (59)..(102): Homolog of NCBI NO: 21553857 NR Description: unknown [Arabidopsis thaliana]
MACPAQSMLSASGCIFLRSKPQAASQVRGGIIGGGRSSRPFLLTCNASSSPSPSSPAPAQEDPDCNEEECAPEKEVGSLSAEWLAEERTQVVGTFPPKKRGWNRLSGEGHRRPDQHLLRRADGVRGRERHQLRHGGYVGGGRREHGRHRRGARPHHRSRGLVHPHPGEQEPGAAGAGSRLQRPAAQLLRHQVPAGGGCAGADPRGPRPRRGTRRRRRHRRGSGGTGTAAVVVS

SEQ ID NO: 4773 - DNA, 1488 bp, Zea mays subsp. mays
  misc_feature (1)..(1488): Ceres Seq. ID no. 12365496
  misc_feature: MA Experiment ID: 108522 Result: Up-regulated in Transcription
  misc_feature: MA Experiment 108522 PARAMETER Experiment Name: Zm_42deg_Heat_P Parameter: Age (day) Value: 8
  misc_feature: MA Experiment 108522 PARAMETER Experiment Name: Zm_42deg_Heat_P Parameter: Organism Value: Zea mays
  misc_feature: MA Experiment 108522 PARAMETER Experiment Name: Zm_42deg_Heat_P Parameter: Plant Line Value: 35A19
  misc_feature: MA Experiment 108522 PARAMETER Experiment Name: Zm_42deg_Heat_P Parameter: Temperature (deg C) Value: 42 vs. 22
  misc_feature: MA Experiment 108522 PARAMETER Experiment Name: Zm_42deg_Heat_P Parameter: Timepoint (hr) Value: 1
  misc_feature: MA Experiment 108522 PARAMETER Experiment Name: Zm_42deg_Heat_P Parameter: Tissue Value: Aerial
  misc_feature: MA Experiment ID: 108687 Result: Down-regulated in Transcription
  misc_feature: MA Experiment 108687 PARAMETER Experiment Name: Zm_Embryos-Flowers__P Parameter: Tissue Value: Embryo vs. Aerial+
  misc_feature: MA Experiment ID: 20001606 Result: Up-regulated in Transcription
  misc_feature: MA Experiment 20001606 PARAMETER Experiment Name: Zm_50ppm_KNO3_L-to-H_P Parameter: Age (day) Value: 19
  misc_feature: MA Experiment 20001606 PARAMETER Experiment Name: Zm_50ppm_KNO3_L-to-H_P Parameter: Organism Value: Zea mays
  misc_feature: MA Experiment 20001606 PARAMETER Experiment Name: Zm_50ppm_KNO3_L-to-H_P Parameter: Plant Line Value: 35A19
  misc_feature: MA Experiment 20001606 PARAMETER Experiment Name: Zm_50ppm_KNO3_L-to-H_P Parameter: Timepoint (hr) Value: 8
  misc_feature: MA Experiment 20001606 PARAMETER Experiment Name: Zm_50ppm_KNO3_L-to-H_P Parameter: Tissue Value: Shoots
  misc_feature: MA Experiment 20001606 PARAMETER Experiment Name: Zm_50ppm_KNO3_L-to-H_P Parameter: Treatment Value: 50ppm KNO3 vs. 50ppm KCl
agcataccgtctgtacttccagcagcagcatcatcagccgccgccgccgccgccgcgcttccactttgtcttgagccctgccctcaacgacgactcgcgggccggcagcacagcacgtatagctatggaaggaaacggtggcgcgggcggcggtagcggaagcgcggcaccgccctgggatctcgccatgcactggccacccgccgtgtcgtcctacccgccgcagcccttggagctgcagcagcagggagcttacctgcctcaagctggggaagcggcccgcctgctgctgggcaggggcgccggggccgggcaaccaagcggcgcaggtccacggcaatggcggcgctggtggcgcagctgctgagggtaagaggaaggagaaggcgcctgccgcggcggccgtgccgaggtgccaggtggaggggtgccacctgtcgctggcggacgccaaggagtaccaccggcggcacaaggtgtgcgaggcgcactccaaggcgcctcgggtcgtcgtcctcggcgccgagcagcgcttctgccagcagtgcagccggttccacgcgatctcggagttcgacgacgcgaagcggagctgccggcggcgtctggccgggcacaacgagcggcggcggaagagcaacgccagcgaggccatggccagaggcgttgcgcacccacacggggtgacggctttcggcccacggcggcttcctgccctcgcgcggcctccccgcgccgcccgcagggtccccggcggcggctggtgctctctctcttctgtcatcggccagaggcagcgtggcgggcgccagcgggccctggctggtcacggcggcgcgggaggacatccccgcgcgctccagcgcggcgctcgacgaccttatcgccgagaaccgcgccgccgcgctcctcgcgcggcagtacttcgtctccgaccgctcgccggcgcccagacgggatttcgtcgcctcttcgacggcgggttgcgccctccagcagcagcagcacccgcccgatcacacagccggctggcacccgcacccccacccctacagtggcgttggcgttggcgttggcagcggtggtggccggtaccagtaccaccacgtggcgccgccgagcgcgtggcacacgacgaccctggatcttatgcagccgacagcaagcaccgccgccgctccctccaccgccggcgcagcgttgtggccagcagtgtcgccggagagggcgggcgcgaggtcgtctcgctctcgcagcaagaccaaggatggcgacgcgtcgggatgtagcggcttggacgcgtgggcgcccactggtggagctcgtgtgctgtgatcgccatgcaatcgacgagcgtgacggccattatatatgttgcgcctgtactggtcgggtgttgcgtggtgcctgatctgtcccaaaagggatgtgtaatccaatgtacttcgggatgtgcttttttttttagtaatgaatcgtgtttttctc

SEQ ID NO: 4774 - protein, 211 aa, Zea mays subsp. mays
  peptide (1)..(211): Ceres Seq. ID no. 12365497
  misc_feature (1)..(29): Homolog of NCBI NO: 21742343 NR Description: OSJNBb0034G17.20 [Oryza sativa (japonica
  misc_feature (1)..(60): Homolog of NCBI NO: 28411864 NR Description: putative SBP-domain protein 5 [Oryza sativa
  misc_feature (1)..(16): Homolog of NCBI NO: 25458128 NR Description: squamosa promoter binding protein-homolog 3
  misc_feature (1)..(128): Homolog of NCBI NO: 5931786 NR Description: SBP-domain protein 5 [Zea mays]
  misc_feature (1)..(84): Homolog of NCBI NO: 5931780 NR Description: SBP-domain protein 2 [Zea mays]
  misc_feature (1)..(47): Homolog of NCBI NO: 15230904 NR Description: squamosa promoter-binding protein homolog; id: At3g57920.1, supported by cDNA: 247919. [Arabidopsis
  misc_feature (1)..(12): Homolog of NCBI NO: 15218091 NR Description: putative SPL1-related protein; protein id:
MARGVAHPHGVTAFGPRRLPALARPPRAARRVPGGGWCSLSSVIGQRQRGGRQRALAGHGGAGGHPRALQRGARRPYRREPRRRAPRAAVLRLRPLAGAQTGFRRLFDGGLRPPAAAAPARSHSRLAPAPPPLQWRWRWRWQRWWPVPVPPRGAAERVAHDDPGSYAADSKHRRRSLHRRRSVVASSVAGEGGREVVSLSQQDQGWRRVGM

SEQ ID NO: 4775 - protein, 121 aa, Zea mays subsp. mays
  peptide (1)..(121): Ceres Seq. ID no. 12365498
AYRLYFQQQHHQPPPPPPRFHFVLSPALNDDSRAGSTARIAMEGNGGAGGGSGSAAPPWDLAMHWPPAVSSYPPQPLELQQQGAYLPQAGEAARLLLGRGAGAGQPSGAGPRQWRRWWRSC

SEQ ID NO: 4776 - protein, 115 aa, Zea mays subsp. mays
  peptide (1)..(115): Ceres Seq. ID no. 12365499
MAALVAQLLRVRGRRRRLPRRPCRGARWRGATCRWRTPRSTTGGTRCARRTPRRLGSSSSAPSSASASSAAGSTRSRSSTTRSGAAGGVWPGTTSGGGRATPARPWPEALRTHTG

SEQ ID NO: 4777 - DNA, 1667 bp, Zea mays subsp. mays
  misc_feature (1)..(1667): Ceres Seq. ID no. 12409847
  misc_feature: MA Experiment ID: 108522 Result: Up-regulated in Transcription
  misc_feature: MA Experiment 108522 PARAMETER Experiment Name: Zm_42deg_Heat_P Parameter: Age (day) Value: 8
  misc_feature: MA Experiment 108522 PARAMETER Experiment Name: Zm_42deg_Heat_P Parameter: Organism Value: Zea mays
  misc_feature: MA Experiment 108522 PARAMETER Experiment Name: Zm_42deg_Heat_P Parameter: Plant Line Value: 35A19
  misc_feature: MA Experiment 108522 PARAMETER Experiment Name: Zm_42deg_Heat_P Parameter: Temperature (deg C) Value: 42 vs. 22
  misc_feature: MA Experiment 108522 PARAMETER Experiment Name: Zm_42deg_Heat_P Parameter: Timepoint (hr) Value: 1
  misc_feature: MA Experiment 108522 PARAMETER Experiment Name: Zm_42deg_Heat_P Parameter: Tissue Value: Aerial
  misc_feature: MA Experiment ID: 108527 Result: Up-regulated in Transcription
  misc_feature: MA Experiment 108527 PARAMETER Experiment Name: Zm_5mM_NO_P Parameter: Age (day) Value: 8
  misc_feature: MA Experiment 108527 PARAMETER Experiment Name: Zm_5mM_NO_P Parameter: Organism Value: Zea mays
  misc_feature: MA Experiment 108527 PARAMETER Experiment Name: Zm_5mM_NO_P Parameter: Plant Line Value: 35A19
  misc_feature: MA Experiment 108527 PARAMETER Experiment Name: Zm_5mM_NO_P Parameter: Timepoint (hr) Value: 6
  misc_feature: MA Experiment 108527 PARAMETER Experiment Name: Zm_5mM_NO_P Parameter: Tissue Value: Aerial
  misc_feature: MA Experiment 108527 PARAMETER Experiment Name: Zm_5mM_NO_P Parameter: Treatment Value: 5mM NO vs. No Treatment
  misc_feature: MA Experiment ID: 108534 Result: Down-regulated in Transcription
  misc_feature: MA Experiment 108534 PARAMETER Experiment Name: Zm_4deg_Cold_P Parameter: Age (hr) Value: 8
  misc_feature: MA Experiment 108534 PARAMETER Experiment Name: Zm_4deg_Cold_P Parameter: Organism Value: Zea mays
  misc_feature: MA Experiment 108534 PARAMETER Experiment Name: Zm_4deg_Cold_P Parameter: Plant Line Value: 35A19
  misc_feature: MA Experiment 108534 PARAMETER Experiment Name: Zm_4deg_Cold_P Parameter: Temperature (deg C) Value: 4 vs. 22
  misc_feature: MA Experiment 108534 PARAMETER Experiment Name: Zm_4deg_Cold_P Parameter: Timepoint (hr) Value: 6
  misc_feature: MA Experiment 108534 PARAMETER Experiment Name: Zm_4deg_Cold_P Parameter: Tissue Value: Aerial
  misc_feature: MA Experiment ID: 108535 Result: Down-regulated in Transcription
  misc_feature: MA Experiment 108535 PARAMETER Experiment Name: Zm_Meristem_P Parameter: Age (day) Value: 8
  misc_feature: MA Experiment 108535 PARAMETER Experiment Name: Zm_Meristem_P Parameter: Organism Value: Zea mays
  misc_feature: MA Experiment 108535 PARAMETER Experiment Name: Zm_Meristem_P Parameter: Plant Line Value: 35A19
  misc_feature: MA Experiment 108535 PARAMETER Experiment Name: Zm_Meristem_P Parameter: Tissue Value: Root Meristem vs. Above Root Meristem
  misc_feature: MA Experiment ID: 108542 Result: Up-regulated in Transcription
  misc_feature: MA Experiment 108542 PARAMETER Experiment Name: Zm_150mM_NaCl_P Parameter: Age (day) Value: 8
  misc_feature: MA Experiment 108542 PARAMETER Experiment Name: Zm_150mM_NaCl_P Parameter: Organism Value: Zea mays
  misc_feature: MA Experiment 108542 PARAMETER Experiment Name: Zm_150mM_NaCl_P Parameter: Plant Line Value: 35A19
  misc_feature: MA Experiment 108542 PARAMETER Experiment Name: Zm_150mM_NaCl_P Parameter: Timepoint (hr) Value: 6
  misc_feature: MA Experiment 108542 PARAMETER Experiment Name: Zm_150mM_NaCl_P Parameter: Tissue Value: Aerial
  misc_feature: MA Experiment 108542 PARAMETER Experiment Name: Zm_150mM_NaCl_P Parameter: Treatment Value: 150mM NaCl vs. No Treatment
  misc_feature: MA Experiment ID: 108543 Result: Up-regulated in Transcription
  misc_feature: MA Experiment ID: 108559 Result: Up-regulated in Transcription
  misc_feature: MA Experiment 108559 PARAMETER Experiment Name: Zm_5mM_NO_P Parameter: Age (day) Value: 8
  misc_feature: MA Experiment 108559 PARAMETER Experiment Name: Zm_5mM_NO_P Parameter: Organism Value: Zea mays
  misc_feature: MA Experiment 108559 PARAMETER Experiment Name: Zm_5mM_NO_P Parameter: Plant Line Value: 35A19
  misc_feature: MA Experiment 108559 PARAMETER Experiment Name: Zm_5mM_NO_P Parameter: Timepoint (hr) Value: 12
  misc_feature: MA Experiment 108559 PARAMETER Experiment Name: Zm_5mM_NO_P Parameter: Tissue Value: Aerial
  misc_feature: MA Experiment 108559 PARAMETER Experiment Name: Zm_5mM_NO_P Parameter: Treatment Value: 5mM NO vs. No Treatment
  misc_feature: MA Experiment ID: 20000477 Result: Up-regulated in Transcription
  misc_feature: MA Experiment 20000477 PARAMETER Experiment Name: Zm_5mM_SA_P Parameter: Age (day) Value: 10
  misc_feature: MA Experiment 20000477 PARAMETER Experiment Name: Zm_5mM_SA_P Parameter: Organism Value: Zea mays
  misc_feature: MA Experiment 20000477 PARAMETER Experiment Name: Zm_5mM_SA_P Parameter: Plant Line Value: 35A19
  misc_feature: MA Experiment 20000477 PARAMETER Experiment Name: Zm_5mM_SA_P Parameter: Timepoint (hr) Value: 48
  misc_feature: MA Experiment 20000477 PARAMETER Experiment Name: Zm_5mM_SA_P Parameter: Tissue Value: Aerial
  misc_feature: MA Experiment 20000477 PARAMETER Experiment Name: Zm_5mM_SA_P Parameter: Treatment Value: 5mM SA vs. No Treatment
  misc_feature: MA Experiment ID: 20000627 Result: Up-regulated in Transcription
  misc_feature: MA Experiment 20000627 PARAMETER Experiment Name: Zm_Herbicide-Treatments_P Parameter: Timepoint (hr) Value: 12
  misc_feature: MA Experiment 20000627 PARAMETER Experiment Name: Zm_Herbicide-Treatments_P Parameter: Tissue Value: Aerial
  misc_feature: MA Experiment 20000627 PARAMETER Experiment Name: Zm_Herbicide-Treatments_P Parameter: Treatment Value: Finale vs. No Treatment
  misc_feature: MA Experiment ID: 20000629 Result: Up-regulated in Transcription
  misc_feature: MA Experiment 20000629 PARAMETER Experiment Name: Zm_Herbicide-Treatments_P Parameter: Timepoint (hr) Value: 12
  misc_feature: MA Experiment 20000629 PARAMETER Experiment Name: Zm_Herbicide-Treatments_P Parameter: Tissue Value: Aerial
  misc_feature: MA Experiment 20000629 PARAMETER Experiment Name: Zm_Herbicide-Treatments_P Parameter: Treatment Value: Trimec vs. No Treatment
atccctgactattttcctgccttctgtctccattttcctagtgctatactaatttctgaagacctcctggaggaattctctgcttcatttctcgagcgggagancggccgccttcagtcaaggaaaatcgctgaagacagccgcagattcccagattcgtagttccgcttctgcttcggcgcacctgttcggtgtggaatgatggaggtgagcccgtctccggagcaaggagtgatggcgggaagggagccgttcgggctgccgaagaccccggcaacgccgccgtcctccgggggcacgcagggcctgcgcatggcgtacacgacggacggcaccgccatcttcaccccggtgagctccgtgccgcccgcgacggcgacataccagcccgtgggcggcagcgcnngtnctgcttcaagcttggctggngtaggangcaatggtggcgcgcccgtncactcgggtggcgcgggtgagccggggaccaagaaaaagcgtggccggccaagaaagtacggccccgacggctccatgtcgctggcattggtgcccgcatccatggctggggagccggcgccggcggctcttggagcttccggtcctttctcgcctaacggcccgaaggcgccgaacactgcgccgtcagcgtcgccggacggcgcgaagaagcggggccggccgaagggctccaccaacaagaagcacgtggctgcgctcgggccagcgggggcaggttttacgcctcatcttatttttgtaaaagccggagaggacgtatcggcaaagatcatgtcgttctcgcagcacgggacacgcgcggtctgcatcctttcagcaaacggcgccatatcaaatgtgacgcttcggcaatctgccacttcgggtggaacggtgacatacgagggtcgtttcgagatactgtctctgtccgggtcgtttcttctgtcagagaacggtggccagcgcagtcgaactggtgggctcagcgtttcgctagcaggccccgacggncgtgtcctgggtggctgtgttgccggactcctgacggctgcttcaccggtacagatcgtagtggggagcttcgacgccggtggaaagaagcagccgaagcagcagcagcagcagcagcttgctccgtcaccggcgccactaaatctcgcgccgacgggcgtggcggcagggccgagcagcccgccgtccagaggcacattgagcctaagcgagtcgtccagtggcgccccgccgagcccgccgcacgcaggggccagcggtggccatgggcagcagcagcagcagccacagccaggtggcttctccggtctgttctggaaatgacgagacccccggacaccgtctgaccgtggtagaactggcagaaaggactaaaggcgcgtgaggcactcgtcgaggccgaagctcactcggtgagaagcagcggtagcttgtaggtggtgtcaagactgtgtagctcttgctgttgctgtaggtgtaaatcgtgcgttgtgattgtgaggtggttgcttattgtctgtcgtctggaatggatgccgtgtactgaacctgtgcccccaatgcagcatgtcggaagttcttggtttcttctgcttgggtgcatcggcttgccgcacgatatgcatccatgcccataataatacgtgtatagattc

SEQ ID NO: 4778 - protein, 378 aa, Zea mays subsp. mays
  peptide (1)..(378): Ceres Seq. ID no. 12409848
  misc_feature (3)..(178): Pfam Name: Glycoprotein GG/GX Pfam Description: Glycoprotein GG/GX
  misc_feature (44)..(147): Homolog of NCBI NO: 18403332 NR Description: AT-hook DNA-binding protein (AHP1); protein id: supported by cDNA: gi_14326503, supported by cDNA: gi_19548036 thaliana] >gi|19548037|gb|AAL87382.1| At2g33620/F4P9.39
  misc_feature (137)..(367): Homolog of NCBI NO: 14326504 NR Description: At2g33620/F4P9.39 [Arabidopsis thaliana]
  misc_feature (44)..(147): Homolog of NCBI NO: 14326504 NR Description: At2g33620/F4P9.39 [Arabidopsis thaliana]
  misc_feature (137)..(367): Homolog of NCBI NO: 25408293 NR Description: AT-hook DNA-binding protein (AHP1) [imported] -
  misc_feature (137)..(367): Homolog of NCBI NO: 18403332 NR Description: AT-hook DNA-binding protein (AHP1); protein id: supported by cDNA: gi_14326503, supported by cDNA: gi_19548036 thaliana] >gi|19548037|gb|AAL87382.1| At2g33620/F4P9.39
  misc_feature (44)..(147): Homolog of NCBI NO: 2598227 NR Description: AT-hook protein 1 [Arabidopsis thaliana]
  misc_feature (137)..(367): Homolog of NCBI NO: 2598227 NR Description: AT-hook protein 1 [Arabidopsis thaliana]
  misc_feature (54)..(147): Homolog of NCBI NO: 25408293 NR Description: AT-hook DNA-binding protein (AHP1) [imported] -
  misc_feature (18)..(368): Homolog of NCBI NO: 37537056 NR Description: putative AT-Hook DNA-binding protein [Oryza
  misc_feature (13)..(377): Homolog of NCBI NO: 38346715 NR Description: OSJNBa0086O06.13 [Oryza sativa (japonica
  misc_feature (69)..(69): Xaa is any aa, unknown or other
  misc_feature (70)..(70): Xaa is any aa, unknown or other
  misc_feature (71)..(71): Xaa is any aa, unknown or other
  misc_feature (77)..(77): Xaa is any aa, unknown or other
  misc_feature (80)..(80): Xaa is any aa, unknown or other
  misc_feature (86)..(86): Xaa is any aa, unknown or other
  misc_feature (271)..(271): Xaa is any aa, unknown or other
MMEVSPSPEQGVMAGREPFGLPKTPATPPSSGGTQGLRMAYTTDGTAIFTPVSSVPPATATYQPVGGSXXXASSLAXVGXNGGAPXHSGGAGEPGTKKKRGRPRKYGPDGSMSLALVPASMAGEPAPAALGASGPFSPNGPKAPNTAPSASPDGAKKRGRPKGSTNKKHVAALGPAGAGFTPHLIFVKAGEDVSAKIMSFSQHGTRAVCILSANGAISNVTLRQSATSGGTVTYEGRFEILSLSGSFLLSENGGQRSRTGGLSVSLAGPDXRVLGGCVAGLLTAASPVQIVVGSFDAGGKKQPKQQQQQQLAPSPAPLNLAPTGVAAGPSSPPSRGTLSLSESSSGAPPSPPHAGASGGHGQQQQQPQPGGFSGLFWK

SEQ ID NO: 4779 - protein, 377 aa, Zea mays subsp. mays
  peptide (1)..(377): Ceres Seq. ID no. 12409849
  misc_feature (2)..(177): Pfam Name: Glycoprotein GG/GX Pfam Description: Glycoprotein GG/GX
  misc_feature (136)..(366): Homolog of NCBI NO: 2598227 NR Description: AT-hook protein 1 [Arabidopsis thaliana]
  misc_feature (136)..(366): Homolog of NCBI NO: 18403332 NR Description: AT-hook DNA-binding protein (AHP1); protein id: supported by cDNA: gi_14326503, supported by cDNA: gi_19548036 thaliana] >gi|19548037|gb|AAL87382.1| At2g33620/F4P9.39
  misc_feature (43)..(146): Homolog of NCBI NO: 2598227 NR Description: AT-hook protein 1 [Arabidopsis thaliana]
  misc_feature (43)..(146): Homolog of NCBI NO: 18403332 NR Description: AT-hook DNA-binding protein (AHP1); protein id: supported by cDNA: gi_14326503, supported by cDNA: gi_19548036 thaliana] >gi|19548037|gb|AAL87382.1| At2g33620/F4P9.39
  misc_feature (136)..(366): Homolog of NCBI NO: 14326504 NR Description: At2g33620/F4P9.39 [Arabidopsis thaliana]
  misc_feature (43)..(146): Homolog of NCBI NO: 14326504 NR Description: At2g33620/F4P9.39 [Arabidopsis thaliana]
  misc_feature (136)..(366): Homolog of NCBI NO: 25408293 NR Description: AT-hook DNA-binding protein (AHP1) [imported] -
  misc_feature (53)..(146): Homolog of NCBI NO: 25408293 NR Description: AT-hook DNA-binding protein (AHP1) [imported] -
  misc_feature (17)..(367): Homolog of NCBI NO: 37537056 NR Description: putative AT-Hook DNA-binding protein [Oryza
  misc_feature (12)..(376): Homolog of NCBI NO: 38346715 NR Description: OSJNBa0086O06.13 [Oryza sativa (japonica
  misc_feature (68)..(68): Xaa is any aa, unknown or other
  misc_feature (69)..(69): Xaa is any aa, unknown or other
  misc_feature (70)..(70): Xaa is any aa, unknown or other
  misc_feature (76)..(76): Xaa is any aa, unknown or other
  misc_feature (79)..(79): Xaa is any aa, unknown or other
  misc_feature (85)..(85): Xaa is any aa, unknown or other
  misc_feature (270)..(270): Xaa is any aa, unknown or other
MEVSPSPEQGVMAGREPFGLPKTPATPPSSGGTQGLRMAYTTDGTAIFTPVSSVPPATATYQPVGGSXXXASSLAXVGXNGGAPXHSGGAGEPGTKKKRGRPRKYGPDGSMSLALVPASMAGEPAPAALGASGPFSPNGPKAPNTAPSASPDGAKKRGRPKGSTNKKHVAALGPAGAGFTPHLIFVKAGEDVSAKIMSFSQHGTRAVCILSANGAISNVTLRQSATSGGTVTYEGRFEILSLSGSFLLSENGGQRSRTGGLSVSLAGPDXRVLGGCVAGLLTAASPVQIVVGSFDAGGKKQPKQQQQQQLAPSPAPLNLAPTGVAAGPSSPPSRGTLSLSESSSGAPPSPPHAGASGGHGQQQQQPQPGGFSGLFWK

SEQ ID NO: 4780 - protein, 366 aa, Zea mays subsp. mays
  peptide (1)..(366): Ceres Seq. ID no. 12409850
  misc_feature (1)..(166): Pfam Name: Glycoprotein GG/GX Pfam Description: Glycoprotein GG/GX
  misc_feature (125)..(355): Homolog of NCBI NO: 2598227 NR Description: AT-hook protein 1 [Arabidopsis thaliana]
  misc_feature (125)..(355): Homolog of NCBI NO: 18403332 NR Description: AT-hook DNA-binding protein (AHP1); protein id: supported by cDNA: gi_14326503, supported by cDNA: gi_19548036 thaliana] >gi|19548037|gb|AAL87382.1| At2g33620/F4P9.39
  misc_feature (32)..(135): Homolog of NCBI NO: 2598227 NR Description: AT-hook protein 1 [Arabidopsis thaliana]
  misc_feature (32)..(135): Homolog of NCBI NO: 18403332 NR Description: AT-hook DNA-binding protein (AHP1); protein id: supported by cDNA: gi_14326503, supported by cDNA: gi_19548036 thaliana] >gi|19548037|gb|AAL87382.1| At2g33620/F4P9.39
  misc_feature (125)..(355): Homolog of NCBI NO: 14326504 NR Description: At2g33620/F4P9.39 [Arabidopsis thaliana]
  misc_feature (32)..(135): Homolog of NCBI NO: 14326504 NR Description: At2g33620/F4P9.39 [Arabidopsis thaliana]
  misc_feature (125)..(355): Homolog of NCBI NO: 25408293 NR Description: AT-hook DNA-binding protein (AHP1) [imported] -
  misc_feature (42)..(135): Homolog of NCBI NO: 25408293 NR Description: AT-hook DNA-binding protein (AHP1) [imported] -
  misc_feature (6)..(356): Homolog of NCBI NO: 37537056 NR Description: putative AT-Hook DNA-binding protein [Oryza
  misc_feature (1)..(365): Homolog of NCBI NO: 38346715 NR Description: OSJNBa0086O06.13 [Oryza sativa (japonica
  misc_feature (57)..(57): Xaa is any aa, unknown or other
  misc_feature (58)..(58): Xaa is any aa, unknown or other
  misc_feature (59)..(59): Xaa is any aa, unknown or other
  misc_feature (65)..(65): Xaa is any aa, unknown or other
  misc_feature (68)..(68): Xaa is any aa, unknown or other
  misc_feature (74)..(74): Xaa is any aa, unknown or other
  misc_feature (259)..(259): Xaa is any aa, unknown or other
MAGREPFGLPKTPATPPSSGGTQGLRMAYTTDGTAIFTPVSSVPPATATYQPVGGSXXXASSLAXVGXNGGAPXHSGGAGEPGTKKKRGRPRKYGPDGSMSLALVPASMAGEPAPAALGASGPFSPNGPKAPNTAPSASPDGAKKRGRPKGSTNKKHVAALGPAGAGFTPHLIFVKAGEDVSAKIMSFSQHGTRAVCILSANGAISNVTLRQSATSGGTVTYEGRFEILSLSGSFLLSENGGQRSRTGGLSVSLAGPDXRVLGGCVAGLLTAASPVQIVVGSFDAGGKKQPKQQQQQQLAPSPAPLNLAPTGVAAGPSSPPSRGTLSLSESSSGAPPSPPHAGASGGHGQQQQQPQPGGFSGLFWK

SEQ ID NO: 4781 - DNA, 1517 bp, Zea mays subsp. mays
  misc_feature (1)..(1517): Ceres Seq. ID no. 12365500
  misc_feature: MA Experiment ID: 108543 Result: Down-regulated in Transcription
  misc_feature: MA Experiment ID: 20000478 Result: Up-regulated in Transcription
  misc_feature: MA Experiment 20000478 PARAMETER Experiment Name: Zm_5mM_SA_P Parameter: Age (day) Value: 11
  misc_feature: MA Experiment 20000478 PARAMETER Experiment Name: Zm_5mM_SA_P Parameter: Organism Value: Zea mays
  misc_feature: MA Experiment 20000478 PARAMETER Experiment Name: Zm_5mM_SA_P Parameter: Plant Line Value: 35A19
  misc_feature: MA Experiment 20000478 PARAMETER Experiment Name: Zm_5mM_SA_P Parameter: Timepoint (hr) Value: 72
  misc_feature: MA Experiment 20000478 PARAMETER Experiment Name: Zm_5mM_SA_P Parameter: Tissue Value: Aerial
  misc_feature: MA Experiment 20000478 PARAMETER Experiment Name: Zm_5mM_SA_P Parameter: Treatment Value: 5mM SA vs. No Treatment
  misc_feature: MA Experiment ID: 20000479 Result: Up-regulated in Transcription
  misc_feature: MA Experiment 20000479 PARAMETER Experiment Name: Zm_Drought_P Parameter: Age (day) Value: 10
  misc_feature: MA Experiment 20000479 PARAMETER Experiment Name: Zm_Drought_P Parameter: Organism Value: Zea mays
  misc_feature: MA Experiment 20000479 PARAMETER Experiment Name: Zm_Drought_P Parameter: Plant Line Value: 35A19
  misc_feature: MA Experiment 20000479 PARAMETER Experiment Name: Zm_Drought_P Parameter: Timepoint (hr) Value: 48
  misc_feature: MA Experiment 20000479 PARAMETER Experiment Name: Zm_Drought_P Parameter: Tissue Value: Aerial
  misc_feature: MA Experiment 20000479 PARAMETER Experiment Name: Zm_Drought_P Parameter: Treatment Value: Drought vs. No Drought
gcacgagaccattacctagaacatcctaacgaaaaagagcttgttacgaggcaatggcgccgacagtggaggtgctgacgtcggagatggtcgtcccagctgaagaggccccggcgggcaccatttggctgtccaacctggacctcgccgcacgccgcgggtacacgcccacggtctacttcttccggcccaacggtgacccggggttcttcgccccggacgtcgtcaagggcagcctcgccaggacgctagtcacgttctacccgctcgcggggcggcctcgcgctcgacggcgccgggcgccgtccaggtcgactgcaccggcgagggtgcggtgttcgtgaccgcgcggtcggactacgcgctcgacgacctgatgcgcgagttcgtgccgtgccgcgagatgcgggacctgctggtgcccccggcgcccgcgccggacccgccgtgcgcgctgctgttcgtgcaggtcacgcgcctgcgctgcggcggcgccgtgctcgccctgtccatgcaccactccgtgtgcgacgcgcggagcgccgcgcacttcttcgatacgtgggcgagcatcgcgcgcggggacgccgccgccgccgccgcgaacgctcctgtgccaccgtgcttcgactacgcgctgctcgccgcgcgcccggcgctcgcggtgctgtacgaccaccccgagtacaagcccgagccggagcctgtggacgccgcgtccgactacgcgagcgccatcgtcgtcatgaccaaagcgcaggtgggcgcgctcaaggcgcggtgttccggggcgtccacgttccgcgccgtggtggcgctggtgtggcagtgcgtgtgccgcgcgcgggcgctgccccccgaggcggagacgcggctctactccatgatcgacatgcgctcgcgcctggatccgccgctccctacgggatacttcggcaacgcggttgtccgcacctcggtctccgccacggtcggcgaggtgacgtccaaccccgtaggccacgccgcgcgccgcgcgctcgcggtaacgagccagggcgacgactacgcgcggtcgctggtggactacctagagggcgtggacgccatgaacctgcccagaagcggcatctcgcgtgcgcacctccgcgccatcagctggatgggcatgtcgctgtacaaggccgacttcgggtggggcgcgccggtgttcatggggccggcgatcatgtactacagtggcttcgtgtacgtcatgaacgcggcggggaaggagggtgccctcgcgctcgtgctgtcgctggagccggagagcatgccggagttcaggaaggtgttcgccgaggagctcgccagcctggacgtgatctagtgcatacatatagctcgaagtatgtaccggccggctaagccgccaggcgccagtggacagttgcatgcgtggaacgtactacgtgttaggctatccacactcatatcaccctatttctctaaatatctaccatataactgtgggttatgataattagagataccca

SEQ ID NO: 4782 - protein, 324 aa, Zea mays subsp. mays
  peptide (1)..(324): Ceres Seq. ID no. 12365501
  misc_feature (1)..(312): Pfam Name: Transferase family Pfam Description: Transferase family
  misc_feature (1)..(312): Homolog of NCBI NO: 6469032 NR Description: N-hydroxycinnamoyl/benzoyltransferase [Ipomoea
  misc_feature (1)..(312): Homolog of NCBI NO: 27475616 NR Description: hydroxycinnamoyl transferase [Nicotiana tabacum]
  misc_feature (1)..(316): Homolog of NCBI NO: 40644084 NR Description: hydroxycinnamoyl CoA quinate transferase
  misc_feature (1)..(316): Homolog of NCBI NO: 40644899 NR Description: hydroxycinnamoyl CoA quinate transferase
  misc_feature (1)..(316): Homolog of NCBI NO: 15239747 NR Description: anthranilate N-benzoyltransferase; protein id: supported by cDNA: 114130. [Arabidopsis thaliana]
  misc_feature (1)..(316): Homolog of NCBI NO: 21536883 NR Description: anthranilate N-benzoyltransferase [Arabidopsis
  misc_feature (1)..(316): Homolog of NCBI NO: 38345030 NR Description: OSJNBa0029H02.14 [Oryza sativa (japonica
  misc_feature (1)..(314): Homolog of NCBI NO: 7484689 NR Description: anthranilate N-benzoyltransferase (EC 2.3.1.144)
  misc_feature (1)..(314): Homolog of NCBI NO: 7484691 NR Description: anthranilate N-benzoyltransferase (EC 2.3.1.144)
  misc_feature (1)..(314): Homolog of NCBI NO: 7484690 NR Description: anthranilate N-benzoyltransferase (EC 2.3.1.144)
MREFVPCREMRDLLVPPAPAPDPPCALLFVQVTRLRCGGAVLALSMHHSVCDARSAAHFFDTWASIARGDAAAAAANAPVPPCFDYALLAARPALAVLYDHPEYKPEPEPVDAASDYASAIVVMTKAQVGALKARCSGASTFRAVVALVWQCVCRARALPPEAETRLYSMIDMRSRLDPPLPTGYFGNAVVRTSVSATVGEVTSNPVGHAARRALAVTSQGDDYARSLVDYLEGVDAMNLPRSGISRAHLRAISWMGMSLYKADFGWGAPVFMGPAIMYYSGFVYVMNAAGKEGALALVLSLEPESMPEFRKVFAEELASLDVI

SEQ ID NO: 4783 - protein, 315 aa, Zea mays subsp. mays
  peptide (1)..(315): Ceres Seq. ID no. 12365502
  misc_feature (1)..(303): Pfam Name: Transferase family Pfam Description: Transferase family
  misc_feature (1)..(303): Homolog of NCBI NO: 6469032 NR Description: N-hydroxycinnamoyl/benzoyltransferase [Ipomoea
  misc_feature (1)..(303): Homolog of NCBI NO: 27475616 NR Description: hydroxycinnamoyl transferase [Nicotiana tabacum]
  misc_feature (1)..(307): Homolog of NCBI NO: 40644084 NR Description: hydroxycinnamoyl CoA quinate transferase
  misc_feature (1)..(307): Homolog of NCBI NO: 40644899 NR Description: hydroxycinnamoyl CoA quinate transferase
  misc_feature (1)..(307): Homolog of NCBI NO: 15239747 NR Description: anthranilate N-benzoyltransferase; protein id: supported by cDNA: 114130. [Arabidopsis thaliana]
  misc_feature (1)..(307): Homolog of NCBI NO: 21536883 NR Description: anthranilate N-benzoyltransferase [Arabidopsis
  misc_feature (1)..(307): Homolog of NCBI NO: 38345030 NR Description: OSJNBa0029H02.14 [Oryza sativa (japonica
  misc_feature (1)..(305): Homolog of NCBI NO: 7484689 NR Description: anthranilate N-benzoyltransferase (EC 2.3.1.144)
  misc_feature (1)..(305): Homolog of NCBI NO: 7484691 NR Description: anthranilate N-benzoyltransferase (EC 2.3.1.144)
  misc_feature (1)..(305): Homolog of NCBI NO: 7484690 NR Description: anthranilate N-benzoyltransferase (EC 2.3.1.144)
MRDLLVPPAPAPDPPCALLFVQVTRLRCGGAVLALSMHHSVCDARSAAHFFDTWASIARGDAAAAAANAPVPPCFDYALLAARPALAVLYDHPEYKPEPEPVDAASDYASAIVVMTKAQVGALKARCSGASTFRAVVALVWQCVCRARALPPEAETRLYSMIDMRSRLDPPLPTGYFGNAVVRTSVSATVGEVTSNPVGHAARRALAVTSQGDDYARSLVDYLEGVDAMNLPRSGISRAHLRAISWMGMSLYKADFGWGAPVFMGPAIMYYSGFVYVMNAAGKEGALALVLSLEPESMPEFRKVFAEELASLDVI

SEQ ID NO: 4784 - protein, 279 aa, Zea mays subsp. mays
  peptide (1)..(279): Ceres Seq. ID no. 12365503
  misc_feature (1)..(267): Pfam Name: Transferase family Pfam Description: Transferase family
  misc_feature (1)..(267): Homolog of NCBI NO: 6469032 NR Description: N-hydroxycinnamoyl/benzoyltransferase [Ipomoea
  misc_feature (1)..(267): Homolog of NCBI NO: 27475616 NR Description: hydroxycinnamoyl transferase [Nicotiana tabacum]
  misc_feature (1)..(271): Homolog of NCBI NO: 40644084 NR Description: hydroxycinnamoyl CoA quinate transferase
  misc_feature (1)..(271): Homolog of NCBI NO: 40644899 NR Description: hydroxycinnamoyl CoA quinate transferase
  misc_feature (1)..(271): Homolog of NCBI NO: 15239747 NR Description: anthranilate N-benzoyltransferase; protein id: supported by cDNA: 114130. [Arabidopsis thaliana]
  misc_feature (1)..(271): Homolog of NCBI NO: 21536883 NR Description: anthranilate N-benzoyltransferase [Arabidopsis
  misc_feature (1)..(271): Homolog of NCBI NO: 38345030 NR Description: OSJNBa0029H02.14 [Oryza sativa (japonica
  misc_feature (1)..(269): Homolog of NCBI NO: 7484689 NR Description: anthranilate N-benzoyltransferase (EC 2.3.1.144)
  misc_feature (1)..(269): Homolog of NCBI NO: 7484691 NR Description: anthranilate N-benzoyltransferase (EC 2.3.1.144)
  misc_feature (1)..(269): Homolog of NCBI NO: 7484690 NR Description: anthranilate N-benzoyltransferase (EC 2.3.1.144)
MHHSVCDARSAAHFFDTWASIARGDAAAAAANAPVPPCFDYALLAARPALAVLYDHPEYKPEPEPVDAASDYASAIVVMTKAQVGALKARCSGASTFRAVVALVWQCVCRARALPPEAETRLYSMIDMRSRLDPPLPTGYFGNAVVRTSVSATVGEVTSNPVGHAARRALAVTSQGDDYARSLVDYLEGVDAMNLPRSGISRAHLRAISWMGMSLYKADFGWGAPVFMGPAIMYYSGFVYVMNAAGKEGALALVLSLEPESMPEFRKVFAEELASLDVI

SEQ ID NO: 4785 - DNA, 866 bp, Zea mays subsp. mays; identical to SEQ ID NO: 2090
  misc_feature (1)..(866): Ceres Seq. ID no. 12351502
  misc_feature: MA Experiment ID: 108522 Result: Up-regulated in Transcription
  misc_feature: MA Experiment 108522 PARAMETER Experiment Name: Zm_42deg_Heat_P Parameter: Age (day) Value: 8
  misc_feature: MA Experiment 108522 PARAMETER Experiment Name: Zm_42deg_Heat_P Parameter: Organism Value: Zea mays
  misc_feature: MA Experiment 108522 PARAMETER Experiment Name: Zm_42deg_Heat_P Parameter: Plant Line Value: 35A19
  misc_feature: MA Experiment 108522 PARAMETER Experiment Name: Zm_42deg_Heat_P Parameter: Temperature (deg C) Value: 42 vs. 22
  misc_feature: MA Experiment 108522 PARAMETER Experiment Name: Zm_42deg_Heat_P Parameter: Timepoint (hr) Value: 1
  misc_feature: MA Experiment 108522 PARAMETER Experiment Name: Zm_42deg_Heat_P Parameter: Tissue Value: Aerial
  misc_feature: MA Experiment ID: 108535 Result: Up-regulated in Transcription
  misc_feature: MA Experiment 108535 PARAMETER Experiment Name: Zm_Meristem_P Parameter: Age (day) Value: 8
  misc_feature: MA Experiment 108535 PARAMETER Experiment Name: Zm_Meristem_P Parameter: Organism Value: Zea mays
  misc_feature: MA Experiment 108535 PARAMETER Experiment Name: Zm_Meristem_P Parameter: Plant Line Value: 35A19
  misc_feature: MA Experiment 108535 PARAMETER Experiment Name: Zm_Meristem_P Parameter: Tissue Value: Root Meristem vs. Above Root Meristem
  misc_feature: MA Experiment ID: 108543 Result: Up-regulated in Transcription

SEQ ID NO: 4786 - protein, 196 aa, Zea mays subsp. mays; identical to SEQ ID NO: 2091
  peptide (1)..(196): Ceres Seq. ID no. 12351503
  misc_feature (35)..(105): Pfam Name: linker histone H1 and H5 family Pfam Description: linker histone H1 and H5 family
  misc_feature (1)..(196): Homolog of NCBI NO: 22135471 NR Description: histone H1-like protein HON101 [Zea mays]
  misc_feature (1)..(196): Homolog of NCBI NO: 5230785 NR Description: histone H1 WH1B.1 [Triticum aestivum]
  misc_feature (1)..(193): Homolog of NCBI NO: 729668 NR Description: Histone H1 >gi|2147479|pir||S65059 histone H1,
  misc_feature (1)..(193): Homolog of NCBI NO: 7439658 NR Description: histone H1, stress-inducible - tomato
  misc_feature (1)..(196): Homolog of NCBI NO: 121950 NR Description: HISTONE H1 >gi|7439629|pir||S26826 histone H1 -
  misc_feature (1)..(194): Homolog of NCBI NO: 2623960 NR Description: histone H1 [Apium graveolens]
  misc_feature (1)..(196): Homolog of NCBI NO: 5726575 NR Description: histone H1C [Nicotiana tabacum]
  misc_feature (8)..(193): Homolog of NCBI NO: 7595978 NR Description: histone H1 variant [Lycopersicon chilense]
  misc_feature (5)..(196): Homolog of NCBI NO: 7439660 NR Description: histone H1 (clone TH32) - wheat
  misc_feature (1)..(195): Homolog of NCBI NO: 21465093 NR Description: histone H1 [Lathyrus aphaca]

SEQ ID NO: 4787 - protein, 155 aa, Zea mays subsp. mays; identical to SEQ ID NO: 2092
  peptide (1)..(155): Ceres Seq. ID no. 12351504
  misc_feature (1)..(64): Pfam Name: linker histone H1 and H5 family Pfam Description: linker histone H1 and H5 family
  misc_feature (1)..(155): Homolog of NCBI NO: 22135471 NR Description: histone H1-like protein HON101 [Zea mays]
  misc_feature (1)..(155): Homolog of NCBI NO: 5230785 NR Description: histone H1 WH1B.1 [Triticum aestivum]
  misc_feature (1)..(152): Homolog of NCBI NO: 729668 NR Description: Histone H1 >gi|2147479|pir||S65059 histone H1,
  misc_feature (1)..(152): Homolog of NCBI NO: 7439658 NR Description: histone H1, stress-inducible - tomato
  misc_feature (1)..(155): Homolog of NCBI NO: 121950 NR Description: HISTONE H1 >gi|7439629|pir||S26826 histone H1 -
  misc_feature (1)..(153): Homolog of NCBI NO: 2623960 NR Description: histone H1 [Apium graveolens]
  misc_feature (1)..(155): Homolog of NCBI NO: 5726575 NR Description: histone H1C [Nicotiana tabacum]
  misc_feature (1)..(152): Homolog of NCBI NO: 7595978 NR Description: histone H1 variant [Lycopersicon chilense]
  misc_feature (1)..(155): Homolog of NCBI NO: 7439660 NR Description: histone H1 (clone TH32) - wheat
  misc_feature (1)..(154): Homolog of NCBI NO: 21465093 NR Description: histone H1 [Lathyrus aphaca]

SEQ ID NO: 4788 - protein, 148 aa, Zea mays subsp. mays; identical to SEQ ID NO: 2093
  peptide (1)..(148): Ceres Seq. ID no. 12351505

SEQ ID NO: 4789 - DNA, 1382 bp, Zea mays subsp. mays
  misc_feature (1)..(1382): Ceres Seq. ID no. 12407780
  misc_feature: MA Experiment ID: 108528 Result: Up-regulated in Transcription
  misc_feature: MA Experiment 108528 PARAMETER Experiment Name: Zm_Imbibed_Seeds_P Parameter: Age (day) Value: 5 vs. 2
  misc_feature: MA Experiment 108528 PARAMETER Experiment Name: Zm_Imbibed_Seeds_P Parameter: Organism Value: Zea mays
  misc_feature: MA Experiment 108528 PARAMETER Experiment Name: Zm_Imbibed_Seeds_P Parameter: Plant Line Value: 35A19
  misc_feature: MA Experiment 108528 PARAMETER Experiment Name: Zm_Imbibed_Seeds_P Parameter: Tissue Value: Aerial vs. Embryo
  misc_feature: MA Experiment ID: 108530 Result: Up-regulated in Transcription
  misc_feature: MA Experiment 108530 PARAMETER Experiment Name: Zm_Imbibed_Seeds_P Parameter: Age (day) Value: 6 vs. 2
  misc_feature: MA Experiment 108530 PARAMETER Experiment Name: Zm_Imbibed_Seeds_P Parameter: Organism Value: Zea mays
  misc_feature: MA Experiment 108530 PARAMETER Experiment Name: Zm_Imbibed_Seeds_P Parameter: Plant Line Value: 35A19
  misc_feature: MA Experiment 108530 PARAMETER Experiment Name: Zm_Imbibed_Seeds_P Parameter: Tissue Value: Aerial vs. Embryo
  misc_feature: MA Experiment ID: 108543 Result: Up-regulated in Transcription
  misc_feature: MA Experiment ID: 108545 Result: Up-regulated in Transcription
  misc_feature: MA Experiment 108545 PARAMETER Experiment Name: Zm_Imbibed_Seeds_P Parameter: Age (day) Value: 3 vs. 2
  misc_feature: MA Experiment 108545 PARAMETER Experiment Name: Zm_Imbibed_Seeds_P Parameter: Organism Value: Zea mays
  misc_feature: MA Experiment 108545 PARAMETER Experiment Name: Zm_Imbibed_Seeds_P Parameter: Plant Line Value: 35A19
  misc_feature: MA Experiment 108545 PARAMETER Experiment Name: Zm_Imbibed_Seeds_P Parameter: Tissue Value: Aerial vs. Embryo
  misc_feature: MA Experiment ID: 108547 Result: Up-regulated in Transcription
  misc_feature: MA Experiment 108547 PARAMETER Experiment Name: Zm_Imbibed_Seeds_P Parameter: Age (day) Value: 4 vs. 2
  misc_feature: MA Experiment 108547 PARAMETER Experiment Name: Zm_Imbibed_Seeds_P Parameter: Organism Value: Zea mays
  misc_feature: MA Experiment 108547 PARAMETER Experiment Name: Zm_Imbibed_Seeds_P Parameter: Plant Line Value: 35A19
  misc_feature: MA Experiment 108547 PARAMETER Experiment Name: Zm_Imbibed_Seeds_P Parameter: Tissue Value: Aerial vs. Embryo
tccctcccagtcccaggagcgtggcctcactctcctcgtcgcatcccctctcctcatcttcaaagcgcgggcggcggcaatggcgatggcctccacctacgcgccgggcggaggcgcgggggcgctcgcgcagggaagatgcagggtccgcggtcccgcggggctgggcttcctcggcccctccaaggccgccggcctcccccgccccctcgccctcgccaggcggacgagcagccccgtcgcggtgggcgccaggctgcgatgcgcggcgtcgtcgtcccccgcggnaggcgcggcccgccacggcgccgcgcttcatccagcacaagaaggaggccttctggttctaccgcttcctctccatcgtgtacgaccacgtcatcaacccgggccactggaccgaggacatgcgcgacgacgcgctggaacccgccgacctcttcagccgccacctcacggtcgtcgacgtcggcggcggcacggggttcaccacgctcggcatcgtcaagcacgtcaacccggagaacgtcacgctgctcgaccagtccccgcaccagctcgacaaggcccggcagaaggaggccctcaagggggtcaccatcatggagggcgacgccgaggacctcccgttccccaccgactccttcgaccgatacatctccgccggcagcatcgagtactggccagacccacagcgggggatcaaggaagcctacagggtcctgagatttggtgggctagcttgtgtgatcggcccggtctacccgaccttctggctgtcccgcttcttcgccgacatgtggatgctcttccccaaggaggaagagtacatcgagtggttcaagaaggctgggtttagggatgtcaagctgaagaggattggaccgaagtggtaccgcggtgtccgaaggcatggcctcatcatgggctgctccgtcaccggcgtcaagagagagcgcggtgactctcccttggagcttggtcccaaggcggaggatgtcagcaagccagtgaatccgatcaccttcctcttccgcttcctcgtaggaacgatttgtgctgcgtactatgttctggtgcctatttacatgtggataaaggaccagatcgtgccaaaaggcatgccaatctgagtgaagggaatgagctgcatggaagagaggatagccaacgtctgaattttagtcttctctatattagacgcttcctgcctgttttgtattaatacctcttgttttccttctgctatttacttcttgcactgctgttcctgtttgtggtaattaataatactaagacatcgatgttctcctgtttcttgagcatgactggttgcagtggaacctggaaactaagttatatgatgtgtaatttagttggtc

SEQ ID NO: 4790 - protein, 376 aa, Zea mays subsp. mays
  peptide (1)..(376): Ceres Seq. ID no. 12407781
  misc_feature (97)..(376): Homolog of NCBI NO: 34393472 NR Description: putative 37kDa chloroplast inner envelope membrane
  misc_feature (97)..(376): Homolog of NCBI NO: 7489166 NR Description: membrane protein, 37K, precursor, chloroplast
  misc_feature (98)..(376): Homolog of NCBI NO: 124429 NR Description: 37 KD INNER ENVELOPE MEMBRANE PROTEIN, PRECURSOR (E37) >gi|99543|pir||S14409 membrane protein, 37K,
  misc_feature (97)..(376): Homolog of NCBI NO: 15005009 NR Description: APG1 [Arabidopsis thaliana]
  misc_feature (97)..(376): Homolog of NCBI NO: 15229430 NR Description: putative chloroplast inner envelope protein; id: At3g63410.1, supported by cDNA: 19143., supported by cDNA: [Arabidopsis thaliana] >gi|11358638|pir||T49182 probable
  misc_feature (97)..(376): Homolog of NCBI NO: 21553996 NR Description: putative chloroplast inner envelope protein
  misc_feature (97)..(372): Homolog of NCBI NO: 37265798 NR Description: MPBQ/MSBQ methyltransferase [Chlamydomonas
  misc_feature (98)..(225): Homolog of NCBI NO: 25458195 NR Description: membrane protein, 37K, chloroplast inner envelope
  misc_feature (106)..(299): Homolog of NCBI NO: 11498123 NR Description: chloroplast inner envelope membrane protein
  misc_feature (106)..(289): Homolog of NCBI NO: 15790980 NR Description: membrane protein; Hmp [Halobacterium sp. NRC-1]
  misc_feature (96)..(96): Xaa is any aa, unknown or other
PPSPRSVASLSSSHPLSSSSKRGRRQWRWPPPTRRAEARGRSRREDAGSAVPRGWASSAPPRPPASPAPSPSPGGRAAPSRWAPGCDARRRRPPRXARPATAPRFIQHKKEAFWFYRFLSIVYDHVINPGHWTEDMRDDALEPADLFSRHLTVVDVGGGTGFTTLGIVKHVNPENVTLLDQSPHQLDKARQKEALKGVTIMEGDAEDLPFPTDSFDRYISAGSIEYWPDPQRGIKEAYRVLRFGGLACVIGPVYPTFWLSRFFADMWMLFPKEEEYIEWFKKAGFRDVKLKRIGPKWYRGVRRHGLIMGCSVTGVKRERGDSPLELGPKAEDVSKPVNPITFLFRFLVGTICAAYYVLVPIYMWIKDQIVPKGMPI

SEQ ID NO: 4791 - protein, 285 aa, Zea mays subsp. mays
  peptide (1)..(285): Ceres Seq. ID no. 12407782
  misc_feature (135)..(215): Pfam Name: TT viral ORF2 Pfam Description: TT viral ORF2
  misc_feature (96)..(96): Xaa is any aa, unknown or other
PSQSQERGLTLLVASPLLIFKARAAAMAMASTYAPGGGAGALAQGRCRVRGPAGLGFLGPSKAAGLPRPLALARRTSSPVAVGARLRCAASSSPAXGAARHGAALHPAQEGGLLVLPLPLHRVRPRHQPGPLDRGHARRRAGTRRPLQPPPHGRRRRRRHGVHHARHRQARQPGERHAARPVPAPARQGPAEGGPQGGHHHGGRRRGPPVPHRLLRPIHLRRQHRVLARPTAGDQGSLQGPEIWWASLCDRPGLPDLLAVPLLRRHVDALPQGGRVHRVVQEGWV

SEQ ID NO: 4792 - protein, 259 aa, Zea mays subsp. mays
  peptide (1)..(259): Ceres Seq. ID no. 12407783
  misc_feature (109)..(189): Pfam Name: TT viral ORF2 Pfam Description: TT viral ORF2
  misc_feature (70)..(70): Xaa is any aa, unknown or other
MAMASTYAPGGGAGALAQGRCRVRGPAGLGFLGPSKAAGLPRPLALARRTSSPVAVGARLRCAASSSPAXGAARHGAALHPAQEGGLLVLPLPLHRVRPRHQPGPLDRGHARRRAGTRRPLQPPPHGRRRRRRHGVHHARHRQARQPGERHAARPVPAPARQGPAEGGPQGGHHHGGRRRGPPVPHRLLRPIHLRRQHRVLARPTAGDQGSLQGPEIWWASLCDRPGLPDLLAVPLLRRHVDALPQGGRVHRVVQEGWV

SEQ ID NO: 4793 - DNA, 1393 bp, Zea mays subsp. mays
  misc_feature (1)..(1393): Ceres Seq. ID no. 12409839
  misc_feature: MA Experiment ID: 108527 Result: Up-regulated in Transcription
  misc_feature: MA Experiment 108527 PARAMETER Experiment Name: Zm_5mM_NO_P Parameter: Age (day) Value: 8
  misc_feature: MA Experiment 108527 PARAMETER Experiment Name: Zm_5mM_NO_P Parameter: Organism Value: Zea mays
  misc_feature: MA Experiment 108527 PARAMETER Experiment Name: Zm_5mM_NO_P Parameter: Plant Line Value: 35A19
  misc_feature: MA Experiment 108527 PARAMETER Experiment Name: Zm_5mM_NO_P Parameter: Timepoint (hr) Value: 6
  misc_feature: MA Experiment 108527 PARAMETER Experiment Name: Zm_5mM_NO_P Parameter: Tissue Value: Aerial
  misc_feature: MA Experiment 108527 PARAMETER Experiment Name: Zm_5mM_NO_P Parameter: Treatment Value: 5mM NO vs. No Treatment
  misc_feature: MA Experiment ID: 108534 Result: Up-regulated in Transcription
  misc_feature: MA Experiment 108534 PARAMETER Experiment Name: Zm_4deg_Cold_P Parameter: Age (hr) Value: 8
  misc_feature: MA Experiment 108534 PARAMETER Experiment Name: Zm_4deg_Cold_P Parameter: Organism Value: Zea mays
  misc_feature: MA Experiment 108534 PARAMETER Experiment Name: Zm_4deg_Cold_P Parameter: Plant Line Value: 35A19
  misc_feature: MA Experiment 108534 PARAMETER Experiment Name: Zm_4deg_Cold_P Parameter: Temperature (deg C) Value: 4 vs. 22
  misc_feature: MA Experiment 108534 PARAMETER Experiment Name: Zm_4deg_Cold_P Parameter: Timepoint (hr) Value: 6
  misc_feature: MA Experiment 108534 PARAMETER Experiment Name: Zm_4deg_Cold_P Parameter: Tissue Value: Aerial
  misc_feature: MA Experiment ID: 108559 Result: Up-regulated in Transcription
  misc_feature: MA Experiment 108559 PARAMETER Experiment Name: Zm_5mM_NO_P Parameter: Age (day) Value: 8
  misc_feature: MA Experiment 108559 PARAMETER Experiment Name: Zm_5mM_NO_P Parameter: Organism Value: Zea mays
  misc_feature: MA Experiment 108559 PARAMETER Experiment Name: Zm_5mM_NO_P Parameter: Plant Line Value: 35A19
  misc_feature: MA Experiment 108559 PARAMETER Experiment Name: Zm_5mM_NO_P Parameter: Timepoint (hr) Value: 12
  misc_feature: MA Experiment 108559 PARAMETER Experiment Name: Zm_5mM_NO_P Parameter: Tissue Value: Aerial
  misc_feature: MA Experiment 108559 PARAMETER Experiment Name: Zm_5mM_NO_P Parameter: Treatment Value: 5mM NO vs. No Treatment
  misc_feature: MA Experiment ID: 108688 Result: Down-regulated in Transcription
  misc_feature: MA Experiment 108688 PARAMETER Experiment Name: Zm_Embryos-Flowers__P Parameter: Tissue Value: Immature Flowers vs. Aerial+
  misc_feature: MA Experiment ID: 20000108 Result: Down-regulated in Transcription
  misc_feature: MA Experiment 20000108 PARAMETER Experiment Name: Zm_Root-Tips_P Parameter: Age (day) Value: 12
  misc_feature: MA Experiment 20000108 PARAMETER Experiment Name: Zm_Root-Tips_P Parameter: Organism Value: Zea mays
  misc_feature: MA Experiment 20000108 PARAMETER Experiment Name: Zm_Root-Tips_P Parameter: Tissue Value: Root tips vs. Root mid region    35
  misc_feature: MA Experiment 20000108 PARAMETER Experiment Name: Zm_Root-Tips_P Parameter: Tissue Value: Root tips vs. Root mid region   Sequence Listing-Misc Features (4)
  misc_feature: MA Experiment ID: 20000478 Result: Up-regulated in Transcription
  misc_feature: MA Experiment 20000478 PARAMETER Experiment Name: Zm_5mM_SA_P Parameter: Age (day) Value: 11
  misc_feature: MA Experiment 20000478 PARAMETER Experiment Name: Zm_5mM_SA_P Parameter: Organism Value: Zea mays
  misc_feature: MA Experiment 20000478 PARAMETER Experiment Name: Zm_5mM_SA_P Parameter: Plant Line Value: 35A19
  misc_feature: MA Experiment 20000478 PARAMETER Experiment Name: Zm_5mM_SA_P Parameter: Timepoint (hr) Value: 72
  misc_feature: MA Experiment 20000478 PARAMETER Experiment Name: Zm_5mM_SA_P Parameter: Tissue Value: Aerial
  misc_feature: MA Experiment 20000478 PARAMETER Experiment Name: Zm_5mM_SA_P Parameter: Treatment Value: 5mM SA vs. No Treatment
  misc_feature: MA Experiment ID: 20000479 Result: Up-regulated in Transcription
  misc_feature: MA Experiment 20000479 PARAMETER Experiment Name: Zm_Drought_P Parameter: Age (day) Value: 10
  misc_feature: MA Experiment 20000479 PARAMETER Experiment Name: Zm_Drought_P Parameter: Organism Value: Zea mays
  misc_feature: MA Experiment 20000479 PARAMETER Experiment Name: Zm_Drought_P Parameter: Plant Line Value: 35A19
  misc_feature: MA Experiment 20000479 PARAMETER Experiment Name: Zm_Drought_P Parameter: Timepoint (hr) Value: 48
  misc_feature: MA Experiment 20000479 PARAMETER Experiment Name: Zm_Drought_P Parameter: Tissue Value: Aerial
  misc_feature: MA Experiment 20000479 PARAMETER Experiment Name: Zm_Drought_P Parameter: Treatment Value: Drought vs. No Drought
  misc_feature: MA Experiment ID: 20000480 Result: Up-regulated in Transcription
  misc_feature: MA Experiment 20000480 PARAMETER Experiment Name: Zm_Drought_P Parameter: Age (day) Value: 11
  misc_feature: MA Experiment 20000480 PARAMETER Experiment Name: Zm_Drought_P Parameter: Organism Value: Zea mays
  misc_feature: MA Experiment 20000480 PARAMETER Experiment Name: Zm_Drought_P Parameter: Plant Line Value: 35A19
  misc_feature: MA Experiment 20000480 PARAMETER Experiment Name: Zm_Drought_P Parameter: Timepoint (hr) Value: 72
  misc_feature: MA Experiment 20000480 PARAMETER Experiment Name: Zm_Drought_P Parameter: Tissue Value: Aerial
  misc_feature: MA Experiment 20000480 PARAMETER Experiment Name: Zm_Drought_P Parameter: Treatment Value: Drought vs. No Drought
  misc_feature: MA Experiment ID: 20000626 Result: Up-regulated in Transcription
  misc_feature: MA Experiment 20000626 PARAMETER Experiment Name: Zm_Herbicide-Treatments_P Parameter: Timepoint (hr) Value: 12
  misc_feature: MA Experiment 20000626 PARAMETER Experiment Name: Zm_Herbicide-Treatments_P Parameter: Tissue Value: Aerial
  misc_feature: MA Experiment 20000626 PARAMETER Experiment Name: Zm_Herbicide-Treatments_P Parameter: Treatment Value: Roundup vs. No Treatment
  misc_feature: MA Experiment ID: 20000629 Result: Up-regulated in Transcription
  misc_feature: MA Experiment 20000629 PARAMETER Experiment Name: Zm_Herbicide-Treatments_P Parameter: Timepoint (hr) Value: 12
  misc_feature: MA Experiment 20000629 PARAMETER Experiment Name: Zm_Herbicide-Treatments_P Parameter: Tissue Value: Aerial
  misc_feature: MA Experiment 20000629 PARAMETER Experiment Name: Zm_Herbicide-Treatments_P Parameter: Treatment Value: Trimec vs. No Treatment
ctcctcccctcttcctaccattagcagtagccacagccagaacaccagcagacagcagcatcagcagggaggaacacgatgagcggcgccggtccggatctgcagctgccaccggggttccggtttccacccgacggacgaggagctggtgatgcactacctctgccgccgctgcgccggcctgcccatcgccgtccccatcatcgccgagatcgacctctacaagttcgacccatggcagctcccaaggatggcgctgtacggcgagaaggagtggtacttcttctccccgcgggaccgcaagtacccgaacgggtccaggcccaaccgcgccgccggggctgggtactggaaggccaccggcgctgacaagcccgtgggcacgcccaagccgctggccatcaagaaggcgctcgtcttctacgccggcaaggcgcccaagggcgagaagaccaactggatcatgcacgagtaccgcctcgccgacgtcgaccgctcggcgcgcaagaagaacagcctcaggttggatgactgggtcctgtgccgcatctacaacaagaagggcggcgggctggagaaggcgccggcggctggcggcgaccacaagcctatgttcgccacgccggcggtgagctccccgccggagcagaagccgttcgtggcggcggcgggcgggctgcccccggcgttcccggagctggcggcgtactacgaccggccgtcggactcgatgccgcggctgcacgcggactactccagctgctcggagcaggtgctgtccccggagcagctggcgtgcgaccgggaggtgcagagccagcccaagatcagcgagtgggagcggaccttcgcctccgaccccgtgaaccccgcgggctccatgctcgaccccgtcgtcggccacgccggcggcgacccgctgctgcaggacatcctcatgtactggggcaagccgttctagacgacgccgcccatcatgtcctgagggcgaggggaggtgggggtggcgaagcatgcatgcaaacacccatcctcggctgcggttggttggttgattgatctgtcttgggcagcgcaatgcaatgcaaccgcacggtgtgggctttgactcaggcgagccgccattgttgacttgcaaggaggatataatatgaaactatagctggattacatggagaggcggcaatgagaccgtctggccccgccggaagggagacggagacggagacggagacggatggcgcagtgcatcgggtgtggtggatcgtgcgcggcatgtgtgtgtgtgtctgtaatcgactccatcagcttgccgcctttcctgtcctattctgattgttttcatccattgatgccgtcgtcgcagtaataaacttggaacgaacgattccac

SEQ ID NO: 4794 - protein, 269 aa, Zea mays subsp. mays
  peptide (1)..(269): Ceres Seq. ID no. 12409840
  misc_feature (1)..(111): Pfam Name: No apical meristem (NAM) protein Pfam Description: No apical meristem (NAM) protein
  misc_feature (1)..(269): Homolog of NCBI NO: 25458553 NR Description: OsNAC6 protein [imported] - rice OsNAC6 protein [Oryza sativa] >gi|13272281|gb|AAK17067.1| NAC6
  misc_feature (1)..(269): Homolog of NCBI NO: 21105748 NR Description: nam-like protein 10 [Petunia x hybrida]
  misc_feature (1)..(269): Homolog of NCBI NO: 15223456 NR Description: NAC domain protein, putative; protein id: supported by cDNA: 20909., supported by cDNA: gi_13877716,
  misc_feature (1)..(269): Homolog of NCBI NO: 40647397 NR Description: NAC domain protein [Lycopersicon esculentum]
  misc_feature (1)..(246): Homolog of NCBI NO: 14485513 NR Description: putative NAC domain protein [Solanum tuberosum]
  misc_feature (1)..(230): Homolog of NCBI NO: 21105734 NR Description: nam-like protein 3 [Petunia x hybrida]
  misc_feature (1)..(194): Homolog of NCBI NO: 15223963 NR Description: GRAB1-like protein; protein id: At1g77450.1,
  misc_feature (1)..(194): Homolog of NCBI NO: 21593134 NR Description: GRAB1-like protein [Arabidopsis thaliana]
  misc_feature (1)..(153): Homolog of NCBI NO: 30697896 NR Description: No apical meristem (NAM) protein family thaliana] >gi|24030239|gb|AAN41296.1| unknown protein
  misc_feature (1)..(164): Homolog of NCBI NO: 22326685 NR Description: Expressed protein; protein id: At5g08790.1, by cDNA: gi_19424090 [Arabidopsis thaliana] ATAF2 protein [Arabidopsis thaliana] >gi|19424091|gb|AAL87335.1|
MHYLCRRCAGLPIAVPIIAEIDLYKFDPWQLPRMALYGEKEWYFFSPRDRKYPNGSRPNRAAGAGYWKATGADKPVGTPKPLAIKKALVFYAGKAPKGEKTNWIMHEYRLADVDRSARKKNSLRLDDWVLCRIYNKKGGGLEKAPAAGGDHKPMFATPAVSSPPEQKPFVAAAGGLPPAFPELAAYYDRPSDSMPRLHADYSSCSEQVLSPEQLACDREVQSQPKISEWERTFASDPVNPAGSMLDPVVGHAGGDPLLQDILMYWGKPF

SEQ ID NO: 4795 - protein, 236 aa, Zea mays subsp. mays
  peptide (1)..(236): Ceres Seq. ID no. 12409841
  misc_feature (1)..(78): Pfam Name: No apical meristem (NAM) protein Pfam Description: No apical meristem (NAM) protein
  misc_feature (1)..(236): Homolog of NCBI NO: 25458553 NR Description: OsNAC6 protein [imported] - rice OsNAC6 protein [Oryza sativa] >gi|13272281|gb|AAK17067.1| NAC6
  misc_feature (1)..(236): Homolog of NCBI NO: 21105748 NR Description: nam-like protein 10 [Petunia x hybrida]
  misc_feature (1)..(236): Homolog of NCBI NO: 15223456 NR Description: NAC domain protein, putative; protein id: supported by cDNA: 20909., supported by cDNA: gi_13877716,
  misc_feature (1)..(236): Homolog of NCBI NO: 40647397 NR Description: NAC domain protein [Lycopersicon esculentum]
  misc_feature (1)..(213): Homolog of NCBI NO: 14485513 NR Description: putative NAC domain protein [Solanum tuberosum]
  misc_feature (1)..(197): Homolog of NCBI NO: 21105734 NR Description: nam-like protein 3 [Petunia x hybrida]
  misc_feature (1)..(161): Homolog of NCBI NO: 15223963 NR Description: GRAB1-like protein; protein id: At1g77450.1,
  misc_feature (1)..(161): Homolog of NCBI NO: 21593134 NR Description: GRAB1-like protein [Arabidopsis thaliana]
  misc_feature (1)..(120): Homolog of NCBI NO: 30697896 NR Description: No apical meristem (NAM) protein family thaliana] >gi|24030239|gb|AAN41296.1| unknown protein
  misc_feature (1)..(131): Homolog of NCBI NO: 22326685 NR Description: Expressed protein; protein id: At5g08790.1, by cDNA: gi_19424090 [Arabidopsis thaliana] ATAF2 protein [Arabidopsis thaliana] >gi|19424091|gb|AAL87335.1|
MALYGEKEWYFFSPRDRKYPNGSRPNRAAGAGYWKATGADKPVGTPKPLAIKKALVFYAGKAPKGEKTNWIMHEYRLADVDRSARKKNSLRLDDWVLCRIYNKKGGGLEKAPAAGGDHKPMFATPAVSSPPEQKPFVAAAGGLPPAFPELAAYYDRPSDSMPRLHADYSSCSEQVLSPEQLACDREVQSQPKISEWERTFASDPVNPAGSMLDPVVGHAGGDPLLQDILMYWGKPF

SEQ ID NO: 4796 - protein, 165 aa, Zea mays subsp. mays
  peptide (1)..(165): Ceres Seq. ID no. 12409842
  misc_feature (1)..(165): Homolog of NCBI NO: 25458553 NR Description: OsNAC6 protein [imported] - rice OsNAC6 protein [Oryza sativa] >gi|13272281|gb|AAK17067.1| NAC6
  misc_feature (1)..(165): Homolog of NCBI NO: 21105748 NR Description: nam-like protein 10 [Petunia x hybrida]
  misc_feature (1)..(165): Homolog of NCBI NO: 15223456 NR Description: NAC domain protein, putative; protein id: supported by cDNA: 20909., supported by cDNA: gi_13877716,
  misc_feature (1)..(165): Homolog of NCBI NO: 40647397 NR Description: NAC domain protein [Lycopersicon esculentum]
  misc_feature (1)..(142): Homolog of NCBI NO: 14485513 NR Description: putative NAC domain protein [Solanum tuberosum]
  misc_feature (1)..(126): Homolog of NCBI NO: 21105734 NR Description: nam-like protein 3 [Petunia x hybrida]
  misc_feature (1)..(90): Homolog of NCBI NO: 15223963 NR Description: GRAB1-like protein; protein id: At1g77450.1,
  misc_feature (1)..(90): Homolog of NCBI NO: 21593134 NR Description: GRAB1-like protein [Arabidopsis thaliana]
  misc_feature (1)..(49): Homolog of NCBI NO: 30697896 NR Description: No apical meristem (NAM) protein family thaliana] >gi|24030239|gb|AAN41296.1| unknown protein
  misc_feature (1)..(60): Homolog of NCBI NO: 22326685 NR Description: Expressed protein; protein id: At5g08790.1, by cDNA: gi_19424090 [Arabidopsis thaliana] ATAF2 protein [Arabidopsis thaliana] >gi|19424091|gb|AAL87335.1|
MHEYRLADVDRSARKKNSLRLDDWVLCRIYNKKGGGLEKAPAAGGDHKPMFATPAVSSPPEQKPFVAAAGGLPPAFPELAAYYDRPSDSMPRLHADYSSCSEQVLSPEQLACDREVQSQPKISEWERTFASDPVNPAGSMLDPVVGHAGGDPLLQDILMYWGKPF

SEQ ID NO: 4797 - DNA, 1140 bp, Zea mays subsp. mays
  misc_feature (1)..(1140): Ceres Seq. ID no. 12386869
  misc_feature: MA Experiment ID: 108528 Result: Up-regulated in Transcription
  misc_feature: MA Experiment 108528 PARAMETER Experiment Name: Zm_Imbibed_Seeds_P Parameter: Age (day) Value: 5 vs. 2
  misc_feature: MA Experiment 108528 PARAMETER Experiment Name: Zm_Imbibed_Seeds_P Parameter: Organism Value: Zea mays
  misc_feature: MA Experiment 108528 PARAMETER Experiment Name: Zm_Imbibed_Seeds_P Parameter: Plant Line Value: 35A19
  misc_feature: MA Experiment 108528 PARAMETER Experiment Name: Zm_Imbibed_Seeds_P Parameter: Tissue Value: Aerial vs. Embryo
  misc_feature: MA Experiment ID: 108530 Result: Up-regulated in Transcription
  misc_feature: MA Experiment 108530 PARAMETER Experiment Name: Zm_Imbibed_Seeds_P Parameter: Age (day) Value: 6 vs. 2
  misc_feature: MA Experiment 108530 PARAMETER Experiment Name: Zm_Imbibed_Seeds_P Parameter: Organism Value: Zea mays
  misc_feature: MA Experiment 108530 PARAMETER Experiment Name: Zm_Imbibed_Seeds_P Parameter: Plant Line Value: 35A19
  misc_feature: MA Experiment 108530 PARAMETER Experiment Name: Zm_Imbibed_Seeds_P Parameter: Tissue Value: Aerial vs. Embryo
  misc_feature: MA Experiment ID: 108543 Result: Up-regulated in Transcription
  misc_feature: MA Experiment ID: 108544 Result: Up-regulated in Transcription
  misc_feature: MA Experiment ID: 108688 Result: Down-regulated in Transcription
  misc_feature: MA Experiment 108688 PARAMETER Experiment Name: Zm_Embryos-Flowers__P Parameter: Tissue Value: Immature Flowers vs. Aerial+
  misc_feature: MA Experiment ID: 20000535 Result: Down-regulated in Transcription
  misc_feature: MA Experiment 20000535 PARAMETER Experiment Name: Zm_Hybrid_Seed_Dev_P Parameter: DAP Value: 30 vs. 12
  misc_feature: MA Experiment 20000535 PARAMETER Experiment Name: Zm_Hybrid_Seed_Dev_P Parameter: Organism Value: Zea mays
  misc_feature: MA Experiment 20000535 PARAMETER Experiment Name: Zm_Hybrid_Seed_Dev_P Parameter: Plant Line Value: 35A19
  misc_feature: MA Experiment 20000535 PARAMETER Experiment Name: Zm_Hybrid_Seed_Dev_P Parameter: Tissue Value: Embryo vs. Unfert Floret
ccaccaacccaacctctgacgatcaccatcgccgctagcctccaccaccaacttcccatcgcctccccctcatctccccacactcctgacctcacctctccgaactgcagcacctcccctcccgccacccacacgtgctcccatggccgccaccgcgatctcagtccgcctccacccaaccgccgcgcgccatgtggcctccgcccgccgcgcccgcctcggggccgtccgcgcgcagtccgcgccggcggcggcggcggcggcgctgacgcaggacgacctcaagcggctggcggcggtgcgcgccgtcgagcaggtgaagagcgggatggtgctcgggctcgggacgggctccacggccgccttcgccgtcgccgagatcggcgcgctcctggccgcgggcaagctcgagaagatcgtcggcgtgcccacatccaagcgcaccttcgagcaggcgcagtcgctcggcatcccgctctccacgctcgacgacaacccgctcatcgacctcgccatcgacggtgccgacgaggttgaccctgacctcaaccttgtgaaagggcggggtggtgctcttcttcgtgagaagatggttgaggcagcatcggacaagtttattgttattgttgacgagacaaaactagttgatgggttaggaggtagtggtctagccatgccagtggaagttgtgcagttctgctggaagtacaaccttgtaagattgcaggaactgtttaaggaggaaggagtcgaggcaaagctaaggtttgaaggcgacaagccctatgttactgacaactcaaactacatcgtcgatttatacttcaagacgccaatcaaggatgcgttggcagcaggacaggaaattgcagctctggaaggagttgttgaccatgggttgttcttgaacatggcgagttcagtgatcattgctggaacggacggtgtcagtgtcaaaacgaagtgagtttttgagttgctttgttgtttgtgttgagttttacaatttaatgtacaagctattggtgtaaaagcagctgataagatgcttcaataaaggtgttcccccaatgtggggattgactatcacttattgtgggataaaaagccattttaataggttgaaacttctgttgattc

SEQ ID NO: 4798 - protein, 274 aa, Zea mays subsp. mays
  peptide (1)..(274): Ceres Seq. ID no. 12386870
  misc_feature (92)..(270): Pfam Name: Ribose 5-phosphate isomerase A (phosphoriboisomerase A) Pfam Description: Ribose 5-phosphate isomerase A
  misc_feature (92)..(270): Pfam Name: Ribose 5-phosphate isomerase A (phosphoriboisomerase A) Pfam Description: Ribose 5-phosphate isomerase A
  misc_feature (92)..(270): Pfam Name: Ribose 5-phosphate isomerase A (phosphoriboisomerase A) Pfam Description: Ribose 5-phosphate isomerase A
  misc_feature (1)..(274): Homolog of NCBI NO: 34393835 NR Description: putative ribose-5-phosphate isomerase [Oryza
  misc_feature (31)..(274): Homolog of NCBI NO: 34393836 NR Description: putative ribose-5-phosphate isomerase [Oryza
  misc_feature (29)..(274): Homolog of NCBI NO: 18654317 NR Description: ribose-5-phosphate isomerase [Spinacia oleracea]
  misc_feature (1)..(274): Homolog of NCBI NO: 21594002 NR Description: putative ribose 5-phosphate isomerase
  misc_feature (1)..(274): Homolog of NCBI NO: 15229349 NR Description: putative ribose 5-phosphate isomerase; protein At3g04790.1, supported by cDNA: 6349., supported by cDNA:
  misc_feature (31)..(274): Homolog of NCBI NO: 34393836 NR Description: putative ribose-5-phosphate isomerase [Oryza
  misc_feature (1)..(274): Homolog of NCBI NO: 21594002 NR Description: putative ribose 5-phosphate isomerase
  misc_feature (26)..(274): Homolog of NCBI NO: 21592672 NR Description: putative ribose 5-phosphate isomerase
  misc_feature (26)..(274): Homolog of NCBI NO: 15226223 NR Description: putative ribose 5-phosphate isomerase; protein At2g01290.1, supported by cDNA: gi_15809809, supported by cDNA:
  misc_feature (1)..(274): Homolog of NCBI NO: 15229349 NR Description: putative ribose 5-phosphate isomerase; protein At3g04790.1, supported by cDNA: 6349., supported by cDNA:
  misc_feature (34)..(268): Homolog of NCBI NO: 38347196 NR Description: OSJNBa0023J03.8 [Oryza sativa (japonica
  misc_feature (26)..(274): Homolog of NCBI NO: 13430836 NR Description: putative ribose 5-phosphate isomerase
  misc_feature (26)..(274): Homolog of NCBI NO: 15223936 NR Description: putative ribose 5-phosphate isomerase; protein At1g71100.1, supported by cDNA: 3116., supported by cDNA: [Arabidopsis thaliana] >gi|25329397|pir||E96735 hypothetical
  misc_feature (26)..(274): Homolog of NCBI NO: 21592672 NR Description: putative ribose 5-phosphate isomerase
  misc_feature (26)..(274): Homolog of NCBI NO: 15226223 NR Description: putative ribose 5-phosphate isomerase; protein At2g01290.1, supported by cDNA: gi_15809809, supported by cDNA:
  misc_feature (1)..(274): Homolog of NCBI NO: 15229349 NR Description: putative ribose 5-phosphate isomerase; protein At3g04790.1, supported by cDNA: 6349., supported by cDNA:
  misc_feature (1)..(274): Homolog of NCBI NO: 21594002 NR Description: putative ribose 5-phosphate isomerase
  misc_feature (29)..(274): Homolog of NCBI NO: 18654317 NR Description: ribose-5-phosphate isomerase [Spinacia oleracea]
  misc_feature (31)..(274): Homolog of NCBI NO: 34393836 NR Description: putative ribose-5-phosphate isomerase [Oryza
  misc_feature (1)..(274): Homolog of NCBI NO: 34393835 NR Description: putative ribose-5-phosphate isomerase [Oryza
  misc_feature (34)..(268): Homolog of NCBI NO: 38347196 NR Description: OSJNBa0023J03.8 [Oryza sativa (japonica
  misc_feature (26)..(274): Homolog of NCBI NO: 13430836 NR Description: putative ribose 5-phosphate isomerase
  misc_feature (26)..(274): Homolog of NCBI NO: 15223936 NR Description: putative ribose 5-phosphate isomerase; protein At1g71100.1, supported by cDNA: 3116., supported by cDNA: [Arabidopsis thaliana] >gi|25329397|pir||E96735 hypothetical
  misc_feature (29)..(274): Homolog of NCBI NO: 18654317 NR Description: ribose-5-phosphate isomerase [Spinacia oleracea]
  misc_feature (1)..(274): Homolog of NCBI NO: 34393835 NR Description: putative ribose-5-phosphate isomerase [Oryza
  misc_feature (26)..(274): Homolog of NCBI NO: 15226223 NR Description: putative ribose 5-phosphate isomerase; protein At2g01290.1, supported by cDNA: gi_15809809, supported by cDNA:
  misc_feature (26)..(274): Homolog of NCBI NO: 21592672 NR Description: putative ribose 5-phosphate isomerase
  misc_feature (26)..(274): Homolog of NCBI NO: 15223936 NR Description: putative ribose 5-phosphate isomerase; protein At1g71100.1, supported by cDNA: 3116., supported by cDNA: [Arabidopsis thaliana] >gi|25329397|pir||E96735 hypothetical
  misc_feature (26)..(274): Homolog of NCBI NO: 13430836 NR Description: putative ribose 5-phosphate isomerase
  misc_feature (34)..(268): Homolog of NCBI NO: 38347196 NR Description: OSJNBa0023J03.8 [Oryza sativa (japonica
MAATAISVRLHPTAARHVASARRARLGAVRAQSAPAAAAAALTQDDLKRLAAVRAVEQVKSGMVLGLGTGSTAAFAVAEIGALLAAGKLEKIVGVPTSKRTFEQAQSLGIPLSTLDDNPLIDLAIDGADEVDPDLNLVKGRGGALLREKMVEAASDKFIVIVDETKLVDGLGGSGLAMPVEVVQFCWKYNLVRLQELFKEEGVEAKLRFEGDKPYVTDNSNYIVDLYFKTPIKDALAAGQEIAALEGVVDHGLFLNMASSVIIAGTDGVSVKTK

SEQ ID NO: 4799 - protein, 212 aa, Zea mays subsp. mays
  peptide (1)..(212): Ceres Seq. ID no. 12386871
  misc_feature (30)..(208): Pfam Name: Ribose 5-phosphate isomerase A (phosphoriboisomerase A) Pfam Description: Ribose 5-phosphate isomerase A
  misc_feature (30)..(208): Pfam Name: Ribose 5-phosphate isomerase A (phosphoriboisomerase A) Pfam Description: Ribose 5-phosphate isomerase A
  misc_feature (30)..(208): Pfam Name: Ribose 5-phosphate isomerase A (phosphoriboisomerase A) Pfam Description: Ribose 5-phosphate isomerase A
  misc_feature (1)..(212): Homolog of NCBI NO: 21592672 NR Description: putative ribose 5-phosphate isomerase
  misc_feature (1)..(212): Homolog of NCBI NO: 15223936 NR Description: putative ribose 5-phosphate isomerase; protein At1g71100.1, supported by cDNA: 3116., supported by cDNA: [Arabidopsis thaliana] >gi|25329397|pir||E96735 hypothetical
  misc_feature (1)..(212): Homolog of NCBI NO: 34393835 NR Description: putative ribose-5-phosphate isomerase [Oryza
  misc_feature (1)..(212): Homolog of NCBI NO: 18654317 NR Description: ribose-5-phosphate isomerase [Spinacia oleracea]
  misc_feature (1)..(212): Homolog of NCBI NO: 15229349 NR Description: putative ribose 5-phosphate isomerase; protein At3g04790.1, supported by cDNA: 6349., supported by cDNA:
  misc_feature (1)..(212): Homolog of NCBI NO: 34393836 NR Description: putative ribose-5-phosphate isomerase [Oryza
  misc_feature (1)..(212): Homolog of NCBI NO: 21594002 NR Description: putative ribose 5-phosphate isomerase
  misc_feature (1)..(212): Homolog of NCBI NO: 18654317 NR Description: ribose-5-phosphate isomerase [Spinacia oleracea]
  misc_feature (1)..(212): Homolog of NCBI NO: 34393836 NR Description: putative ribose-5-phosphate isomerase [Oryza
  misc_feature (1)..(212): Homolog of NCBI NO: 34393835 NR Description: putative ribose-5-phosphate isomerase [Oryza
  misc_feature (1)..(206): Homolog of NCBI NO: 38347196 NR Description: OSJNBa0023J03.8 [Oryza sativa (japonica
  misc_feature (1)..(212): Homolog of NCBI NO: 13430836 NR Description: putative ribose 5-phosphate isomerase
  misc_feature (1)..(212): Homolog of NCBI NO: 15223936 NR Description: putative ribose 5-phosphate isomerase; protein At1g71100.1, supported by cDNA: 3116., supported by cDNA: [Arabidopsis thaliana] >gi|25329397|pir||E96735 hypothetical
  misc_feature (1)..(212): Homolog of NCBI NO: 21592672 NR Description: putative ribose 5-phosphate isomerase
  misc_feature (1)..(212): Homolog of NCBI NO: 15226223 NR Description: putative ribose 5-phosphate isomerase; protein At2g01290.1, supported by cDNA: gi_15809809, supported by cDNA:
  misc_feature (1)..(212): Homolog of NCBI NO: 15229349 NR Description: putative ribose 5-phosphate isomerase; protein At3g04790.1, supported by cDNA: 6349., supported by cDNA:
  misc_feature (1)..(206): Homolog of NCBI NO: 38347196 NR Description: OSJNBa0023J03.8 [Oryza sativa (japonica
  misc_feature (1)..(212): Homolog of NCBI NO: 13430836 NR Description: putative ribose 5-phosphate isomerase
  misc_feature (1)..(212): Homolog of NCBI NO: 15223936 NR Description: putative ribose 5-phosphate isomerase; protein At1g71100.1, supported by cDNA: 3116., supported by cDNA: [Arabidopsis thaliana] >gi|25329397|pir||E96735 hypothetical
  misc_feature (1)..(212): Homolog of NCBI NO: 21592672 NR Description: putative ribose 5-phosphate isomerase
  misc_feature (1)..(212): Homolog of NCBI NO: 15226223 NR Description: putative ribose 5-phosphate isomerase; protein At2g01290.1, supported by cDNA: gi_15809809, supported by cDNA:
  misc_feature (1)..(212): Homolog of NCBI NO: 15229349 NR Description: putative ribose 5-phosphate isomerase; protein At3g04790.1, supported by cDNA: 6349., supported by cDNA:
  misc_feature (1)..(212): Homolog of NCBI NO: 21594002 NR Description: putative ribose 5-phosphate isomerase
  misc_feature (1)..(212): Homolog of NCBI NO: 18654317 NR Description: ribose-5-phosphate isomerase [Spinacia oleracea]
  misc_feature (1)..(212): Homolog of NCBI NO: 34393835 NR Description: putative ribose-5-phosphate isomerase [Oryza
  misc_feature (1)..(212): Homolog of NCBI NO: 15226223 NR Description: putative ribose 5-phosphate isomerase; protein At2g01290.1, supported by cDNA: gi_15809809, supported by cDNA:
  misc_feature (1)..(212): Homolog of NCBI NO: 21594002 NR Description: putative ribose 5-phosphate isomerase
  misc_feature (1)..(212): Homolog of NCBI NO: 34393836 NR Description: putative ribose-5-phosphate isomerase [Oryza
  misc_feature (1)..(212): Homolog of NCBI NO: 13430836 NR Description: putative ribose 5-phosphate isomerase
  misc_feature (1)..(206): Homolog of NCBI NO: 38347196 NR Description: OSJNBa0023J03.8 [Oryza sativa (japonica
MVLGLGTGSTAAFAVAEIGALLAAGKLEKIVGVPTSKRTFEQAQSLGIPLSTLDDNPLIDLAIDGADEVDPDLNLVKGRGGALLREKMVEAASDKFIVIVDETKLVDGLGGSGLAMPVEVVQFCWKYNLVRLQELFKEEGVEAKLRFEGDKPYVTDNSNYIVDLYFKTPIKDALAAGQEIAALEGVVDHGLFLNMASSVIIAGTDGVSVKTK

SEQ ID NO: 4800 - protein, 178 aa, Zea mays subsp. mays
  peptide (1)..(178): Ceres Seq. ID no. 12386872
PPTQPLTITIAASLHHQLPIASPSSPHTPDLTSPNCSTSPPATHTCSHGRHRDLSPPPPNRRAPCGLRPPRPPRGRPRAVRAGGGGGGADAGRPQAAGGGARRRAGEERDGARARDGLHGRLRRRRDRRAPGRGQAREDRRRAHIQAHLRAGAVARHPALHARRQPAHRPRHRRCRRG

SEQ ID NO: 4801 - DNA, 1650 bp, Zea mays subsp. mays
  misc_feature (1)..(1650): Ceres Seq. ID no. 12409835
  misc_feature: MA Experiment ID: 108530 Result: Down-regulated in Transcription
  misc_feature: MA Experiment 108530 PARAMETER Experiment Name: Zm_Imbibed_Seeds_P Parameter: Age (day) Value: 6 vs. 2
  misc_feature: MA Experiment 108530 PARAMETER Experiment Name: Zm_Imbibed_Seeds_P Parameter: Organism Value: Zea mays
  misc_feature: MA Experiment 108530 PARAMETER Experiment Name: Zm_Imbibed_Seeds_P Parameter: Plant Line Value: 35A19
  misc_feature: MA Experiment 108530 PARAMETER Experiment Name: Zm_Imbibed_Seeds_P Parameter: Tissue Value: Aerial vs. Embryo
  misc_feature: MA Experiment ID: 108544 Result: Up-regulated in Transcription
  misc_feature: MA Experiment ID: 108687 Result: Up-regulated in Transcription
  misc_feature: MA Experiment 108687 PARAMETER Experiment Name: Zm_Embryos-Flowers__P Parameter: Tissue Value: Embryo vs. Aerial+
  misc_feature: MA Experiment ID: 108688 Result: Down-regulated in Transcription
  misc_feature: MA Experiment 108688 PARAMETER Experiment Name: Zm_Embryos-Flowers__P Parameter: Tissue Value: Immature Flowers vs. Aerial+
  misc_feature: MA Experiment ID: 20000108 Result: Up-regulated in Transcription
  misc_feature: MA Experiment 20000108 PARAMETER Experiment Name: Zm_Root-Tips_P Parameter: Age (day) Value: 12
  misc_feature: MA Experiment 20000108 PARAMETER Experiment Name: Zm_Root-Tips_P Parameter: Organism Value: Zea mays
  misc_feature: MA Experiment 20000108 PARAMETER Experiment Name: Zm_Root-Tips_P Parameter: Tissue Value: Root tips vs. Root mid region    35
  misc_feature: MA Experiment 20000108 PARAMETER Experiment Name: Zm_Root-Tips_P Parameter: Tissue Value: Root tips vs. Root mid region   Sequence Listing-Misc Features (4)
  misc_feature: MA Experiment ID: 20000477 Result: Up-regulated in Transcription
  misc_feature: MA Experiment 20000477 PARAMETER Experiment Name: Zm_5mM_SA_P Parameter: Age (day) Value: 10
  misc_feature: MA Experiment 20000477 PARAMETER Experiment Name: Zm_5mM_SA_P Parameter: Organism Value: Zea mays
  misc_feature: MA Experiment 20000477 PARAMETER Experiment Name: Zm_5mM_SA_P Parameter: Plant Line Value: 35A19
  misc_feature: MA Experiment 20000477 PARAMETER Experiment Name: Zm_5mM_SA_P Parameter: Timepoint (hr) Value: 48
  misc_feature: MA Experiment 20000477 PARAMETER Experiment Name: Zm_5mM_SA_P Parameter: Tissue Value: Aerial
  misc_feature: MA Experiment 20000477 PARAMETER Experiment Name: Zm_5mM_SA_P Parameter: Treatment Value: 5mM SA vs. No Treatment
  misc_feature: MA Experiment ID: 20000478 Result: Up-regulated in Transcription
  misc_feature: MA Experiment 20000478 PARAMETER Experiment Name: Zm_5mM_SA_P Parameter: Age (day) Value: 11
  misc_feature: MA Experiment 20000478 PARAMETER Experiment Name: Zm_5mM_SA_P Parameter: Organism Value: Zea mays
  misc_feature: MA Experiment 20000478 PARAMETER Experiment Name: Zm_5mM_SA_P Parameter: Plant Line Value: 35A19
  misc_feature: MA Experiment 20000478 PARAMETER Experiment Name: Zm_5mM_SA_P Parameter: Timepoint (hr) Value: 72
  misc_feature: MA Experiment 20000478 PARAMETER Experiment Name: Zm_5mM_SA_P Parameter: Tissue Value: Aerial
  misc_feature: MA Experiment 20000478 PARAMETER Experiment Name: Zm_5mM_SA_P Parameter: Treatment Value: 5mM SA vs. No Treatment
  misc_feature: MA Experiment ID: 20000487 Result: Up-regulated in Transcription
  misc_feature: MA Experiment 20000487 PARAMETER Experiment Name: Zm_50mM_NH4NO3_L_to_H_P Parameter: Organism Value: Zea mays
  misc_feature: MA Experiment 20000487 PARAMETER Experiment Name: Zm_50mM_NH4NO3_L_to_H_P Parameter: Timepoint (hr) Value: 4
  misc_feature: MA Experiment 20000487 PARAMETER Experiment Name: Zm_50mM_NH4NO3_L_to_H_P Parameter: Tissue Value: Leaves
  misc_feature: MA Experiment 20000487 PARAMETER Experiment Name: Zm_50mM_NH4NO3_L_to_H_P Parameter: Treatment Value: 50mM NH4NO3 vs. 100mM Mannitol
agcttcttctccctactcctccagtcctccgtcatccgtttcgctctctgccgccgccaccgcacaagaagctagctcctgcctgtaccgccccgtcatggcgatgctatcccgcgcagcctcctccgcggcccggcgcccgctgctgccgccgcctaggcttctggcggtgagggcgatggcgtcgtcgctcttcggccacgtcgagccggcgcccaaggaccccatcctcggcgtcaccgaggctttcctcgccgacccctcgtccgacaaagtgaacgtcggcgtcggcgcctaccgggacgacaacggccagcccgtcgtgctcagctgcgtgcgcgaggccgagcgccggatcgcgggcaacctcaacatggagtaccttccgatgggaggcagcgtcaagatgattgaagagtcactgaagctggcgtacggagaagattctgacttcatcaaagataagaggatagcagcggtgcaggcgctttcaggcactggtgcctgccggctctttgctgatttccaaaagcgttttttgccggattcgcagatctacataccaacaccaacgtggtccaaccatcacaatatttggagggatgctcaagtgccacagaagacattcacatactaccatccagagtcaagagggcttgatttctcaggattgatgaatgaaatcaagaatgctccagatggttcattctttttgcttcatgcatgtgctcataatcccaccggtgtagatcctacggaggaacaatggagagaaatatcccatcagttcaaggtgaaaaaaacattttccattctttgacatggcataccaagggtttgccagtggtgatccagagagagatgccaaggcaatccgaattttccttgaagatggacaccaaattggatgtgctcagtcatacgcaaagaacatgggactttatggacaaagagcaggatgcctgagtattttgtgtgaggatgagatgcaagcagttgctgtcaagagccaactgcaacagatcgcaagaccaatgtacagcaacccacctgttcatggtgcactggttgtttctataatcctcagtgatccagaattgaagagtttgtggttaaaagaagtcaagggtatggctgatcgtatcattggaatgcggaaggcacttaaggaaaatcttgaaaagctaggttcacctttgtcatgggatcatatcactaatcagattggaatgttctgctacagtgggatgacacctgaacaagttgaccgtttaacaaatgaataccacatttacatgacccgcaatgggaggataagcatggctggtgttacgacaggaaatgttggttacctagcaaatgcaattcatgaggttaccaaaccaaattgagttagggtcctaccttctttggtcgatggaagctgatggaatgagactgtgaagcggcgtttccccccctctgttcctgacagaaataagtttagcctgctgctaccatatacatggacacagactcagatgtagacactcaagttttgagagctgtgatcctgtttcatttaatcaaaaacaattttgtttttttttcatcttgtcatggcaaatgttacaccagctgcaaaataattacaataattgatcttgatcc

SEQ ID NO: 4802 - protein, 272 aa, Zea mays subsp. mays
  peptide (1)..(272): Ceres Seq. ID no. 12409836
  misc_feature (142)..(269): Pfam Name: Aminotransferase class I and II Pfam Description: Aminotransferase class I and II
  misc_feature (33)..(269): Homolog of NCBI NO: 100728 NR Description: aspartate transaminase (EC 2.6.1.1) AAT3 - proso millet >gi|20601|emb|CAA45024.1| aspartate [Panicum miliaceum] >gi|435459|dbj|BAA04993.1| aspartate
  misc_feature (33)..(269): Homolog of NCBI NO: 100726 NR Description: aspartate transaminase (EC 2.6.1.1) AAT1 - proso millet >gi|20597|emb|CAA45022.1| aspartate
  misc_feature (33)..(269): Homolog of NCBI NO: 2130067 NR Description: aspartate transaminase (EC 2.6.1.1) precursor,
  misc_feature (33)..(270): Homolog of NCBI NO: 15224592 NR Description: aspartate aminotransferase (AAT1); protein id: supported by cDNA: 34360., supported by cDNA: gi_16649084, by cDNA: gi_693687 [Arabidopsis thaliana]
  misc_feature (33)..(269): Homolog of NCBI NO: 1362046 NR Description: aspartate transaminase (EC 2.6.1.1) precursor - >gi|710596|gb|AAA98603.1| mitochondrial aspartate
  misc_feature (33)..(270): Homolog of NCBI NO: 6980972 NR Description: glutamate oxaloacetate transaminase 2; Glutamate transaminase 2, mitochondrial (aspartate aminotransferase 2) norvegicus] >gi|112987|sp|P00507|AATM_RAT ASPARTATE
  misc_feature (33)..(270): Homolog of NCBI NO: 2690302 NR Description: aspartate aminotransferase precursor [Mus
  misc_feature (33)..(270): Homolog of NCBI NO: 6754036 NR Description: glutamate oxaloacetate transaminase 2, mitochondrial aspartate aminotransferase; plasma membrane fatty binding protein [Mus musculus] >gi|112984|sp|P05202|AATM_MOUSE A)
  misc_feature (51)..(270): Homolog of NCBI NO: 4504069 NR Description: aspartate aminotransferase 2 precursor; transaminase 2, mitochondrial [Homo sapiens] Aspartate aminotransferase, mitochondrial precursor (Transaminase
  misc_feature (1)..(269): Homolog of NCBI NO: 445118 NR Description: Asp aminotransferase
ASSPYSSSPPSSVSLSAAATAQEASSCLYRPVMAMLSRAASSAARRPLLPPPRLLAVRAMASSLFGHVEPAPKDPILGVTEAFLADPSSDKVNVGVGAYRDDNGQPVVLSCVREAERRIAGNLNMEYLPMGGSVKMIEESLKLAYGEDSDFIKDKRIAAVQALSGTGACRLFADFQKRFLPDSQIYIPTPTWSNHHNIWRDAQVPQKTFTYYHPESRGLDFSGLMNEIKNAPDGSFFLLHACAHNPTGVDPTEEQWREISHQFKVKKTFSIL

SEQ ID NO: 4803 - protein, 240 aa, Zea mays subsp. mays
  peptide (1)..(240): Ceres Seq. ID no. 12409837
  misc_feature (110)..(237): Pfam Name: Aminotransferase class I and II Pfam Description: Aminotransferase class I and II
  misc_feature (1)..(237): Homolog of NCBI NO: 100728 NR Description: aspartate transaminase (EC 2.6.1.1) AAT3 - proso millet >gi|20601|emb|CAA45024.1| aspartate [Panicum miliaceum] >gi|435459|dbj|BAA04993.1| aspartate
  misc_feature (1)..(237): Homolog of NCBI NO: 100726 NR Description: aspartate transaminase (EC 2.6.1.1) AAT1 - proso millet >gi|20597|emb|CAA45022.1| aspartate
  misc_feature (1)..(237): Homolog of NCBI NO: 2130067 NR Description: aspartate transaminase (EC 2.6.1.1) precursor,
  misc_feature (1)..(238): Homolog of NCBI NO: 15224592 NR Description: aspartate aminotransferase (AAT1); protein id: supported by cDNA: 34360., supported by cDNA: gi_16649084, by cDNA: gi_693687 [Arabidopsis thaliana]
  misc_feature (1)..(237): Homolog of NCBI NO: 1362046 NR Description: aspartate transaminase (EC 2.6.1.1) precursor - >gi|710596|gb|AAA98603.1| mitochondrial aspartate
  misc_feature (1)..(238): Homolog of NCBI NO: 6980972 NR Description: glutamate oxaloacetate transaminase 2; Glutamate transaminase 2, mitochondrial (aspartate aminotransferase 2) norvegicus] >gi|112987|sp|P00507|AATM_RAT ASPARTATE
  misc_feature (1)..(238): Homolog of NCBI NO: 2690302 NR Description: aspartate aminotransferase precursor [Mus
  misc_feature (1)..(238): Homolog of NCBI NO: 6754036 NR Description: glutamate oxaloacetate transaminase 2, mitochondrial aspartate aminotransferase; plasma membrane fatty binding protein [Mus musculus] >gi|112984|sp|P05202|AATM_MOUSE A)
  misc_feature (19)..(238): Homolog of NCBI NO: 4504069 NR Description: aspartate aminotransferase 2 precursor; transaminase 2, mitochondrial [Homo sapiens] Aspartate aminotransferase, mitochondrial precursor (Transaminase
  misc_feature (1)..(237): Homolog of NCBI NO: 445118 NR Description: Asp aminotransferase
MAMLSRAASSAARRPLLPPPRLLAVRAMASSLFGHVEPAPKDPILGVTEAFLADPSSDKVNVGVGAYRDDNGQPVVLSCVREAERRIAGNLNMEYLPMGGSVKMIEESLKLAYGEDSDFIKDKRIAAVQALSGTGACRLFADFQKRFLPDSQIYIPTPTWSNHHNIWRDAQVPQKTFTYYHPESRGLDFSGLMNEIKNAPDGSFFLLHACAHNPTGVDPTEEQWREISHQFKVKKTFSIL

SEQ ID NO: 4804 - protein, 238 aa, Zea mays subsp. mays
  peptide (1)..(238): Ceres Seq. ID no. 12409838
  misc_feature (108)..(235): Pfam Name: Aminotransferase class I and II Pfam Description: Aminotransferase class I and II
  misc_feature (1)..(235): Homolog of NCBI NO: 100728 NR Description: aspartate transaminase (EC 2.6.1.1) AAT3 - proso millet >gi|20601|emb|CAA45024.1| aspartate [Panicum miliaceum] >gi|435459|dbj|BAA04993.1| aspartate
  misc_feature (1)..(235): Homolog of NCBI NO: 100726 NR Description: aspartate transaminase (EC 2.6.1.1) AAT1 - proso millet >gi|20597|emb|CAA45022.1| aspartate
  misc_feature (1)..(235): Homolog of NCBI NO: 2130067 NR Description: aspartate transaminase (EC 2.6.1.1) precursor,
  misc_feature (1)..(236): Homolog of NCBI NO: 15224592 NR Description: aspartate aminotransferase (AAT1); protein id: supported by cDNA: 34360., supported by cDNA: gi_16649084, by cDNA: gi_693687 [Arabidopsis thaliana]
  misc_feature (1)..(235): Homolog of NCBI NO: 1362046 NR Description: aspartate transaminase (EC 2.6.1.1) precursor - >gi|710596|gb|AAA98603.1| mitochondrial aspartate
  misc_feature (1)..(236): Homolog of NCBI NO: 6980972 NR Description: glutamate oxaloacetate transaminase 2; Glutamate transaminase 2, mitochondrial (aspartate aminotransferase 2) norvegicus] >gi|112987|sp|P00507|AATM_RAT ASPARTATE
  misc_feature (1)..(236): Homolog of NCBI NO: 2690302 NR Description: aspartate aminotransferase precursor [Mus
  misc_feature (1)..(236): Homolog of NCBI NO: 6754036 NR Description: glutamate oxaloacetate transaminase 2, mitochondrial aspartate aminotransferase; plasma membrane fatty binding protein [Mus musculus] >gi|112984|sp|P05202|AATM_MOUSE A)
  misc_feature (17)..(236): Homolog of NCBI NO: 4504069 NR Description: aspartate aminotransferase 2 precursor; transaminase 2, mitochondrial [Homo sapiens] Aspartate aminotransferase, mitochondrial precursor (Transaminase
  misc_feature (1)..(235): Homolog of NCBI NO: 445118 NR Description: Asp aminotransferase
MLSRAASSAARRPLLPPPRLLAVRAMASSLFGHVEPAPKDPILGVTEAFLADPSSDKVNVGVGAYRDDNGQPVVLSCVREAERRIAGNLNMEYLPMGGSVKMIEESLKLAYGEDSDFIKDKRIAAVQALSGTGACRLFADFQKRFLPDSQIYIPTPTWSNHHNIWRDAQVPQKTFTYYHPESRGLDFSGLMNEIKNAPDGSFFLLHACAHNPTGVDPTEEQWREISHQFKVKKTFSIL

SEQ ID NO: 4805 - DNA, 1415 bp, Zea mays subsp. mays
  misc_feature (1)..(1415): Ceres Seq. ID no. 12363295
  misc_feature: MA Experiment ID: 108529 Result: Down-regulated in Transcription
  misc_feature: MA Experiment 108529 PARAMETER Experiment Name: Zm_Imbibed_Seeds_P Parameter: Age (day) Value: 5 vs. 2
  misc_feature: MA Experiment 108529 PARAMETER Experiment Name: Zm_Imbibed_Seeds_P Parameter: Organism Value: Zea mays
  misc_feature: MA Experiment 108529 PARAMETER Experiment Name: Zm_Imbibed_Seeds_P Parameter: Plant Line Value: 35A19
  misc_feature: MA Experiment 108529 PARAMETER Experiment Name: Zm_Imbibed_Seeds_P Parameter: Tissue Value: Roots vs. Embryo
  misc_feature: MA Experiment ID: 108535 Result: Up-regulated in Transcription
  misc_feature: MA Experiment 108535 PARAMETER Experiment Name: Zm_Meristem_P Parameter: Age (day) Value: 8
  misc_feature: MA Experiment 108535 PARAMETER Experiment Name: Zm_Meristem_P Parameter: Organism Value: Zea mays
  misc_feature: MA Experiment 108535 PARAMETER Experiment Name: Zm_Meristem_P Parameter: Plant Line Value: 35A19
  misc_feature: MA Experiment 108535 PARAMETER Experiment Name: Zm_Meristem_P Parameter: Tissue Value: Root Meristem vs. Above Root Meristem
  misc_feature: MA Experiment ID: 108544 Result: Down-regulated in Transcription
  misc_feature: MA Experiment ID: 108546 Result: Down-regulated in Transcription
  misc_feature: MA Experiment 108546 PARAMETER Experiment Name: Zm_Imbibed_Seeds_P Parameter: Age (day) Value: 3 vs. 2
  misc_feature: MA Experiment 108546 PARAMETER Experiment Name: Zm_Imbibed_Seeds_P Parameter: Organism Value: Zea mays
  misc_feature: MA Experiment 108546 PARAMETER Experiment Name: Zm_Imbibed_Seeds_P Parameter: Plant Line Value: 35A19
  misc_feature: MA Experiment 108546 PARAMETER Experiment Name: Zm_Imbibed_Seeds_P Parameter: Tissue Value: Roots vs. Embryo
  misc_feature: MA Experiment ID: 20000479 Result: Down-regulated in Transcription
  misc_feature: MA Experiment 20000479 PARAMETER Experiment Name: Zm_Drought_P Parameter: Age (day) Value: 10
  misc_feature: MA Experiment 20000479 PARAMETER Experiment Name: Zm_Drought_P Parameter: Organism Value: Zea mays
  misc_feature: MA Experiment 20000479 PARAMETER Experiment Name: Zm_Drought_P Parameter: Plant Line Value: 35A19
  misc_feature: MA Experiment 20000479 PARAMETER Experiment Name: Zm_Drought_P Parameter: Timepoint (hr) Value: 48
  misc_feature: MA Experiment 20000479 PARAMETER Experiment Name: Zm_Drought_P Parameter: Tissue Value: Aerial
  misc_feature: MA Experiment 20000479 PARAMETER Experiment Name: Zm_Drought_P Parameter: Treatment Value: Drought vs. No Drought
  misc_feature: MA Experiment ID: 20000492 Result: Up-regulated in Transcription
  misc_feature: MA Experiment 20000492 PARAMETER Experiment Name: Zm_Hybrid_Seed_Dev_P Parameter: DAP Value: 12
  misc_feature: MA Experiment 20000492 PARAMETER Experiment Name: Zm_Hybrid_Seed_Dev_P Parameter: Organism Value: Zea mays
  misc_feature: MA Experiment 20000492 PARAMETER Experiment Name: Zm_Hybrid_Seed_Dev_P Parameter: Plant Line Value: 35A19
  misc_feature: MA Experiment 20000492 PARAMETER Experiment Name: Zm_Hybrid_Seed_Dev_P Parameter: Tissue Value: Fert Kernel vs. Unfert Floret
  misc_feature: MA Experiment ID: 20000535 Result: Up-regulated in Transcription
  misc_feature: MA Experiment 20000535 PARAMETER Experiment Name: Zm_Hybrid_Seed_Dev_P Parameter: DAP Value: 30 vs. 12
  misc_feature: MA Experiment 20000535 PARAMETER Experiment Name: Zm_Hybrid_Seed_Dev_P Parameter: Organism Value: Zea mays
  misc_feature: MA Experiment 20000535 PARAMETER Experiment Name: Zm_Hybrid_Seed_Dev_P Parameter: Plant Line Value: 35A19
  misc_feature: MA Experiment 20000535 PARAMETER Experiment Name: Zm_Hybrid_Seed_Dev_P Parameter: Tissue Value: Embryo vs. Unfert Floret
  misc_feature: MA Experiment ID: 20000632 Result: Down-regulated in Transcription
  misc_feature: MA Experiment 20000632 PARAMETER Experiment Name: Zm_Herbicide-Treatments_P Parameter: Timepoint (hr) Value: 4
  misc_feature: MA Experiment 20000632 PARAMETER Experiment Name: Zm_Herbicide-Treatments_P Parameter: Tissue Value: Aerial
  misc_feature: MA Experiment 20000632 PARAMETER Experiment Name: Zm_Herbicide-Treatments_P Parameter: Treatment Value: Glean vs. No Treatment
gtgaatcgtgatcccctgtggttccttccgagcaagggagaaagaatgcagtcgtctcctccgcgtcgccctcctccagtgtagaaaactgcagcccgtatagtgtcatcggcgcaaagggacgaggtcgcagctgccgatgcaggagacggcagcaggcgcctatccctcctacatggagccggagccggagcagacgggtgcatcggcgactgtgggtgtgatgggctgccgctcgcccacgtgcccgccttggctccaagcggccattgcagacatcgatcagcgggtgcgcgcgctggcggtggacgatgccgcgccgcccacggagcactccttcgcggagcgcgccgaggagtactaccagaagcggccgcagctgctggccctcctcgccgacctccaccgccgctacctctgcctggccgaccgctactgccaccaccagcacaagcgagagcagccctcgctgccggcgtctgcctccgactgcggctcgtccgacgtcgacgaccgctgctccgacgccggcagctcgctctccttccaggcccagcacccgccgccggtggccggggtccccgccgaggaaggggaggagctgctggtggcggagctggtggccgcgtgggtggagcgcgacgtgctggcggacgaggcggcgcggcgcgcggcggagtcggcgcgcaggatccagctgcaggggagcctggtggaggtgctggagtcggagcgcctggtgctgctgggcgagaacgcgcgcctggggttccgcgcgacggcggccgaggacgaggccgcggcggcggcgnccgacctgggctacgcgcgccgccgcgccgccgagatggcccgcctcgtgctcaggctccgcgaggaccaccgcgcctgcgtgctggggcgcagggccgaggcgctgcaggcgcgggtgtacgcgctggagctccgcaaccgcgagtgctgcgaggccacggcggcgtgggaggccgaggtccagcggctcagcgcagagaaccgacgcctcgcggaccaagccatgatggcgaggaggaagcgcaagggcggtggtggtgggtggtgggcgagggtcaggatggcagcggccgggtggacgccgtgtgcgcccgcggtcacggtcgccgagcagaccaaggggaaggaggacggcaagtaccaccactacggcggcggatgcttctgtgtctagactaggagatgagacggcggcggcgatctagccctcctttttgttagtagtaattactattataattcaggacttggcaggtgaatgtgaatgctgctgggtcggatgcataattctggagaagacgatgattgtgctccgcaggcactagtaaaacaacatgcaattcgtatgatctgttcaatacattataccatggtgttcccgc

SEQ ID NO: 4806 - protein, 355 aa, Zea mays subsp. mays
  peptide (1)..(355): Ceres Seq. ID no. 12363296
  misc_feature (36)..(355): Homolog of NCBI NO: 24431596 NR Description: Unknown protein [Oryza sativa (japonica
  misc_feature (43)..(262): Homolog of NCBI NO: 9294158 NR Description: contains similarity to unknown
  misc_feature (43)..(262): Homolog of NCBI NO: 30684631 NR Description: expressed protein [Arabidopsis thaliana]
  misc_feature (43)..(303): Homolog of NCBI NO: 22330107 NR Description: hypothetical protein; protein id: At1g48405.1
  misc_feature (225)..(225): Xaa is any aa, unknown or other
MQETAAGAYPSYMEPEPEQTGASATVGVMGCRSPTCPPWLQAAIADIDQRVRALAVDDAAPPTEHSFAERAEEYYQKRPQLLALLADLHRRYLCLADRYCHHQHKREQPSLPASASDCGSSDVDDRCSDAGSSLSFQAQHPPPVAGVPAEEGEELLVAELVAAWVERDVLADEAARRAAESARRIQLQGSLVEVLESERLVLLGENARLGFRATAAEDEAAAAAXDLGYARRRAAEMARLVLRLREDHRACVLGRRAEALQARVYALELRNRECCEATAAWEAEVQRLSAENRRLADQAMMARRKRKGGGGGWWARVRMAAAGWTPCAPAVTVAEQTKGKEDGKYHHYGGGCFCV

SEQ ID NO: 4807 - protein, 343 aa, Zea mays subsp. mays
  peptide (1)..(343): Ceres Seq. ID no. 12363297
  misc_feature (24)..(343): Homolog of NCBI NO: 24431596 NR Description: Unknown protein [Oryza sativa (japonica
  misc_feature (31)..(250): Homolog of NCBI NO: 9294158 NR Description: contains similarity to unknown
  misc_feature (31)..(250): Homolog of NCBI NO: 30684631 NR Description: expressed protein [Arabidopsis thaliana]
  misc_feature (31)..(291): Homolog of NCBI NO: 22330107 NR Description: hypothetical protein; protein id: At1g48405.1
  misc_feature (213)..(213): Xaa is any aa, unknown or other
MEPEPEQTGASATVGVMGCRSPTCPPWLQAAIADIDQRVRALAVDDAAPPTEHSFAERAEEYYQKRPQLLALLADLHRRYLCLADRYCHHQHKREQPSLPASASDCGSSDVDDRCSDAGSSLSFQAQHPPPVAGVPAEEGEELLVAELVAAWVERDVLADEAARRAAESARRIQLQGSLVEVLESERLVLLGENARLGFRATAAEDEAAAAAXDLGYARRRAAEMARLVLRLREDHRACVLGRRAEALQARVYALELRNRECCEATAAWEAEVQRLSAENRRLADQAMMARRKRKGGGGGWWARVRMAAAGWTPCAPAVTVAEQTKGKEDGKYHHYGGGCFCV

SEQ ID NO: 4808 - protein, 327 aa, Zea mays subsp. mays
  peptide (1)..(327): Ceres Seq. ID no. 12363298
  misc_feature (8)..(327): Homolog of NCBI NO: 24431596 NR Description: Unknown protein [Oryza sativa (japonica
  misc_feature (15)..(234): Homolog of NCBI NO: 9294158 NR Description: contains similarity to unknown
  misc_feature (15)..(234): Homolog of NCBI NO: 30684631 NR Description: expressed protein [Arabidopsis thaliana]
  misc_feature (15)..(275): Homolog of NCBI NO: 22330107 NR Description: hypothetical protein; protein id: At1g48405.1
  misc_feature (197)..(197): Xaa is any aa, unknown or other
MGCRSPTCPPWLQAAIADIDQRVRALAVDDAAPPTEHSFAERAEEYYQKRPQLLALLADLHRRYLCLADRYCHHQHKREQPSLPASASDCGSSDVDDRCSDAGSSLSFQAQHPPPVAGVPAEEGEELLVAELVAAWVERDVLADEAARRAAESARRIQLQGSLVEVLESERLVLLGENARLGFRATAAEDEAAAAAXDLGYARRRAAEMARLVLRLREDHRACVLGRRAEALQARVYALELRNRECCEATAAWEAEVQRLSAENRRLADQAMMARRKRKGGGGGWWARVRMAAAGWTPCAPAVTVAEQTKGKEDGKYHHYGGGCFCV

SEQ ID NO: 4809 - DNA, 1826 bp, Zea mays subsp. mays
  misc_feature (1)..(1826): Ceres Seq. ID no. 12367546
  misc_feature: MA Experiment ID: 108527 Result: Up-regulated in Transcription
  misc_feature: MA Experiment 108527 PARAMETER Experiment Name: Zm_5mM_NO_P Parameter: Age (day) Value: 8
  misc_feature: MA Experiment 108527 PARAMETER Experiment Name: Zm_5mM_NO_P Parameter: Organism Value: Zea mays
  misc_feature: MA Experiment 108527 PARAMETER Experiment Name: Zm_5mM_NO_P Parameter: Plant Line Value: 35A19
  misc_feature: MA Experiment 108527 PARAMETER Experiment Name: Zm_5mM_NO_P Parameter: Timepoint (hr) Value: 6
  misc_feature: MA Experiment 108527 PARAMETER Experiment Name: Zm_5mM_NO_P Parameter: Tissue Value: Aerial
  misc_feature: MA Experiment 108527 PARAMETER Experiment Name: Zm_5mM_NO_P Parameter: Treatment Value: 5mM NO vs. No Treatment
aaaagagtaattgcggtcgtggttccggattccccccgccgccgccgcaagaccggagccctaattccaagcggtaaacgatgaggccgcacgcgttgggtatgggtggcggtggcgtggggaggcggaaggcggtggccgccgccgccgcggctagccgggagtggatggtggtgccggcgtcgggcccggcgcgggtggaggaagcagggaagcacgcggtgatggcgcgtacggggcttcccgcgcgcgatctcagggtgctcgacccgttactctcgtacccgtccacgatcctgggccgcgagcgcgccatcgtggtcaacttggagcgcgtcaaagctctgatcacagccgcggaggtgctgcttcctaacaccaaggatcccgccttcgcgcgcttcgttcgcgacctccagacccgcgtcctcgcatcttcgtctgaccagctgaactcactgacatggaaggtgaatcacctattgttgcttcaccatttcctgtaccaagttcatccaaagggcatgaaatggagatgactaagaagactgctgctgttgtgcctgaaatgactagcagcagcagtatgcccaatttagctgttgcaaaagatggaaataccaaggttttgcctttcgaatttcgagctcttgaagtgtgccttgaatcagcctgcagatctttggaagaggaaacttctactctggagctagaggcatatccagcattagatgagctgacatcaaagatcagcacattaaaccttgaacgagttaggcaaatcaagagtcgtctggttgcgatatctggtcgagtacagaaggtgagggatgagcttgagcatttactggatgatgaaatggatatggctgaaatgtacttgacagagaagcttactcaacaagaaatcagtgaggcttcatctagagctgaggttgatgatgcatctcttacagaagacgatagggatgaagattatagaagtgaaccagatggaagcaatggtagtgttataggttataagcccaatattgaagagctagagatgcttctagaggcttactttgtgcaaattgatggcacacttaacaagctatcacatctgagggagtacgtcgatgacacagaagattatatcaatataatgttggacgacaagcagaatcagctgctgcagatgggagttatgctgtcaactgctactgtcgtcatcactgctggagtggctgtagttggtctttttggtatgaatattggcatatcactttacgcagacccaacaaccgaggaggaaactcgagcagcaaataggaaattttgggaaactactttcgggaccgttgctggctgcgtgattttgtacatcatagccatgggttggggaaagagaagtggattactgcaatgatgcggaagcatgactgcatgagtgttctgtacccagtgaatactgggttcacaaaaatctccaaaatgagagattattgtattggctaacatctcctgagtgagcggcgcctaactagacaaagaattagctaacattttctacaatactagtattgtcttgactatttaacttggagaactcaagaacatgatgcttaagagggaatggtgcaaggccatacgtcttaaggtagggcttggaataatcagttgagttttcttttggtgttatgccaaaattatctcataggatttcagtgagtttgtccatggttaatgtagtcttagtttcttcaagttttgacttgtacatattgttccactctatgtcttccagttctatctcatttgcccttctagcactaaagggttgttct

SEQ ID NO: 4810 - protein, 314 aa, Zea mays subsp. mays
  peptide (1)..(314): Ceres Seq. ID no. 12367547
  misc_feature (1)..(314): Homolog of NCBI NO: 20804892 NR Description: P0497A05.17 [Oryza sativa (japonica
  misc_feature (35)..(314): Homolog of NCBI NO: 34908640 NR Description: P0677H08.20 [Oryza sativa (japonica
  misc_feature (51)..(313): Homolog of NCBI NO: 30698045 NR Description: expressed protein [Arabidopsis thaliana] contains similarity to unknown [Arabidopsis thaliana] >gi|17529326|gb|AAL38890.1| unknown
  misc_feature (57)..(313): Homolog of NCBI NO: 25360941 NR Description: MRS2-7 [Arabidopsis thaliana]
  misc_feature (57)..(313): Homolog of NCBI NO: 30682808 NR Description: expressed protein [Arabidopsis thaliana]
  misc_feature (49)..(177): Homolog of NCBI NO: 30685422 NR Description: expressed protein [Arabidopsis thaliana]
  misc_feature (51)..(264): Homolog of NCBI NO: 30698047 NR Description: expressed protein [Arabidopsis thaliana]
  misc_feature (119)..(314): Homolog of NCBI NO: 30685422 NR Description: expressed protein [Arabidopsis thaliana]
  misc_feature (57)..(313): Homolog of NCBI NO: 40539050 NR Description: putative CorA-like Mg2+ transporter protein
  misc_feature (48)..(313): Homolog of NCBI NO: 18411070 NR Description: putative protein; protein id: At3g58970.1, by cDNA: gi_16209701 [Arabidopsis thaliana] AT3g58970/F17J16_20 [Arabidopsis thaliana]
MEGESPIVASPFPVPSSSKGHEMEMTKKTAAVVPEMTSSSSMPNLAVAKDGNTKVLPFEFRALEVCLESACRSLEEETSTLELEAYPALDELTSKISTLNLERVRQIKSRLVAISGRVQKVRDELEHLLDDEMDMAEMYLTEKLTQQEISEASSRAEVDDASLTEDDRDEDYRSEPDGSNGSVIGYKPNIEELEMLLEAYFVQIDGTLNKLSHLREYVDDTEDYINIMLDDKQNQLLQMGVMLSTATVVITAGVAVVGLFGMNIGISLYADPTTEEETRAANRKFWETTFGTVAGCVILYIIAMGWGKRSGLLQ

SEQ ID NO: 4811 - protein, 292 aa, Zea mays subsp. mays
  peptide (1)..(292): Ceres Seq. ID no. 12367548
  misc_feature (1)..(292): Homolog of NCBI NO: 20804892 NR Description: P0497A05.17 [Oryza sativa (japonica
  misc_feature (13)..(292): Homolog of NCBI NO: 34908640 NR Description: P0677H08.20 [Oryza sativa (japonica
  misc_feature (29)..(291): Homolog of NCBI NO: 30698045 NR Description: expressed protein [Arabidopsis thaliana] contains similarity to unknown [Arabidopsis thaliana] >gi|17529326|gb|AAL38890.1| unknown
  misc_feature (35)..(291): Homolog of NCBI NO: 25360941 NR Description: MRS2-7 [Arabidopsis thaliana]
  misc_feature (35)..(291): Homolog of NCBI NO: 30682808 NR Description: expressed protein [Arabidopsis thaliana]
  misc_feature (27)..(155): Homolog of NCBI NO: 30685422 NR Description: expressed protein [Arabidopsis thaliana]
  misc_feature (29)..(242): Homolog of NCBI NO: 30698047 NR Description: expressed protein [Arabidopsis thaliana]
  misc_feature (97)..(292): Homolog of NCBI NO: 30685422 NR Description: expressed protein [Arabidopsis thaliana]
  misc_feature (35)..(291): Homolog of NCBI NO: 40539050 NR Description: putative CorA-like Mg2+ transporter protein
  misc_feature (26)..(291): Homolog of NCBI NO: 18411070 NR Description: putative protein; protein id: At3g58970.1, by cDNA: gi_16209701 [Arabidopsis thaliana] AT3g58970/F17J16_20 [Arabidopsis thaliana]
MEMTKKTAAVVPEMTSSSSMPNLAVAKDGNTKVLPFEFRALEVCLESACRSLEEETSTLELEAYPALDELTSKISTLNLERVRQIKSRLVAISGRVQKVRDELEHLLDDEMDMAEMYLTEKLTQQEISEASSRAEVDDASLTEDDRDEDYRSEPDGSNGSVIGYKPNIEELEMLLEAYFVQIDGTLNKLSHLREYVDDTEDYINIMLDDKQNQLLQMGVMLSTATVVITAGVAVVGLFGMNIGISLYADPTTEEETRAANRKFWETTFGTVAGCVILYIIAMGWGKRSGLLQ

SEQ ID NO: 4812 - protein, 290 aa, Zea mays subsp. mays
  peptide (1)..(290): Ceres Seq. ID no. 12367549
  misc_feature (1)..(290): Homolog of NCBI NO: 20804892 NR Description: P0497A05.17 [Oryza sativa (japonica
  misc_feature (11)..(290): Homolog of NCBI NO: 34908640 NR Description: P0677H08.20 [Oryza sativa (japonica
  misc_feature (27)..(289): Homolog of NCBI NO: 30698045 NR Description: expressed protein [Arabidopsis thaliana] contains similarity to unknown [Arabidopsis thaliana] >gi|17529326|gb|AAL38890.1| unknown
  misc_feature (33)..(289): Homolog of NCBI NO: 25360941 NR Description: MRS2-7 [Arabidopsis thaliana]
  misc_feature (33)..(289): Homolog of NCBI NO: 30682808 NR Description: expressed protein [Arabidopsis thaliana]
  misc_feature (25)..(153): Homolog of NCBI NO: 30685422 NR Description: expressed protein [Arabidopsis thaliana]
  misc_feature (27)..(240): Homolog of NCBI NO: 30698047 NR Description: expressed protein [Arabidopsis thaliana]
  misc_feature (95)..(290): Homolog of NCBI NO: 30685422 NR Description: expressed protein [Arabidopsis thaliana]
  misc_feature (33)..(289): Homolog of NCBI NO: 40539050 NR Description: putative CorA-like Mg2+ transporter protein
  misc_feature (24)..(289): Homolog of NCBI NO: 18411070 NR Description: putative protein; protein id: At3g58970.1, by cDNA: gi_16209701 [Arabidopsis thaliana] AT3g58970/F17J16_20 [Arabidopsis thaliana]
MTKKTAAVVPEMTSSSSMPNLAVAKDGNTKVLPFEFRALEVCLESACRSLEEETSTLELEAYPALDELTSKISTLNLERVRQIKSRLVAISGRVQKVRDELEHLLDDEMDMAEMYLTEKLTQQEISEASSRAEVDDASLTEDDRDEDYRSEPDGSNGSVIGYKPNIEELEMLLEAYFVQIDGTLNKLSHLREYVDDTEDYINIMLDDKQNQLLQMGVMLSTATVVITAGVAVVGLFGMNIGISLYADPTTEEETRAANRKFWETTFGTVAGCVILYIIAMGWGKRSGLLQ

SEQ ID NO: 4813 - DNA, 1248 bp, Zea mays subsp. mays
  misc_feature (1)..(1248): Ceres Seq. ID no. 12344056
  misc_feature: MA Experiment ID: 108528 Result: Down-regulated in Transcription
  misc_feature: MA Experiment 108528 PARAMETER Experiment Name: Zm_Imbibed_Seeds_P Parameter: Age (day) Value: 5 vs. 2
  misc_feature: MA Experiment 108528 PARAMETER Experiment Name: Zm_Imbibed_Seeds_P Parameter: Organism Value: Zea mays
  misc_feature: MA Experiment 108528 PARAMETER Experiment Name: Zm_Imbibed_Seeds_P Parameter: Plant Line Value: 35A19
  misc_feature: MA Experiment 108528 PARAMETER Experiment Name: Zm_Imbibed_Seeds_P Parameter: Tissue Value: Aerial vs. Embryo
  misc_feature: MA Experiment ID: 108534 Result: Up-regulated in Transcription
  misc_feature: MA Experiment 108534 PARAMETER Experiment Name: Zm_4deg_Cold_P Parameter: Age (hr) Value: 8
  misc_feature: MA Experiment 108534 PARAMETER Experiment Name: Zm_4deg_Cold_P Parameter: Organism Value: Zea mays
  misc_feature: MA Experiment 108534 PARAMETER Experiment Name: Zm_4deg_Cold_P Parameter: Plant Line Value: 35A19
  misc_feature: MA Experiment 108534 PARAMETER Experiment Name: Zm_4deg_Cold_P Parameter: Temperature (deg C) Value: 4 vs. 22
  misc_feature: MA Experiment 108534 PARAMETER Experiment Name: Zm_4deg_Cold_P Parameter: Timepoint (hr) Value: 6
  misc_feature: MA Experiment 108534 PARAMETER Experiment Name: Zm_4deg_Cold_P Parameter: Tissue Value: Aerial
  misc_feature: MA Experiment ID: 108536 Result: Up-regulated in Transcription
  misc_feature: MA Experiment 108536 PARAMETER Experiment Name: Zm_Meristem_P Parameter: Age (day) Value: 8
  misc_feature: MA Experiment 108536 PARAMETER Experiment Name: Zm_Meristem_P Parameter: Organism Value: Zea mays
  misc_feature: MA Experiment 108536 PARAMETER Experiment Name: Zm_Meristem_P Parameter: Plant Line Value: 35A19
  misc_feature: MA Experiment 108536 PARAMETER Experiment Name: Zm_Meristem_P Parameter: Tissue Value: Shoot Meristem vs. Above Shoot Meristem
  misc_feature: MA Experiment ID: 20000626 Result: Down-regulated in Transcription
  misc_feature: MA Experiment 20000626 PARAMETER Experiment Name: Zm_Herbicide-Treatments_P Parameter: Timepoint (hr) Value: 12
  misc_feature: MA Experiment 20000626 PARAMETER Experiment Name: Zm_Herbicide-Treatments_P Parameter: Tissue Value: Aerial
  misc_feature: MA Experiment 20000626 PARAMETER Experiment Name: Zm_Herbicide-Treatments_P Parameter: Treatment Value: Roundup vs. No Treatment
gtgctttcatcattccgctccccacacccctgttcgtggcggcctccgcccctccctctcaggctctcaccaccgtctgctggtggttgccgcggcgccgctcctccctcgtggtggcggtggaggactacggtcggggatcgacggcttcttcgtccgttggttggcaggcgaggcgatacatcaaccaaccaaaagaaatgtcagctggcaggcaagcatactggtgttaccagtgccgacagagggtgaggccacggggccgggagatggtttgtccctactgcgattctgggtttgtggctgaaatggatgatgtagatgctctcatgagccacttcgttgggacggatcctgatttccatcgcgacccacggttcgggatcatggaggcgatctccgccgtgatgcggcatggtatggcagggatgaaccgggaggttgatgtcagagggaggccgaacttcttttcagacctggagatggagttcggttcagggccatggctgctcttccgtggccagctccccggccacctcaccgaggacaacggtttcgatgttttcgtcaatggacgacgtggcggcggcggcggcggcggcggcatgaggagggccaacatcgcggactacttcgttggccctggactggatgatcttatcgagcagttgacccagaatgatcgccgaggaccaccacctgctgcacagtcctcgatcgacgctatgcccacagtgaagatcacccagaggcatctcagtggggactcgcactgccctatctgcaaggagaagttcgagatgggatccgaagaagcaagagagatgccatgcaagcacctgtaccactccgactgcatagttccttggttagagcagcacaattcctgccccgtttgccgttacgagctcccgccacagggctctgccaccggtgctagctgctcgcgcgcgagatcaaccgaccagagccagagctcaagtagttcaagcagcagcgggagaaccagtgggcgtcaaaggagaaggaacccgttctcgttcctgtggcctttccgctcatcaagtagttctcgctagattagcctctggtaatctttgctcaggttcgaaatactgtttgtttttttgggtcaaatacgctggtctaatgggctttaatgtggtgggatctcaatctgtactgtatggtttgttaatgatcgccacacgatgcttctccttgcaagtatattattattaccacggt

SEQ ID NO: 4814 - protein, 358 aa, Zea mays subsp. mays
  peptide (1)..(358): Ceres Seq. ID no. 12344057
  misc_feature (258)..(299): Pfam Name: Zinc finger, C3HC4 type (RING finger) Pfam Description: Zinc finger, C3HC4 type (RING finger)
  misc_feature (196)..(336): Homolog of NCBI NO: 21362321 NR Description: RIKEN cDNA 2610010O19 [Mus musculus]
  misc_feature (74)..(105): Homolog of NCBI NO: 21362321 NR Description: RIKEN cDNA 2610010O19 [Mus musculus]
  misc_feature (67)..(357): Homolog of NCBI NO: 18410530 NR Description: Expressed protein; protein id: At3g56580.1, by cDNA: gi_15028360 [Arabidopsis thaliana] unknown protein [Arabidopsis thaliana]
  misc_feature (196)..(343): Homolog of NCBI NO: 33417148 NR Description: Unknown (protein for MGC:69096) [Xenopus laevis]
  misc_feature (74)..(357): Homolog of NCBI NO: 11994207 NR Description: gene_id:MPN9.20~unknown protein [Arabidopsis
  misc_feature (74)..(357): Homolog of NCBI NO: 15231003 NR Description: unknown protein; protein id: At3g19950.1, by cDNA: gi_20465262 [Arabidopsis thaliana] AT3g19950/MPN9_19 [Arabidopsis thaliana]
  misc_feature (69)..(105): Homolog of NCBI NO: 33417148 NR Description: Unknown (protein for MGC:69096) [Xenopus laevis]
  misc_feature (71)..(353): Homolog of NCBI NO: 34908968 NR Description: P0003D09.21 [Oryza sativa (japonica
  misc_feature (67)..(357): Homolog of NCBI NO: 18405518 NR Description: expressed protein; protein id: At2g40830.1,
  misc_feature (67)..(263): Homolog of NCBI NO: 11358386 NR Description: hypothetical protein T5P19.230 - Arabidopsis >gi|7594536|emb|CAB88061.1| putative protein [Arabidopsis
AFIIPLPTPLFVAASAPPSQALTTVCWWLPRRRSSLVVAVEDYGRGSTASSSVGWQARRYINQPKEMSAGRQAYWCYQCRQRVRPRGREMVCPYCDSGFVAEMDDVDALMSHFVGTDPDFHRDPRFGIMEAISAVMRHGMAGMNREVDVRGRPNFFSDLEMEFGSGPWLLFRGQLPGHLTEDNGFDVFVNGRRGGGGGGGGMRRANIADYFVGPGLDDLIEQLTQNDRRGPPPAAQSSIDAMPTVKITQRHLSGDSHCPICKEKFEMGSEEAREMPCKHLYHSDCIVPWLEQHNSCPVCRYELPPQGSATGASCSRARSTDQSQSSSSSSSSGRTSGRQRRRNPFSFLWPFRSSSSSR

SEQ ID NO: 4815 - protein, 292 aa, Zea mays subsp. mays
  peptide (1)..(292): Ceres Seq. ID no. 12344058
  misc_feature (192)..(233): Pfam Name: Zinc finger, C3HC4 type (RING finger) Pfam Description: Zinc finger, C3HC4 type (RING finger)
  misc_feature (1)..(291): Homolog of NCBI NO: 18405518 NR Description: expressed protein; protein id: At2g40830.1,
  misc_feature (1)..(291): Homolog of NCBI NO: 18410530 NR Description: Expressed protein; protein id: At3g56580.1, by cDNA: gi_15028360 [Arabidopsis thaliana] unknown protein [Arabidopsis thaliana]
  misc_feature (5)..(287): Homolog of NCBI NO: 34908968 NR Description: P0003D09.21 [Oryza sativa (japonica
  misc_feature (130)..(277): Homolog of NCBI NO: 33417148 NR Description: Unknown (protein for MGC:69096) [Xenopus laevis]
  misc_feature (3)..(39): Homolog of NCBI NO: 33417148 NR Description: Unknown (protein for MGC:69096) [Xenopus laevis]
  misc_feature (8)..(291): Homolog of NCBI NO: 11994207 NR Description: gene_id:MPN9.20~unknown protein [Arabidopsis
  misc_feature (8)..(291): Homolog of NCBI NO: 15231003 NR Description: unknown protein; protein id: At3g19950.1, by cDNA: gi_20465262 [Arabidopsis thaliana] AT3g19950/MPN9_19 [Arabidopsis thaliana]
  misc_feature (130)..(270): Homolog of NCBI NO: 21362321 NR Description: RIKEN cDNA 2610010O19 [Mus musculus]
  misc_feature (8)..(39): Homolog of NCBI NO: 21362321 NR Description: RIKEN cDNA 2610010O19 [Mus musculus]
  misc_feature (1)..(197): Homolog of NCBI NO: 11358386 NR Description: hypothetical protein T5P19.230 - Arabidopsis >gi|7594536|emb|CAB88061.1| putative protein [Arabidopsis
MSAGRQAYWCYQCRQRVRPRGREMVCPYCDSGFVAEMDDVDALMSHFVGTDPDFHRDPRFGIMEAISAVMRHGMAGMNREVDVRGRPNFFSDLEMEFGSGPWLLFRGQLPGHLTEDNGFDVFVNGRRGGGGGGGGMRRANIADYFVGPGLDDLIEQLTQNDRRGPPPAAQSSIDAMPTVKITQRHLSGDSHCPICKEKFEMGSEEAREMPCKHLYHSDCIVPWLEQHNSCPVCRYELPPQGSATGASCSRARSTDQSQSSSSSSSSGRTSGRQRRRNPFSFLWPFRSSSSSR

SEQ ID NO: 4816 - protein, 269 aa, Zea mays subsp. mays
  peptide (1)..(269): Ceres Seq. ID no. 12344059
  misc_feature (169)..(210): Pfam Name: Zinc finger, C3HC4 type (RING finger) Pfam Description: Zinc finger, C3HC4 type (RING finger)
  misc_feature (1)..(268): Homolog of NCBI NO: 18405518 NR Description: expressed protein; protein id: At2g40830.1,
  misc_feature (1)..(268): Homolog of NCBI NO: 18410530 NR Description: Expressed protein; protein id: At3g56580.1, by cDNA: gi_15028360 [Arabidopsis thaliana] unknown protein [Arabidopsis thaliana]
  misc_feature (1)..(264): Homolog of NCBI NO: 34908968 NR Description: P0003D09.21 [Oryza sativa (japonica
  misc_feature (107)..(254): Homolog of NCBI NO: 33417148 NR Description: Unknown (protein for MGC:69096) [Xenopus laevis]
  misc_feature (1)..(16): Homolog of NCBI NO: 33417148 NR Description: Unknown (protein for MGC:69096) [Xenopus laevis]
  misc_feature (1)..(268): Homolog of NCBI NO: 11994207 NR Description: gene_id:MPN9.20~unknown protein [Arabidopsis
  misc_feature (1)..(268): Homolog of NCBI NO: 15231003 NR Description: unknown protein; protein id: At3g19950.1, by cDNA: gi_20465262 [Arabidopsis thaliana] AT3g19950/MPN9_19 [Arabidopsis thaliana]
  misc_feature (107)..(247): Homolog of NCBI NO: 21362321 NR Description: RIKEN cDNA 2610010O19 [Mus musculus]
  misc_feature (1)..(16): Homolog of NCBI NO: 21362321 NR Description: RIKEN cDNA 2610010O19 [Mus musculus]
  misc_feature (1)..(174): Homolog of NCBI NO: 11358386 NR Description: hypothetical protein T5P19.230 - Arabidopsis >gi|7594536|emb|CAB88061.1| putative protein [Arabidopsis
MVCPYCDSGFVAEMDDVDALMSHFVGTDPDFHRDPRFGIMEAISAVMRHGMAGMNREVDVRGRPNFFSDLEMEFGSGPWLLFRGQLPGHLTEDNGFDVFVNGRRGGGGGGGGMRRANIADYFVGPGLDDLIEQLTQNDRRGPPPAAQSSIDAMPTVKITQRHLSGDSHCPICKEKFEMGSEEAREMPCKHLYHSDCIVPWLEQHNSCPVCRYELPPQGSATGASCSRARSTDQSQSSSSSSSSGRTSGRQRRRNPFSFLWPFRSSSSSR

SEQ ID NO: 4817 - DNA, 921 bp, Zea mays subsp. mays
  misc_feature (1)..(921): Ceres Seq. ID no. 12365504
  misc_feature: MA Experiment ID: 108515 Result: Down-regulated in Transcription
  misc_feature: MA Experiment 108515 PARAMETER Experiment Name: Zm_2mM_SA_P Parameter: Age (day) Value: 8
  misc_feature: MA Experiment 108515 PARAMETER Experiment Name: Zm_2mM_SA_P Parameter: Organism Value: Zea mays
  misc_feature: MA Experiment 108515 PARAMETER Experiment Name: Zm_2mM_SA_P Parameter: Plant Line Value: 35A19
  misc_feature: MA Experiment 108515 PARAMETER Experiment Name: Zm_2mM_SA_P Parameter: Timepoint (hr) Value: 12
  misc_feature: MA Experiment 108515 PARAMETER Experiment Name: Zm_2mM_SA_P Parameter: Tissue Value: Aerial
  misc_feature: MA Experiment 108515 PARAMETER Experiment Name: Zm_2mM_SA_P Parameter: Treatment Value: 2mM SA vs. No Treatment
  misc_feature: MA Experiment ID: 108523 Result: Down-regulated in Transcription
  misc_feature: MA Experiment 108523 PARAMETER Experiment Name: Zm_42deg_Heat_P Parameter: Age (day) Value: 8
  misc_feature: MA Experiment 108523 PARAMETER Experiment Name: Zm_42deg_Heat_P Parameter: Organism Value: Zea mays
  misc_feature: MA Experiment 108523 PARAMETER Experiment Name: Zm_42deg_Heat_P Parameter: Plant Line Value: 35A19
  misc_feature: MA Experiment 108523 PARAMETER Experiment Name: Zm_42deg_Heat_P Parameter: Temperature (deg C) Value: 42 vs. 22
  misc_feature: MA Experiment 108523 PARAMETER Experiment Name: Zm_42deg_Heat_P Parameter: Timepoint (hr) Value: 6
  misc_feature: MA Experiment 108523 PARAMETER Experiment Name: Zm_42deg_Heat_P Parameter: Tissue Value: Aerial
  misc_feature: MA Experiment ID: 108527 Result: Down-regulated in Transcription
  misc_feature: MA Experiment 108527 PARAMETER Experiment Name: Zm_5mM_NO_P Parameter: Age (day) Value: 8
  misc_feature: MA Experiment 108527 PARAMETER Experiment Name: Zm_5mM_NO_P Parameter: Organism Value: Zea mays
  misc_feature: MA Experiment 108527 PARAMETER Experiment Name: Zm_5mM_NO_P Parameter: Plant Line Value: 35A19
  misc_feature: MA Experiment 108527 PARAMETER Experiment Name: Zm_5mM_NO_P Parameter: Timepoint (hr) Value: 6
  misc_feature: MA Experiment 108527 PARAMETER Experiment Name: Zm_5mM_NO_P Parameter: Tissue Value: Aerial
  misc_feature: MA Experiment 108527 PARAMETER Experiment Name: Zm_5mM_NO_P Parameter: Treatment Value: 5mM NO vs. No Treatment
  misc_feature: MA Experiment ID: 108530 Result: Up-regulated in Transcription
  misc_feature: MA Experiment 108530 PARAMETER Experiment Name: Zm_Imbibed_Seeds_P Parameter: Age (day) Value: 6 vs. 2
  misc_feature: MA Experiment 108530 PARAMETER Experiment Name: Zm_Imbibed_Seeds_P Parameter: Organism Value: Zea mays
  misc_feature: MA Experiment 108530 PARAMETER Experiment Name: Zm_Imbibed_Seeds_P Parameter: Plant Line Value: 35A19
  misc_feature: MA Experiment 108530 PARAMETER Experiment Name: Zm_Imbibed_Seeds_P Parameter: Tissue Value: Aerial vs. Embryo
  misc_feature: MA Experiment ID: 108536 Result: Down-regulated in Transcription
  misc_feature: MA Experiment 108536 PARAMETER Experiment Name: Zm_Meristem_P Parameter: Age (day) Value: 8
  misc_feature: MA Experiment 108536 PARAMETER Experiment Name: Zm_Meristem_P Parameter: Organism Value: Zea mays
  misc_feature: MA Experiment 108536 PARAMETER Experiment Name: Zm_Meristem_P Parameter: Plant Line Value: 35A19
  misc_feature: MA Experiment 108536 PARAMETER Experiment Name: Zm_Meristem_P Parameter: Tissue Value: Shoot Meristem vs. Above Shoot Meristem
  misc_feature: MA Experiment ID: 108543 Result: Up-regulated in Transcription
  misc_feature: MA Experiment ID: 108546 Result: Up-regulated in Transcription
  misc_feature: MA Experiment 108546 PARAMETER Experiment Name: Zm_Imbibed_Seeds_P Parameter: Age (day) Value: 3 vs. 2
  misc_feature: MA Experiment 108546 PARAMETER Experiment Name: Zm_Imbibed_Seeds_P Parameter: Organism Value: Zea mays
  misc_feature: MA Experiment 108546 PARAMETER Experiment Name: Zm_Imbibed_Seeds_P Parameter: Plant Line Value: 35A19
  misc_feature: MA Experiment 108546 PARAMETER Experiment Name: Zm_Imbibed_Seeds_P Parameter: Tissue Value: Roots vs. Embryo
  misc_feature: MA Experiment ID: 108556 Result: Down-regulated in Transcription
  misc_feature: MA Experiment 108556 PARAMETER Experiment Name: Zm_Drought_P Parameter: Age (day) Value: 9
  misc_feature: MA Experiment 108556 PARAMETER Experiment Name: Zm_Drought_P Parameter: Organism Value: Zea mays
  misc_feature: MA Experiment 108556 PARAMETER Experiment Name: Zm_Drought_P Parameter: Plant Line Value: 35A19
  misc_feature: MA Experiment 108556 PARAMETER Experiment Name: Zm_Drought_P Parameter: Timepoint (hr) Value: 24
  misc_feature: MA Experiment 108556 PARAMETER Experiment Name: Zm_Drought_P Parameter: Tissue Value: Aerial
  misc_feature: MA Experiment 108556 PARAMETER Experiment Name: Zm_Drought_P Parameter: Treatment Value: Drought vs. No Drought
  misc_feature: MA Experiment ID: 108559 Result: Down-regulated in Transcription
  misc_feature: MA Experiment 108559 PARAMETER Experiment Name: Zm_5mM_NO_P Parameter: Age (day) Value: 8
  misc_feature: MA Experiment 108559 PARAMETER Experiment Name: Zm_5mM_NO_P Parameter: Organism Value: Zea mays
  misc_feature: MA Experiment 108559 PARAMETER Experiment Name: Zm_5mM_NO_P Parameter: Plant Line Value: 35A19
  misc_feature: MA Experiment 108559 PARAMETER Experiment Name: Zm_5mM_NO_P Parameter: Timepoint (hr) Value: 12
  misc_feature: MA Experiment 108559 PARAMETER Experiment Name: Zm_5mM_NO_P Parameter: Tissue Value: Aerial
  misc_feature: MA Experiment 108559 PARAMETER Experiment Name: Zm_5mM_NO_P Parameter: Treatment Value: 5mM NO vs. No Treatment
  misc_feature: MA Experiment ID: 108597 Result: Down-regulated in Transcription
  misc_feature: MA Experiment 108597 PARAMETER Experiment Name: Zm_100uM_ABA_P Parameter: Age (day) Value: 9
  misc_feature: MA Experiment 108597 PARAMETER Experiment Name: Zm_100uM_ABA_P Parameter: Organism Value: Zea mays
  misc_feature: MA Experiment 108597 PARAMETER Experiment Name: Zm_100uM_ABA_P Parameter: Plant Line Value: 35A19
  misc_feature: MA Experiment 108597 PARAMETER Experiment Name: Zm_100uM_ABA_P Parameter: Timepoint (hr) Value: 24
  misc_feature: MA Experiment 108597 PARAMETER Experiment Name: Zm_100uM_ABA_P Parameter: Tissue Value: Aerial
  misc_feature: MA Experiment 108597 PARAMETER Experiment Name: Zm_100uM_ABA_P Parameter: Treatment Value: 100uM ABA vs. No Treatment
  misc_feature: MA Experiment ID: 20000477 Result: Down-regulated in Transcription
  misc_feature: MA Experiment 20000477 PARAMETER Experiment Name: Zm_5mM_SA_P Parameter: Age (day) Value: 10
  misc_feature: MA Experiment 20000477 PARAMETER Experiment Name: Zm_5mM_SA_P Parameter: Organism Value: Zea mays
  misc_feature: MA Experiment 20000477 PARAMETER Experiment Name: Zm_5mM_SA_P Parameter: Plant Line Value: 35A19
  misc_feature: MA Experiment 20000477 PARAMETER Experiment Name: Zm_5mM_SA_P Parameter: Timepoint (hr) Value: 48
  misc_feature: MA Experiment 20000477 PARAMETER Experiment Name: Zm_5mM_SA_P Parameter: Tissue Value: Aerial
  misc_feature: MA Experiment 20000477 PARAMETER Experiment Name: Zm_5mM_SA_P Parameter: Treatment Value: 5mM SA vs. No Treatment
  misc_feature: MA Experiment ID: 20000478 Result: Down-regulated in Transcription
  misc_feature: MA Experiment 20000478 PARAMETER Experiment Name: Zm_5mM_SA_P Parameter: Age (day) Value: 11
  misc_feature: MA Experiment 20000478 PARAMETER Experiment Name: Zm_5mM_SA_P Parameter: Organism Value: Zea mays
  misc_feature: MA Experiment 20000478 PARAMETER Experiment Name: Zm_5mM_SA_P Parameter: Plant Line Value: 35A19
  misc_feature: MA Experiment 20000478 PARAMETER Experiment Name: Zm_5mM_SA_P Parameter: Timepoint (hr) Value: 72
  misc_feature: MA Experiment 20000478 PARAMETER Experiment Name: Zm_5mM_SA_P Parameter: Tissue Value: Aerial
  misc_feature: MA Experiment 20000478 PARAMETER Experiment Name: Zm_5mM_SA_P Parameter: Treatment Value: 5mM SA vs. No Treatment
  misc_feature: MA Experiment ID: 20000479 Result: Down-regulated in Transcription
  misc_feature: MA Experiment 20000479 PARAMETER Experiment Name: Zm_Drought_P Parameter: Age (day) Value: 10
  misc_feature: MA Experiment 20000479 PARAMETER Experiment Name: Zm_Drought_P Parameter: Organism Value: Zea mays
  misc_feature: MA Experiment 20000479 PARAMETER Experiment Name: Zm_Drought_P Parameter: Plant Line Value: 35A19
  misc_feature: MA Experiment 20000479 PARAMETER Experiment Name: Zm_Drought_P Parameter: Timepoint (hr) Value: 48
  misc_feature: MA Experiment 20000479 PARAMETER Experiment Name: Zm_Drought_P Parameter: Tissue Value: Aerial
  misc_feature: MA Experiment 20000479 PARAMETER Experiment Name: Zm_Drought_P Parameter: Treatment Value: Drought vs. No Drought
  misc_feature: MA Experiment ID: 20000480 Result: Down-regulated in Transcription
  misc_feature: MA Experiment 20000480 PARAMETER Experiment Name: Zm_Drought_P Parameter: Age (day) Value: 11
  misc_feature: MA Experiment 20000480 PARAMETER Experiment Name: Zm_Drought_P Parameter: Organism Value: Zea mays
  misc_feature: MA Experiment 20000480 PARAMETER Experiment Name: Zm_Drought_P Parameter: Plant Line Value: 35A19
  misc_feature: MA Experiment 20000480 PARAMETER Experiment Name: Zm_Drought_P Parameter: Timepoint (hr) Value: 72
  misc_feature: MA Experiment 20000480 PARAMETER Experiment Name: Zm_Drought_P Parameter: Tissue Value: Aerial
  misc_feature: MA Experiment 20000480 PARAMETER Experiment Name: Zm_Drought_P Parameter: Treatment Value: Drought vs. No Drought
  misc_feature: MA Experiment ID: 20000492 Result: Down-regulated in Transcription
  misc_feature: MA Experiment 20000492 PARAMETER Experiment Name: Zm_Hybrid_Seed_Dev_P Parameter: DAP Value: 12
  misc_feature: MA Experiment 20000492 PARAMETER Experiment Name: Zm_Hybrid_Seed_Dev_P Parameter: Organism Value: Zea mays
  misc_feature: MA Experiment 20000492 PARAMETER Experiment Name: Zm_Hybrid_Seed_Dev_P Parameter: Plant Line Value: 35A19
  misc_feature: MA Experiment 20000492 PARAMETER Experiment Name: Zm_Hybrid_Seed_Dev_P Parameter: Tissue Value: Fert Kernel vs. Unfert Floret
  misc_feature: MA Experiment ID: 20000532 Result: Down-regulated in Transcription
  misc_feature: MA Experiment 20000532 PARAMETER Experiment Name: Zm_0.001percent_MeJA_P Parameter: Age (day) Value: 10
  misc_feature: MA Experiment 20000532 PARAMETER Experiment Name: Zm_0.001percent_MeJA_P Parameter: Organism Value: Zea mays
  misc_feature: MA Experiment 20000532 PARAMETER Experiment Name: Zm_0.001percent_MeJA_P Parameter: Plant Line Value: 35A19
  misc_feature: MA Experiment 20000532 PARAMETER Experiment Name: Zm_0.001percent_MeJA_P Parameter: Timepoint (hr) Value: 48
  misc_feature: MA Experiment 20000532 PARAMETER Experiment Name: Zm_0.001percent_MeJA_P Parameter: Tissue Value: Aerial
  misc_feature: MA Experiment 20000532 PARAMETER Experiment Name: Zm_0.001percent_MeJA_P Parameter: Treatment Value: 0.001percent MeJA vs. No Treatment
  misc_feature: MA Experiment ID: 20000533 Result: Down-regulated in Transcription
  misc_feature: MA Experiment 20000533 PARAMETER Experiment Name: Zm_0.001percent_MeJA_P Parameter: Age (day) Value: 11
  misc_feature: MA Experiment 20000533 PARAMETER Experiment Name: Zm_0.001percent_MeJA_P Parameter: Organism Value: Zea mays
  misc_feature: MA Experiment 20000533 PARAMETER Experiment Name: Zm_0.001percent_MeJA_P Parameter: Plant Line Value: 35A19
  misc_feature: MA Experiment 20000533 PARAMETER Experiment Name: Zm_0.001percent_MeJA_P Parameter: Timepoint (hr) Value: 72
  misc_feature: MA Experiment 20000533 PARAMETER Experiment Name: Zm_0.001percent_MeJA_P Parameter: Tissue Value: Aerial
  misc_feature: MA Experiment 20000533 PARAMETER Experiment Name: Zm_0.001percent_MeJA_P Parameter: Treatment Value: 0.001percent MeJA vs. No Treatment
  misc_feature: MA Experiment ID: 20000534 Result: Down-regulated in Transcription
  misc_feature: MA Experiment 20000534 PARAMETER Experiment Name: Zm_Hybrid_Pollen_P Parameter: Age (day) Value: 8
  misc_feature: MA Experiment 20000534 PARAMETER Experiment Name: Zm_Hybrid_Pollen_P Parameter: Organism Value: Zea mays
  misc_feature: MA Experiment 20000534 PARAMETER Experiment Name: Zm_Hybrid_Pollen_P Parameter: Plant Line Value: 35A19
  misc_feature: MA Experiment 20000534 PARAMETER Experiment Name: Zm_Hybrid_Pollen_P Parameter: Tissue Value: Pollen vs. Aerial
  misc_feature: MA Experiment ID: 20000535 Result: Down-regulated in Transcription
  misc_feature: MA Experiment 20000535 PARAMETER Experiment Name: Zm_Hybrid_Seed_Dev_P Parameter: DAP Value: 30 vs. 12
  misc_feature: MA Experiment 20000535 PARAMETER Experiment Name: Zm_Hybrid_Seed_Dev_P Parameter: Organism Value: Zea mays
  misc_feature: MA Experiment 20000535 PARAMETER Experiment Name: Zm_Hybrid_Seed_Dev_P Parameter: Plant Line Value: 35A19
  misc_feature: MA Experiment 20000535 PARAMETER Experiment Name: Zm_Hybrid_Seed_Dev_P Parameter: Tissue Value: Embryo vs. Unfert Floret
  misc_feature: MA Experiment ID: 20000626 Result: Down-regulated in Transcription
  misc_feature: MA Experiment 20000626 PARAMETER Experiment Name: Zm_Herbicide-Treatments_P Parameter: Timepoint (hr) Value: 12
  misc_feature: MA Experiment 20000626 PARAMETER Experiment Name: Zm_Herbicide-Treatments_P Parameter: Tissue Value: Aerial
  misc_feature: MA Experiment 20000626 PARAMETER Experiment Name: Zm_Herbicide-Treatments_P Parameter: Treatment Value: Roundup vs. No Treatment
  misc_feature: MA Experiment ID: 20000630 Result: Down-regulated in Transcription
  misc_feature: MA Experiment 20000630 PARAMETER Experiment Name: Zm_Herbicide-Treatments_P Parameter: Timepoint (hr) Value: 4
  misc_feature: MA Experiment 20000630 PARAMETER Experiment Name: Zm_Herbicide-Treatments_P Parameter: Tissue Value: Aerial
  misc_feature: MA Experiment 20000630 PARAMETER Experiment Name: Zm_Herbicide-Treatments_P Parameter: Treatment Value: Roundup vs. No Treatment
gcacgagaccattacctagaacatcctaatcgaaaaaaacagccttgtgcattcatcactttcctgactcacctcactcgatcatcctccagtcttgtcgtcgcctgctagcttgaatattacgccagcatctcgccaggaaaatggcgggcactactccgcgccgcttgctcctggtcatcgtccccctcgtcgccgtcgtgccggcgtccgcaaaagactacatggtcggcgactcgtccgggtggaagtccggagtggactacgctgcctgggccaagggcaagccgttcgccatcggcgacacgctctcgttccagtacagctcggcgcactcggtgctggaggtgagcgaggcggaccacggcgcgtgctcggcgagcaacccgctgcggtcgcaccagggccagagcaccaccatcccgctcaccaaggccggcacccgctacttcatctgcggcgcccccggccactgcgcctcgggcatgaaggtcgccatcaccgtctccggcggcggcggcggcggcagcagcagcgccgacaacaccgcgactccgtcgggtccctccgtgcgggcgatgaacacgaagccggcgtccggtctccggtccggtggcgcgacgacgacggacgagtcggactccagcgcggctggcagcggcgcccgcctcgcgatgggcctgctgttcggggccgcgggcctcgctgcaataatgggctgaattgaggacccgctagggaaaaggcagtgcggtttcacgaatttcctatttagtttcctgcgttctctgcttgcgtccccgagtcgcgaggctgagtgttcggccgtgcatatttttcgtatacttttgctgtgtttttttggggctattcgttgttcaatactgttgtttcagaataaaatttcatccttgaccatcc

SEQ ID NO: 4818 - protein, 192 aa, Zea mays subsp. mays
  peptide (1)..(192): Ceres Seq. ID no. 12365505
  misc_feature (35)..(115): Pfam Name: Plastocyanin-like domain Pfam Description: Plastocyanin-like domain
  misc_feature (11)..(192): Homolog of NCBI NO: 14140127 NR Description: uclacyanin 3-like protein [Oryza sativa]
  misc_feature (1)..(160): Homolog of NCBI NO: 38346158 NR Description: OSJNBa0079A21.5 [Oryza sativa (japonica
  misc_feature (9)..(188): Homolog of NCBI NO: 34395239 NR Description: putative phytocyanin [Oryza sativa (japonica
  misc_feature (11)..(178): Homolog of NCBI NO: 2493318 NR Description: Blue copper protein precursor
  misc_feature (7)..(187): Homolog of NCBI NO: 38636763 NR Description: putative blue copper binding protein [Oryza
  misc_feature (1)..(187): Homolog of NCBI NO: 38636764 NR Description: putative blue copper binding protein [Oryza
  misc_feature (8)..(187): Homolog of NCBI NO: 38636761 NR Description: putative blue copper binding protein [Oryza
  misc_feature (8)..(189): Homolog of NCBI NO: 38636760 NR Description: putative blue copper binding protein [Oryza
  misc_feature (3)..(173): Homolog of NCBI NO: 15232287 NR Description: stellacyanin (uclacyanin 3) - like protein; id: At3g60270.1 [Arabidopsis thaliana] >gi|11250058|pir||T49222
  misc_feature (10)..(181): Homolog of NCBI NO: 4104058 NR Description: blue copper-binding protein homolog [Triticum
MAGTTPRRLLLVIVPLVAVVPASAKDYMVGDSSGWKSGVDYAAWAKGKPFAIGDTLSFQYSSAHSVLEVSEADHGACSASNPLRSHQGQSTTIPLTKAGTRYFICGAPGHCASGMKVAITVSGGGGGGSSSADNTATPSGPSVRAMNTKPASGLRSGGATTTDESDSSAAGSGARLAMGLLFGAAGLAAIMG

SEQ ID NO: 4819 - protein, 165 aa, Zea mays subsp. mays
  peptide (1)..(165): Ceres Seq. ID no. 12365506
  misc_feature (8)..(88): Pfam Name: Plastocyanin-like domain Pfam Description: Plastocyanin-like domain
  misc_feature (1)..(165): Homolog of NCBI NO: 14140127 NR Description: uclacyanin 3-like protein [Oryza sativa]
  misc_feature (1)..(133): Homolog of NCBI NO: 38346158 NR Description: OSJNBa0079A21.5 [Oryza sativa (japonica
  misc_feature (1)..(161): Homolog of NCBI NO: 34395239 NR Description: putative phytocyanin [Oryza sativa (japonica
  misc_feature (1)..(151): Homolog of NCBI NO: 2493318 NR Description: Blue copper protein precursor
  misc_feature (1)..(160): Homolog of NCBI NO: 38636763 NR Description: putative blue copper binding protein [Oryza
  misc_feature (1)..(160): Homolog of NCBI NO: 38636764 NR Description: putative blue copper binding protein [Oryza
  misc_feature (1)..(160): Homolog of NCBI NO: 38636761 NR Description: putative blue copper binding protein [Oryza
  misc_feature (1)..(162): Homolog of NCBI NO: 38636760 NR Description: putative blue copper binding protein [Oryza
  misc_feature (1)..(146): Homolog of NCBI NO: 15232287 NR Description: stellacyanin (uclacyanin 3) - like protein; id: At3g60270.1 [Arabidopsis thaliana] >gi|11250058|pir||T49222
  misc_feature (1)..(154): Homolog of NCBI NO: 4104058 NR Description: blue copper-binding protein homolog [Triticum
MVGDSSGWKSGVDYAAWAKGKPFAIGDTLSFQYSSAHSVLEVSEADHGACSASNPLRSHQGQSTTIPLTKAGTRYFICGAPGHCASGMKVAITVSGGGGGGSSSADNTATPSGPSVRAMNTKPASGLRSGGATTTDESDSSAAGSGARLAMGLLFGAAGLAAIMG

SEQ ID NO: 4820 - DNA, 1215 bp, Zea mays subsp. mays
  misc_feature (1)..(1215): Ceres Seq. ID no. 12407776
  misc_feature: MA Experiment ID: 108547 Result: Up-regulated in Transcription
  misc_feature: MA Experiment 108547 PARAMETER Experiment Name: Zm_Imbibed_Seeds_P Parameter: Age (day) Value: 4 vs. 2
  misc_feature: MA Experiment 108547 PARAMETER Experiment Name: Zm_Imbibed_Seeds_P Parameter: Organism Value: Zea mays
  misc_feature: MA Experiment 108547 PARAMETER Experiment Name: Zm_Imbibed_Seeds_P Parameter: Plant Line Value: 35A19
  misc_feature: MA Experiment 108547 PARAMETER Experiment Name: Zm_Imbibed_Seeds_P Parameter: Tissue Value: Aerial vs. Embryo
  misc_feature: MA Experiment ID: 20000487 Result: Up-regulated in Transcription
  misc_feature: MA Experiment 20000487 PARAMETER Experiment Name: Zm_50mM_NH4NO3_L_to_H_P Parameter: Organism Value: Zea mays
  misc_feature: MA Experiment 20000487 PARAMETER Experiment Name: Zm_50mM_NH4NO3_L_to_H_P Parameter: Timepoint (hr) Value: 4
  misc_feature: MA Experiment 20000487 PARAMETER Experiment Name: Zm_50mM_NH4NO3_L_to_H_P Parameter: Tissue Value: Leaves
  misc_feature: MA Experiment 20000487 PARAMETER Experiment Name: Zm_50mM_NH4NO3_L_to_H_P Parameter: Treatment Value: 50mM NH4NO3 vs. 100mM Mannitol
  misc_feature: MA Experiment ID: 20000492 Result: Up-regulated in Transcription
  misc_feature: MA Experiment 20000492 PARAMETER Experiment Name: Zm_Hybrid_Seed_Dev_P Parameter: DAP Value: 12
  misc_feature: MA Experiment 20000492 PARAMETER Experiment Name: Zm_Hybrid_Seed_Dev_P Parameter: Organism Value: Zea mays
  misc_feature: MA Experiment 20000492 PARAMETER Experiment Name: Zm_Hybrid_Seed_Dev_P Parameter: Plant Line Value: 35A19
  misc_feature: MA Experiment 20000492 PARAMETER Experiment Name: Zm_Hybrid_Seed_Dev_P Parameter: Tissue Value: Fert Kernel vs. Unfert Floret
acccacccgttttatccacgcacggcgtcgaacaccccgcggtcgctcacgtgaggcgccaccccgcgcacccagtcagcgcccgcctccaccacccacccacacgacaaaaatccgccatggccttcgcgctcaaggccgccgccgcggggtcggcgtcgttctccgccgcggggccgaggcggcgcgccgcggcgactggtagggtctcgttccggagcgccgcgcccgtggtcgccgtcagggccgcggcggcggcggccgccgctgtggcggaggacaagcgcagcatctccggcaccttcgccgagctcaggcagcaggggaagactgccttgattcccttcatcactgctggagaccctgacttggccaccacagcaaaagcactcaggatccttgatgcgtgtggttcagacgtgatcgaactgggtgtgccttactccgatccattggctgacggccctgttattcaggcctccgcgacgcgcgctctggcaaagggcaccacatttgaggatgtcatctccatggtaaagggggtgatacctgatctgtcctgccctgtagcgcttttcacatattacaacccgatcctgaagcgtggtgtccccaacttcatgagtattgttaaagaagctggggtacacggtcttgtggtaccagatgttcctttggaagagacagatgtcttgaggagtgaggctgccaaaaacaacctagagctggtgctattgacaacaccgactacaccaaatgaaagaatggagaaaattgcacaggcttcagaaggatttatttatcttgtaagcactgttggagttactggtacacgtgcaaatgtaagcggcaaggtgcaatctcttcttcaggatatcaagaaggtgacagaaaaacccgtggctgttggctttggtgtgtcgactccagagcatgtccggcagattgcaggatggggcgcagatggtgtgattatcggtagcgcagtgatgaagacgttggaggaagctgcttctccagaagaaggattgaagaagctagaagagttcgccaagaacctgaaggccgcattgccgtgaaccaaccattttcgttagcaaagaaattaagattttttttttcctttcaatcttggctttcagggttgttggttgttgtgtagtgaaaataattgtgtccctatgttgaatgctcaaatgaataaatcaagatccc

SEQ ID NO: 4821 - protein, 358 aa, Zea mays subsp. mays
  peptide (1)..(358): Ceres Seq. ID no. 12407777
  misc_feature (101)..(358): Pfam Name: Tryptophan synthase alpha chain Pfam Description: Tryptophan synthase alpha chain
  misc_feature (38)..(358): Homolog of NCBI NO: 34393530 NR Description: putative tryptophan synthase alpha chain [Oryza
  misc_feature (90)..(358): Homolog of NCBI NO: 34897224 NR Description: putative indole-3-glycerol phosphate lyase [Oryza
  misc_feature (86)..(358): Homolog of NCBI NO: 11993328 NR Description: putative tryptophan synthase alpha [Zea mays]
  misc_feature (97)..(357): Homolog of NCBI NO: 15235430 NR Description: tryptophan synthase alpha 1-like protein; protein At4g02610.1 [Arabidopsis thaliana] >gi|7436987|pir||T01088
  misc_feature (68)..(357): Homolog of NCBI NO: 21593559 NR Description: tryptophan synthase alpha chain [Arabidopsis
  misc_feature (68)..(357): Homolog of NCBI NO: 18410104 NR Description: tryptophan synthase alpha chain; protein id: supported by cDNA: 40110. [Arabidopsis thaliana]
  misc_feature (40)..(358): Homolog of NCBI NO: 34897218 NR Description: putative indole-3-glycerol phosphate lyase [Oryza
  misc_feature (40)..(358): Homolog of NCBI NO: 33383132 NR Description: Indole synthase [Triticum aestivum]
  misc_feature (60)..(358): Homolog of NCBI NO: 11993325 NR Description: indole-3-glycerol phosphate lyase [Zea mays]
  misc_feature (40)..(358): Homolog of NCBI NO: 34897216 NR Description: putative indole-3-glycerol phosphate lyase [Oryza
PPVLSTHGVEHPAVAHVRRHPAHPVSARLHHPPTRQKSAMAFALKAAAAGSASFSAAGPRRRAAATGRVSFRSAAPVVAVRAAAAAAAAVAEDKRSISGTFAELRQQGKTALIPFITAGDPDLATTAKALRILDACGSDVIELGVPYSDPLADGPVIQASATRALAKGTTFEDVISMVKGVIPDLSCPVALFTYYNPILKRGVPNFMSIVKEAGVHGLVVPDVPLEETDVLRSEAAKNNLELVLLTTPTTPNERMEKIAQASEGFIYLVSTVGVTGTRANVSGKVQSLLQDIKKVTEKPVAVGFGVSTPEHVRQIAGWGADGVIIGSAVMKTLEEAASPEEGLKKLEEFAKNLKAALP

SEQ ID NO: 4822 - protein, 319 aa, Zea mays subsp. mays
  peptide (1)..(319): Ceres Seq. ID no. 12407778
  misc_feature (62)..(319): Pfam Name: Tryptophan synthase alpha chain Pfam Description: Tryptophan synthase alpha chain
  misc_feature (1)..(319): Homolog of NCBI NO: 34393530 NR Description: putative tryptophan synthase alpha chain [Oryza
  misc_feature (51)..(319): Homolog of NCBI NO: 34897224 NR Description: putative indole-3-glycerol phosphate lyase [Oryza
  misc_feature (47)..(319): Homolog of NCBI NO: 11993328 NR Description: putative tryptophan synthase alpha [Zea mays]
  misc_feature (58)..(318): Homolog of NCBI NO: 15235430 NR Description: tryptophan synthase alpha 1-like protein; protein At4g02610.1 [Arabidopsis thaliana] >gi|7436987|pir||T01088
  misc_feature (29)..(318): Homolog of NCBI NO: 21593559 NR Description: tryptophan synthase alpha chain [Arabidopsis
  misc_feature (29)..(318): Homolog of NCBI NO: 18410104 NR Description: tryptophan synthase alpha chain; protein id: supported by cDNA: 40110. [Arabidopsis thaliana]
  misc_feature (1)..(319): Homolog of NCBI NO: 34897218 NR Description: putative indole-3-glycerol phosphate lyase [Oryza
  misc_feature (1)..(319): Homolog of NCBI NO: 33383132 NR Description: Indole synthase [Triticum aestivum]
  misc_feature (21)..(319): Homolog of NCBI NO: 11993325 NR Description: indole-3-glycerol phosphate lyase [Zea mays]
  misc_feature (1)..(319): Homolog of NCBI NO: 34897216 NR Description: putative indole-3-glycerol phosphate lyase [Oryza
MAFALKAAAAGSASFSAAGPRRRAAATGRVSFRSAAPVVAVRAAAAAAAAVAEDKRSISGTFAELRQQGKTALIPFITAGDPDLATTAKALRILDACGSDVIELGVPYSDPLADGPVIQASATRALAKGTTFEDVISMVKGVIPDLSCPVALFTYYNPILKRGVPNFMSIVKEAGVHGLVVPDVPLEETDVLRSEAAKNNLELVLLTTPTTPNERMEKIAQASEGFIYLVSTVGVTGTRANVSGKVQSLLQDIKKVTEKPVAVGFGVSTPEHVRQIAGWGADGVIIGSAVMKTLEEAASPEEGLKKLEEFAKNLKAALP

SEQ ID NO: 4823 - protein, 182 aa, Zea mays subsp. mays
  peptide (1)..(182): Ceres Seq. ID no. 12407779
  misc_feature (1)..(182): Pfam Name: Tryptophan synthase alpha chain Pfam Description: Tryptophan synthase alpha chain
  misc_feature (1)..(182): Homolog of NCBI NO: 34393530 NR Description: putative tryptophan synthase alpha chain [Oryza
  misc_feature (1)..(182): Homolog of NCBI NO: 34897224 NR Description: putative indole-3-glycerol phosphate lyase [Oryza
  misc_feature (1)..(182): Homolog of NCBI NO: 11993328 NR Description: putative tryptophan synthase alpha [Zea mays]
  misc_feature (1)..(181): Homolog of NCBI NO: 15235430 NR Description: tryptophan synthase alpha 1-like protein; protein At4g02610.1 [Arabidopsis thaliana] >gi|7436987|pir||T01088
  misc_feature (1)..(181): Homolog of NCBI NO: 21593559 NR Description: tryptophan synthase alpha chain [Arabidopsis
  misc_feature (1)..(181): Homolog of NCBI NO: 18410104 NR Description: tryptophan synthase alpha chain; protein id: supported by cDNA: 40110. [Arabidopsis thaliana]
  misc_feature (1)..(182): Homolog of NCBI NO: 34897218 NR Description: putative indole-3-glycerol phosphate lyase [Oryza
  misc_feature (1)..(182): Homolog of NCBI NO: 33383132 NR Description: Indole synthase [Triticum aestivum]
  misc_feature (1)..(182): Homolog of NCBI NO: 11993325 NR Description: indole-3-glycerol phosphate lyase [Zea mays]
  misc_feature (1)..(182): Homolog of NCBI NO: 34897216 NR Description: putative indole-3-glycerol phosphate lyase [Oryza
MVKGVIPDLSCPVALFTYYNPILKRGVPNFMSIVKEAGVHGLVVPDVPLEETDVLRSEAAKNNLELVLLTTPTTPNERMEKIAQASEGFIYLVSTVGVTGTRANVSGKVQSLLQDIKKVTEKPVAVGFGVSTPEHVRQIAGWGADGVIIGSAVMKTLEEAASPEEGLKKLEEFAKNLKAALP

SEQ ID NO: 4824 - DNA, 1705 bp, Zea mays subsp. mays
  misc_feature (1)..(1705): Ceres Seq. ID no. 12409831
  misc_feature: MA Experiment ID: 108544 Result: Down-regulated in Transcription
  misc_feature: MA Experiment ID: 20000492 Result: Down-regulated in Transcription
  misc_feature: MA Experiment 20000492 PARAMETER Experiment Name: Zm_Hybrid_Seed_Dev_P Parameter: DAP Value: 12
  misc_feature: MA Experiment 20000492 PARAMETER Experiment Name: Zm_Hybrid_Seed_Dev_P Parameter: Organism Value: Zea mays
  misc_feature: MA Experiment 20000492 PARAMETER Experiment Name: Zm_Hybrid_Seed_Dev_P Parameter: Plant Line Value: 35A19
  misc_feature: MA Experiment 20000492 PARAMETER Experiment Name: Zm_Hybrid_Seed_Dev_P Parameter: Tissue Value: Fert Kernel vs. Unfert Floret
ggctatccaggctccagtcgtccccggattagttgtactgtacattgttcctgcgaagacactgggtcgtccgggtcaatcggcagcttgaacaagccatggcggcgcaccggccgaacgccgcggcgccgctgctcgccaagctcgacgccaccgccacgccgccggcgaagcgcaacaagtaccccttcttctgcgccgtgctcgcatccatgacctccgtgctcatgggctacaacgtcgcggtgacgagcggcgcgcagatcttcatggcggaggacctcgggatgagcgacgcgcagatcgaggtgctctcgggggtcatcaacatatactcgctcgtcggcgcgctgctggcaggctggacctccgaccgtctcggccggcgcctcaccatcgtcctcgccaacgccttcttcctcgtcggcccgctcgccatggcgcttgccggcgggtacaccttgctcatggtgggccgcttcatcgccggcgtcggcgtcgggtacgcgctcgtcatcgcgccagtctacgctgccgagatcgcgccggcgtcatcccgcgggctcctcagctcacttcctgagatttttatcaacactggggtgatgctgagttacgtgtcgaatctcgccttctcggggctgcccgtgcacctgtcgtggcgggtgatgttcgcggcgggcgtggtgcccaccgtgttcatggcggccggggtgttcaccatgccggagtcgccgcggtggctggttatgaagggccgggtcgccgaggccaaggccgtgctcgacaagacgtcggacacgcccgctgaggccgagcagcggctgctcgagatcgaggacgtcgtgatggacagcagcggcgacagcggcgcgtggaaggaggtggcgacnaaggctggcgtccagcgcgtgttggcaaccgtggtgacgctgcagttcttccagcaggcgtcaggcatcgactcggtggtgctgtacggcccgcgcgttctcgccatggctggtgtcacgtccaacagcttgctcctgagcctcaacatcctcttcggcgttgccaaggttggctccatcctcatcgccatggcgctagccgaccgcgtcgggcggcgcccactcctgctggtcagcactagcggcatgacggtggcgctgctcgtcctaggctccctgttcgcggtgtttgcgggagccaaggataacgctgcggtggctgcggtgagtgtggtggccgtcatggcgttcgtgatggccttctccgtcggcttgggccctctggcgtgggtgtacagctccgagatactgccgctccgacttcgcgggcagggtgccggggctcggcaccgccatgaaccggatcatgagcggcgtgatcaccatgaccttcatctcgctctaccagggcatcaccatggccggcgcgttctacctctacgccgccatcgccgccgcgtcgttcgtgttcgtgtacgcctgcctgccggagaccaggggccggagcctcgaggacatggaagagctcttccacaccaagtgatttcgtatgtgctgatccaaccaccatttggttcaattctcgattcagtggcaatgcagattttgccattgttggagctggttttgagcttggtcgttatcatcatgggcacatgcgtatacaattgcaagattatattgaaatcgattgattgagccggttggcgtcg

SEQ ID NO: 4825 - protein, 530 aa, Zea mays subsp. mays
  peptide (1)..(530): Ceres Seq. ID no. 12409832
  misc_feature (33)..(410): Pfam Name: Sugar (and other) transporter Pfam Description: Sugar (and other) transporter
  misc_feature (25)..(410): Homolog of NCBI NO: 28316433 NR Description: sorbitol transporter [Prunus cerasus]
  misc_feature (13)..(410): Homolog of NCBI NO: 30025133 NR Description: putative sorbitol transporter [Prunus cerasus]
  misc_feature (19)..(410): Homolog of NCBI NO: 12004316 NR Description: mannitol transporter [Apium graveolens var. dulce]
  misc_feature (265)..(265): Xaa is any aa, unknown or other
MAAHRPNAAAPLLAKLDATATPPAKRNKYPFFCAVLASMTSVLMGYNVAVTSGAQIFMAEDLGMSDAQIEVLSGVINIYSLVGALLAGWTSDRLGRRLTIVLANAFFLVGPLAMALAGGYTLLMVGRFIAGVGVGYALVIAPVYAAEIAPASSRGLLSSLPEIFINTGVMLSYVSNLAFSGLPVHLSWRVMFAAGVVPTVFMAAGVFTMPESPRWLVMKGRVAEAKAVLDKTSDTPAEAEQRLLEIEDVVMDSSGDSGAWKEVAXKAGVQRVLATVVTLQFFQQASGIDSVVLYGPRVLAMAGVTSNSLLLSLNILFGVAKVGSILIAMALADRVGRRPLLLVSTSGMTVALLVLGSLFAVFAGAKDNAAVAAVSVVAVMAFVMAFSVGLGPLAWVYSSEILPLRLRGQGAGARHRHEPDHERRDHHDLHLALPGHHHGRRVLPLRRHRRRVVRVRVRLPAGDQGPEPRGHGRALPHQVISYVLIQPPFGSILDSVAMQILPLLELVLSLVVIIMGTCVYNCKIILKSID

SEQ ID NO: 4826 - protein, 492 aa, Zea mays subsp. mays
  peptide (1)..(492): Ceres Seq. ID no. 12409833
  misc_feature (1)..(372): Pfam Name: Sugar (and other) transporter Pfam Description: Sugar (and other) transporter
  misc_feature (1)..(372): Homolog of NCBI NO: 28316433 NR Description: sorbitol transporter [Prunus cerasus]
  misc_feature (1)..(372): Homolog of NCBI NO: 30025133 NR Description: putative sorbitol transporter [Prunus cerasus]
  misc_feature (1)..(372): Homolog of NCBI NO: 12004316 NR Description: mannitol transporter [Apium graveolens var. dulce]
  misc_feature (227)..(227): Xaa is any aa, unknown or other
MTSVLMGYNVAVTSGAQIFMAEDLGMSDAQIEVLSGVINIYSLVGALLAGWTSDRLGRRLTIVLANAFFLVGPLAMALAGGYTLLMVGRFIAGVGVGYALVIAPVYAAEIAPASSRGLLSSLPEIFINTGVMLSYVSNLAFSGLPVHLSWRVMFAAGVVPTVFMAAGVFTMPESPRWLVMKGRVAEAKAVLDKTSDTPAEAEQRLLEIEDVVMDSSGDSGAWKEVAXKAGVQRVLATVVTLQFFQQASGIDSVVLYGPRVLAMAGVTSNSLLLSLNILFGVAKVGSILIAMALADRVGRRPLLLVSTSGMTVALLVLGSLFAVFAGAKDNAAVAAVSVVAVMAFVMAFSVGLGPLAWVYSSEILPLRLRGQGAGARHRHEPDHERRDHHDLHLALPGHHHGRRVLPLRRHRRRVVRVRVRLPAGDQGPEPRGHGRALPHQVISYVLIQPPFGSILDSVAMQILPLLELVLSLVVIIMGTCVYNCKIILKSID

SEQ ID NO: 4827 - protein, 487 aa, Zea mays subsp. mays
  peptide (1)..(487): Ceres Seq. ID no. 12409834
  misc_feature (1)..(367): Pfam Name: Sugar (and other) transporter Pfam Description: Sugar (and other) transporter
  misc_feature (1)..(367): Homolog of NCBI NO: 28316433 NR Description: sorbitol transporter [Prunus cerasus]
  misc_feature (1)..(367): Homolog of NCBI NO: 30025133 NR Description: putative sorbitol transporter [Prunus cerasus]
  misc_feature (1)..(367): Homolog of NCBI NO: 12004316 NR Description: mannitol transporter [Apium graveolens var. dulce]
  misc_feature (222)..(222): Xaa is any aa, unknown or other
MGYNVAVTSGAQIFMAEDLGMSDAQIEVLSGVINIYSLVGALLAGWTSDRLGRRLTIVLANAFFLVGPLAMALAGGYTLLMVGRFIAGVGVGYALVIAPVYAAEIAPASSRGLLSSLPEIFINTGVMLSYVSNLAFSGLPVHLSWRVMFAAGVVPTVFMAAGVFTMPESPRWLVMKGRVAEAKAVLDKTSDTPAEAEQRLLEIEDVVMDSSGDSGAWKEVAXKAGVQRVLATVVTLQFFQQASGIDSVVLYGPRVLAMAGVTSNSLLLSLNILFGVAKVGSILIAMALADRVGRRPLLLVSTSGMTVALLVLGSLFAVFAGAKDNAAVAAVSVVAVMAFVMAFSVGLGPLAWVYSSEILPLRLRGQGAGARHRHEPDHERRDHHDLHLALPGHHHGRRVLPLRRHRRRVVRVRVRLPAGDQGPEPRGHGRALPHQVISYVLIQPPFGSILDSVAMQILPLLELVLSLVVIIMGTCVYNCKIILKSID

SEQ ID NO: 4828 - DNA, 752 bp, Zea mays subsp. mays
  misc_feature (1)..(752): Ceres Seq. ID no. 12414114
  misc_feature: MA Experiment ID: 20000534 Result: Down-regulated in Transcription
  misc_feature: MA Experiment 20000534 PARAMETER Experiment Name: Zm_Hybrid_Pollen_P Parameter: Age (day) Value: 8
  misc_feature: MA Experiment 20000534 PARAMETER Experiment Name: Zm_Hybrid_Pollen_P Parameter: Organism Value: Zea mays
  misc_feature: MA Experiment 20000534 PARAMETER Experiment Name: Zm_Hybrid_Pollen_P Parameter: Plant Line Value: 35A19
  misc_feature: MA Experiment 20000534 PARAMETER Experiment Name: Zm_Hybrid_Pollen_P Parameter: Tissue Value: Pollen vs. Aerial
aggatttcagccattcaggagggccaccgtacgcagcgagaccagccagcaggcggcgatgttcgcgacggcggtgcggtgggcggcgaagaaggggaagcccaagatggcgccgatcgagctgacggcgccgccggagcaggcgcagtccatcacgcgcgccatcttcgacgccgtccgggagcacggcccgctcaccgtctccgacgtctgggaccacgtcaaggatgtcgggcttcgaggtctggcaagcaagaggcagatgaagatcatgctgcggtggatgagggagcgccagaagctaaagctcatctgcgaccacgacggcccgcacaagcagttcctctacaccacctggtttaccaaccccaggaacgcgccgcagaggcccaatccgaagcccaatgtcaaagcggataagctccccaccttcccttccccttcgaagcaactgtgacgaggacttgtttctgtgctctctgcacttgtttctgctgcccccgacataatgttcagcatggaaacaaatgctagatttgttcaggcgaatttaggcttgttatggctatattgttctatgcaaacacctaattgttgtctatgcatatataaaccatattatttgagatgtataacctaaggttgttccctgaggattaaagccagctgtttggacggctacagctgcaattcatagaaacaaaaatattgtagaaacattataaacctgtacggattaaagtcaagcgaat

SEQ ID NO: 4829 - protein, 151 aa, Zea mays subsp. mays
  peptide (1)..(151): Ceres Seq. ID no. 12414115
  misc_feature (20)..(130): Homolog of NCBI NO: 38637563 NR Description: unknown protein [Oryza sativa (japonica
  misc_feature (26)..(130): Homolog of NCBI NO: 15239880 NR Description: putative protein; protein id: At5g49410.1, by cDNA: 6602. [Arabidopsis thaliana] >gi|9759424|dbj|BAB09911.1|
  misc_feature (26)..(130): Homolog of NCBI NO: 21594042 NR Description: unknown [Arabidopsis thaliana]
  misc_feature (25)..(137): Homolog of NCBI NO: 18410491 NR Description: expressed protein; protein id: At1g73940.1, by cDNA: 32565., supported by cDNA: gi_16323092 [Arabidopsis
  misc_feature (26)..(119): Homolog of NCBI NO: 27573361 NR Description: unknown protein [Oryza sativa (japonica
GFQPFRRATVRSETSQQAAMFATAVRWAAKKGKPKMAPIELTAPPEQAQSITRAIFDAVREHGPLTVSDVWDHVKDVGLRGLASKRQMKIMLRWMRERQKLKLICDHDGPHKQFLYTTWFTNPRNAPQRPNPKPNVKADKLPTFPSPSKQL

SEQ ID NO: 4830 - protein, 139 aa, Zea mays subsp. mays
  peptide (1)..(139): Ceres Seq. ID no. 12414116
RISAIQEGHRTQRDQPAGGDVRDGGAVGGEEGEAQDGADRADGAAGAGAVHHARHLRRRPGARPAHRLRRLGPRQGCRASRSGKQEADEDHAAVDEGAPEAKAHLRPRRPAQAVPLHHLVYQPQERAAEAQSEAQCQSG

SEQ ID NO: 4831 - protein, 132 aa, Zea mays subsp. mays
  peptide (1)..(132): Ceres Seq. ID no. 12414117
  misc_feature (1)..(111): Homolog of NCBI NO: 38637563 NR Description: unknown protein [Oryza sativa (japonica
  misc_feature (7)..(111): Homolog of NCBI NO: 15239880 NR Description: putative protein; protein id: At5g49410.1, by cDNA: 6602. [Arabidopsis thaliana] >gi|9759424|dbj|BAB09911.1|
  misc_feature (7)..(111): Homolog of NCBI NO: 21594042 NR Description: unknown [Arabidopsis thaliana]
  misc_feature (6)..(118): Homolog of NCBI NO: 18410491 NR Description: expressed protein; protein id: At1g73940.1, by cDNA: 32565., supported by cDNA: gi_16323092 [Arabidopsis
  misc_feature (7)..(100): Homolog of NCBI NO: 27573361 NR Description: unknown protein [Oryza sativa (japonica
MFATAVRWAAKKGKPKMAPIELTAPPEQAQSITRAIFDAVREHGPLTVSDVWDHVKDVGLRGLASKRQMKIMLRWMRERQKLKLICDHDGPHKQFLYTTWFTNPRNAPQRPNPKPNVKADKLPTFPSPSKQL

SEQ ID NO: 4832 - DNA, 1600 bp, Zea mays subsp. mays
  misc_feature (1)..(1600): Ceres Seq. ID no. 12362132
  misc_feature: MA Experiment ID: 20000480 Result: Down-regulated in Transcription
  misc_feature: MA Experiment 20000480 PARAMETER Experiment Name: Zm_Drought_P Parameter: Age (day) Value: 11
  misc_feature: MA Experiment 20000480 PARAMETER Experiment Name: Zm_Drought_P Parameter: Organism Value: Zea mays
  misc_feature: MA Experiment 20000480 PARAMETER Experiment Name: Zm_Drought_P Parameter: Plant Line Value: 35A19
  misc_feature: MA Experiment 20000480 PARAMETER Experiment Name: Zm_Drought_P Parameter: Timepoint (hr) Value: 72
  misc_feature: MA Experiment 20000480 PARAMETER Experiment Name: Zm_Drought_P Parameter: Tissue Value: Aerial
  misc_feature: MA Experiment 20000480 PARAMETER Experiment Name: Zm_Drought_P Parameter: Treatment Value: Drought vs. No Drought
  misc_feature: MA Experiment ID: 20000487 Result: Up-regulated in Transcription
  misc_feature: MA Experiment 20000487 PARAMETER Experiment Name: Zm_50mM_NH4NO3_L_to_H_P Parameter: Organism Value: Zea mays
  misc_feature: MA Experiment 20000487 PARAMETER Experiment Name: Zm_50mM_NH4NO3_L_to_H_P Parameter: Timepoint (hr) Value: 4
  misc_feature: MA Experiment 20000487 PARAMETER Experiment Name: Zm_50mM_NH4NO3_L_to_H_P Parameter: Tissue Value: Leaves
  misc_feature: MA Experiment 20000487 PARAMETER Experiment Name: Zm_50mM_NH4NO3_L_to_H_P Parameter: Treatment Value: 50mM NH4NO3 vs. 100mM Mannitol
gaacctctccttccatctcctccccggccgattcctccagtctccagccaccttcaactgccggccgcaagtggccccgcgtctcacccctaaccccagtgaagaatctaggcgtcgtctatccagccccgtcatcatcaccatggaggagcatgggctgtggtccagcggggccagcgacaagaacaagtccatggttgagcagctgcagaggtacggggtcatcaggtcgaccaaagtcgcggaggtgatggaggccatcgacagggggttgttcgtgccacctgggggctcgccataccacgatagccccatgccgattgggtacaatgccaccatatcagcaccacacatgcatgcggcttgcctggagctactggagaagaatcttcagcctggaatgcgagctctcgatgttgggtcaggcactggatacctaactgcttgctttgcactgatggttggaccagaagggcgagcagttggtgtcgaacatatcccatagttggttgctacttctactgaaaacatcaagaaaagtgcagcagccccacatctaaatgatggatccctcagtatacacgtttctggtaaatattagcttgttttgtgctaccataaaactcagccatgctggagcagcaaatttccaacaggtccgatgttgacttaggtgtacatataacaacttagttgctgtgagctgagttatagttcagatgaatatatcattttaatagcacttatcctttttcttttattgactgaataaaggaacctgattcagctaatgaggttgtccatactgctctactagcagggttttgttatattgcttgtcataccatgtggatctcccccatttgtgaggttcttgtcctcgtatgatgaaatttgctgcagctttagagcctgtttggttcgtggctaactgtgcacactttgcttaagtttagtcgtttaaattgaagaactaaccttagacagaaaagttagacaaagtgtgacaatttatgcagagaaccaaacatacctttagtattccttagtctggcactctggccttatgtgcattcagcattgttggttgttctatatacccttaacacttgatgcaccaagagatgtttaaaatggatgcagatggcagggaaggttggccagaactggcaccctatgaagccatccatgttggagctgcagcaccgcagatcccggaggcgctgatcgagcagctgaagcccggcggcagaatggtgatccctgtcgggacagtcttccaggagctgaaggttgtggacaagaaattggatggcactgtcagcataagagacgaaacgtccgtgcgctatgtgccgctcactagcaaggacgcccagttgcacgcaagctgagtgatctatcatgtcaaaaaaaaaagttatcctcacctgacaaggtgaggcattcaatcgaatcgctacccttgtaaatgtattaatcctactgtctcagtaaatgcgctggcttggaaataatgtaaatgatggaacatcatggaacgtttgtttcccttcagctgccccggtgttcttacttactatgcaacttgtttcttcag

SEQ ID NO: 4833 - protein, 167 aa, Zea mays subsp. mays
  peptide (1)..(167): Ceres Seq. ID no. 12362133
  misc_feature (60)..(167): Pfam Name: Protein-L-isoaspartate(D-aspartate) Pfam Description: Protein-L-isoaspartate(D-aspartate)
  misc_feature (54)..(167): Homolog of NCBI NO: 2499570 NR Description: PROTEIN-L-ISOASPARTATE O-METHYLTRANSFERASE
  misc_feature (54)..(167): Homolog of NCBI NO: 38345249 NR Description: OSJNBb0011N17.10 [Oryza sativa (japonica
  misc_feature (54)..(167): Homolog of NCBI NO: 1322021 NR Description: L-isoaspartyl methyltransferase
  misc_feature (54)..(167): Homolog of NCBI NO: 22331684 NR Description: similar to protein-L-isoaspartate(D-aspartate);
  misc_feature (56)..(167): Homolog of NCBI NO: 26451260 NR Description: unknown protein [Arabidopsis thaliana]
  misc_feature (54)..(167): Homolog of NCBI NO: 19070126 NR Description: protein carboxyl-o-methyltransferase [Sus scrofa
  misc_feature (54)..(167): Homolog of NCBI NO: 18859221 NR Description: l-isoaspartyl protein carboxyl methyltransferase
  misc_feature (54)..(167): Homolog of NCBI NO: 417489 NR Description: PROTEIN-L-ISOASPARTATE(D-ASPARTATE)
  misc_feature (54)..(167): Homolog of NCBI NO: 29436595 NR Description: protein-L-isoaspartate (D-aspartate)
  misc_feature (54)..(167): Homolog of NCBI NO: 482365 NR Description: protein-L-isoaspartate(D-aspartate)
NLSFHLLPGRFLQSPATFNCRPQVAPRLTPNPSEESRRRLSSPVIITMEEHGLWSSGASDKNKSMVEQLQRYGVIRSTKVAEVMEAIDRGLFVPPGGSPYHDSPMPIGYNATISAPHMHAACLELLEKNLQPGMRALDVGSGTGYLTACFALMVGPEGRAVGVEHIP

SEQ ID NO: 4834 - protein, 120 aa, Zea mays subsp. mays
  peptide (1)..(120): Ceres Seq. ID no. 12362134
  misc_feature (13)..(120): Pfam Name: Protein-L-isoaspartate(D-aspartate) Pfam Description: Protein-L-isoaspartate(D-aspartate)
  misc_feature (7)..(120): Homolog of NCBI NO: 2499570 NR Description: PROTEIN-L-ISOASPARTATE O-METHYLTRANSFERASE
  misc_feature (7)..(120): Homolog of NCBI NO: 38345249 NR Description: OSJNBb0011N17.10 [Oryza sativa (japonica
  misc_feature (7)..(120): Homolog of NCBI NO: 1322021 NR Description: L-isoaspartyl methyltransferase
  misc_feature (7)..(120): Homolog of NCBI NO: 22331684 NR Description: similar to protein-L-isoaspartate(D-aspartate);
  misc_feature (9)..(120): Homolog of NCBI NO: 26451260 NR Description: unknown protein [Arabidopsis thaliana]
  misc_feature (7)..(120): Homolog of NCBI NO: 19070126 NR Description: protein carboxyl-o-methyltransferase [Sus scrofa
  misc_feature (7)..(120): Homolog of NCBI NO: 18859221 NR Description: l-isoaspartyl protein carboxyl methyltransferase
  misc_feature (7)..(120): Homolog of NCBI NO: 417489 NR Description: PROTEIN-L-ISOASPARTATE(D-ASPARTATE)
  misc_feature (7)..(120): Homolog of NCBI NO: 29436595 NR Description: protein-L-isoaspartate (D-aspartate)
  misc_feature (7)..(120): Homolog of NCBI NO: 482365 NR Description: protein-L-isoaspartate(D-aspartate)
MEEHGLWSSGASDKNKSMVEQLQRYGVIRSTKVAEVMEAIDRGLFVPPGGSPYHDSPMPIGYNATISAPHMHAACLELLEKNLQPGMRALDVGSGTGYLTACFALMVGPEGRAVGVEHIP

SEQ ID NO: 4835 - protein, 103 aa, Zea mays subsp. mays
  peptide (1)..(103): Ceres Seq. ID no. 12362135
  misc_feature (1)..(103): Pfam Name: Protein-L-isoaspartate(D-aspartate) Pfam Description: Protein-L-isoaspartate(D-aspartate)
  misc_feature (1)..(103): Homolog of NCBI NO: 29436595 NR Description: protein-L-isoaspartate (D-aspartate)
  misc_feature (1)..(103): Homolog of NCBI NO: 2499570 NR Description: PROTEIN-L-ISOASPARTATE O-METHYLTRANSFERASE
  misc_feature (1)..(103): Homolog of NCBI NO: 1322021 NR Description: L-isoaspartyl methyltransferase
  misc_feature (1)..(103): Homolog of NCBI NO: 26451260 NR Description: unknown protein [Arabidopsis thaliana]
  misc_feature (1)..(103): Homolog of NCBI NO: 18859221 NR Description: l-isoaspartyl protein carboxyl methyltransferase
  misc_feature (1)..(103): Homolog of NCBI NO: 417489 NR Description: PROTEIN-L-ISOASPARTATE(D-ASPARTATE)
  misc_feature (1)..(103): Homolog of NCBI NO: 19070126 NR Description: protein carboxyl-o-methyltransferase [Sus scrofa
  misc_feature (1)..(103): Homolog of NCBI NO: 22331684 NR Description: similar to protein-L-isoaspartate(D-aspartate);
  misc_feature (1)..(103): Homolog of NCBI NO: 38345249 NR Description: OSJNBb0011N17.10 [Oryza sativa (japonica
  misc_feature (1)..(103): Homolog of NCBI NO: 482365 NR Description: protein-L-isoaspartate(D-aspartate)
MVEQLQRYGVIRSTKVAEVMEAIDRGLFVPPGGSPYHDSPMPIGYNATISAPHMHAACLELLEKNLQPGMRALDVGSGTGYLTACFALMVGPEGRAVGVEHIP

SEQ ID NO: 4836 - DNA, 1259 bp, Zea mays subsp. mays
  misc_feature (1)..(1259): Ceres Seq. ID no. 12358301
  misc_feature: MA Experiment ID: 108504 Result: Up-regulated in Transcription
  misc_feature: MA Experiment 108504 PARAMETER Experiment Name: Zm_Drought_P Parameter: Age (day) Value: 8
  misc_feature: MA Experiment 108504 PARAMETER Experiment Name: Zm_Drought_P Parameter: Organism Value: Zea mays
  misc_feature: MA Experiment 108504 PARAMETER Experiment Name: Zm_Drought_P Parameter: Plant Line Value: 35A19
  misc_feature: MA Experiment 108504 PARAMETER Experiment Name: Zm_Drought_P Parameter: Timepoint (hr) Value: 12
  misc_feature: MA Experiment 108504 PARAMETER Experiment Name: Zm_Drought_P Parameter: Tissue Value: Aerial
  misc_feature: MA Experiment 108504 PARAMETER Experiment Name: Zm_Drought_P Parameter: Treatment Value: Drought vs. No Drought
  misc_feature: MA Experiment ID: 108526 Result: Up-regulated in Transcription
  misc_feature: MA Experiment 108526 PARAMETER Experiment Name: Zm_5mM_NO_P Parameter: Age (day) Value: 8
  misc_feature: MA Experiment 108526 PARAMETER Experiment Name: Zm_5mM_NO_P Parameter: Organism Value: Zea mays
  misc_feature: MA Experiment 108526 PARAMETER Experiment Name: Zm_5mM_NO_P Parameter: Plant Line Value: 35A19
  misc_feature: MA Experiment 108526 PARAMETER Experiment Name: Zm_5mM_NO_P Parameter: Timepoint (hr) Value: 1
  misc_feature: MA Experiment 108526 PARAMETER Experiment Name: Zm_5mM_NO_P Parameter: Tissue Value: Aerial
  misc_feature: MA Experiment 108526 PARAMETER Experiment Name: Zm_5mM_NO_P Parameter: Treatment Value: 5mM NO vs. No Treatment
  misc_feature: MA Experiment ID: 108527 Result: Up-regulated in Transcription
  misc_feature: MA Experiment 108527 PARAMETER Experiment Name: Zm_5mM_NO_P Parameter: Age (day) Value: 8
  misc_feature: MA Experiment 108527 PARAMETER Experiment Name: Zm_5mM_NO_P Parameter: Organism Value: Zea mays
  misc_feature: MA Experiment 108527 PARAMETER Experiment Name: Zm_5mM_NO_P Parameter: Plant Line Value: 35A19
  misc_feature: MA Experiment 108527 PARAMETER Experiment Name: Zm_5mM_NO_P Parameter: Timepoint (hr) Value: 6
  misc_feature: MA Experiment 108527 PARAMETER Experiment Name: Zm_5mM_NO_P Parameter: Tissue Value: Aerial
  misc_feature: MA Experiment 108527 PARAMETER Experiment Name: Zm_5mM_NO_P Parameter: Treatment Value: 5mM NO vs. No Treatment
  misc_feature: MA Experiment ID: 108528 Result: Down-regulated in Transcription
  misc_feature: MA Experiment 108528 PARAMETER Experiment Name: Zm_Imbibed_Seeds_P Parameter: Age (day) Value: 5 vs. 2
  misc_feature: MA Experiment 108528 PARAMETER Experiment Name: Zm_Imbibed_Seeds_P Parameter: Organism Value: Zea mays
  misc_feature: MA Experiment 108528 PARAMETER Experiment Name: Zm_Imbibed_Seeds_P Parameter: Plant Line Value: 35A19
  misc_feature: MA Experiment 108528 PARAMETER Experiment Name: Zm_Imbibed_Seeds_P Parameter: Tissue Value: Aerial vs. Embryo
  misc_feature: MA Experiment ID: 108529 Result: Down-regulated in Transcription
  misc_feature: MA Experiment 108529 PARAMETER Experiment Name: Zm_Imbibed_Seeds_P Parameter: Age (day) Value: 5 vs. 2
  misc_feature: MA Experiment 108529 PARAMETER Experiment Name: Zm_Imbibed_Seeds_P Parameter: Organism Value: Zea mays
  misc_feature: MA Experiment 108529 PARAMETER Experiment Name: Zm_Imbibed_Seeds_P Parameter: Plant Line Value: 35A19
  misc_feature: MA Experiment 108529 PARAMETER Experiment Name: Zm_Imbibed_Seeds_P Parameter: Tissue Value: Roots vs. Embryo
  misc_feature: MA Experiment ID: 108535 Result: Up-regulated in Transcription
  misc_feature: MA Experiment 108535 PARAMETER Experiment Name: Zm_Meristem_P Parameter: Age (day) Value: 8
  misc_feature: MA Experiment 108535 PARAMETER Experiment Name: Zm_Meristem_P Parameter: Organism Value: Zea mays
  misc_feature: MA Experiment 108535 PARAMETER Experiment Name: Zm_Meristem_P Parameter: Plant Line Value: 35A19
  misc_feature: MA Experiment 108535 PARAMETER Experiment Name: Zm_Meristem_P Parameter: Tissue Value: Root Meristem vs. Above Root Meristem
  misc_feature: MA Experiment ID: 108540 Result: Up-regulated in Transcription
  misc_feature: MA Experiment 108540 PARAMETER Experiment Name: Zm_20percent_PEG_P Parameter: Age (day) Value: 8
  misc_feature: MA Experiment 108540 PARAMETER Experiment Name: Zm_20percent_PEG_P Parameter: Organism Value: Zea mays
  misc_feature: MA Experiment 108540 PARAMETER Experiment Name: Zm_20percent_PEG_P Parameter: Plant Line Value: 35A19
  misc_feature: MA Experiment 108540 PARAMETER Experiment Name: Zm_20percent_PEG_P Parameter: Timepoint (hr) Value: 6
  misc_feature: MA Experiment 108540 PARAMETER Experiment Name: Zm_20percent_PEG_P Parameter: Tissue Value: Aerial
  misc_feature: MA Experiment 108540 PARAMETER Experiment Name: Zm_20percent_PEG_P Parameter: Treatment Value: 20percent PEG vs. No Treatment
  misc_feature: MA Experiment ID: 108542 Result: Up-regulated in Transcription
  misc_feature: MA Experiment 108542 PARAMETER Experiment Name: Zm_150mM_NaCl_P Parameter: Age (day) Value: 8
  misc_feature: MA Experiment 108542 PARAMETER Experiment Name: Zm_150mM_NaCl_P Parameter: Organism Value: Zea mays
  misc_feature: MA Experiment 108542 PARAMETER Experiment Name: Zm_150mM_NaCl_P Parameter: Plant Line Value: 35A19
  misc_feature: MA Experiment 108542 PARAMETER Experiment Name: Zm_150mM_NaCl_P Parameter: Timepoint (hr) Value: 6
  misc_feature: MA Experiment 108542 PARAMETER Experiment Name: Zm_150mM_NaCl_P Parameter: Tissue Value: Aerial
  misc_feature: MA Experiment 108542 PARAMETER Experiment Name: Zm_150mM_NaCl_P Parameter: Treatment Value: 150mM NaCl vs. No Treatment
  misc_feature: MA Experiment ID: 108543 Result: Down-regulated in Transcription
  misc_feature: MA Experiment ID: 108545 Result: Down-regulated in Transcription
  misc_feature: MA Experiment 108545 PARAMETER Experiment Name: Zm_Imbibed_Seeds_P Parameter: Age (day) Value: 3 vs. 2
  misc_feature: MA Experiment 108545 PARAMETER Experiment Name: Zm_Imbibed_Seeds_P Parameter: Organism Value: Zea mays
  misc_feature: MA Experiment 108545 PARAMETER Experiment Name: Zm_Imbibed_Seeds_P Parameter: Plant Line Value: 35A19
  misc_feature: MA Experiment 108545 PARAMETER Experiment Name: Zm_Imbibed_Seeds_P Parameter: Tissue Value: Aerial vs. Embryo
  misc_feature: MA Experiment ID: 108546 Result: Down-regulated in Transcription
  misc_feature: MA Experiment 108546 PARAMETER Experiment Name: Zm_Imbibed_Seeds_P Parameter: Age (day) Value: 3 vs. 2
  misc_feature: MA Experiment 108546 PARAMETER Experiment Name: Zm_Imbibed_Seeds_P Parameter: Organism Value: Zea mays
  misc_feature: MA Experiment 108546 PARAMETER Experiment Name: Zm_Imbibed_Seeds_P Parameter: Plant Line Value: 35A19
  misc_feature: MA Experiment 108546 PARAMETER Experiment Name: Zm_Imbibed_Seeds_P Parameter: Tissue Value: Roots vs. Embryo
  misc_feature: MA Experiment ID: 108547 Result: Down-regulated in Transcription
  misc_feature: MA Experiment 108547 PARAMETER Experiment Name: Zm_Imbibed_Seeds_P Parameter: Age (day) Value: 4 vs. 2
  misc_feature: MA Experiment 108547 PARAMETER Experiment Name: Zm_Imbibed_Seeds_P Parameter: Organism Value: Zea mays
  misc_feature: MA Experiment 108547 PARAMETER Experiment Name: Zm_Imbibed_Seeds_P Parameter: Plant Line Value: 35A19
  misc_feature: MA Experiment 108547 PARAMETER Experiment Name: Zm_Imbibed_Seeds_P Parameter: Tissue Value: Aerial vs. Embryo
  misc_feature: MA Experiment ID: 108556 Result: Up-regulated in Transcription
  misc_feature: MA Experiment 108556 PARAMETER Experiment Name: Zm_Drought_P Parameter: Age (day) Value: 9
  misc_feature: MA Experiment 108556 PARAMETER Experiment Name: Zm_Drought_P Parameter: Organism Value: Zea mays
  misc_feature: MA Experiment 108556 PARAMETER Experiment Name: Zm_Drought_P Parameter: Plant Line Value: 35A19
  misc_feature: MA Experiment 108556 PARAMETER Experiment Name: Zm_Drought_P Parameter: Timepoint (hr) Value: 24
  misc_feature: MA Experiment 108556 PARAMETER Experiment Name: Zm_Drought_P Parameter: Tissue Value: Aerial
  misc_feature: MA Experiment 108556 PARAMETER Experiment Name: Zm_Drought_P Parameter: Treatment Value: Drought vs. No Drought
  misc_feature: MA Experiment ID: 108559 Result: Up-regulated in Transcription
  misc_feature: MA Experiment 108559 PARAMETER Experiment Name: Zm_5mM_NO_P Parameter: Age (day) Value: 8
  misc_feature: MA Experiment 108559 PARAMETER Experiment Name: Zm_5mM_NO_P Parameter: Organism Value: Zea mays
  misc_feature: MA Experiment 108559 PARAMETER Experiment Name: Zm_5mM_NO_P Parameter: Plant Line Value: 35A19
  misc_feature: MA Experiment 108559 PARAMETER Experiment Name: Zm_5mM_NO_P Parameter: Timepoint (hr) Value: 12
  misc_feature: MA Experiment 108559 PARAMETER Experiment Name: Zm_5mM_NO_P Parameter: Tissue Value: Aerial
  misc_feature: MA Experiment 108559 PARAMETER Experiment Name: Zm_5mM_NO_P Parameter: Treatment Value: 5mM NO vs. No Treatment
  misc_feature: MA Experiment ID: 108597 Result: Up-regulated in Transcription
  misc_feature: MA Experiment 108597 PARAMETER Experiment Name: Zm_100uM_ABA_P Parameter: Age (day) Value: 9
  misc_feature: MA Experiment 108597 PARAMETER Experiment Name: Zm_100uM_ABA_P Parameter: Organism Value: Zea mays
  misc_feature: MA Experiment 108597 PARAMETER Experiment Name: Zm_100uM_ABA_P Parameter: Plant Line Value: 35A19
  misc_feature: MA Experiment 108597 PARAMETER Experiment Name: Zm_100uM_ABA_P Parameter: Timepoint (hr) Value: 24
  misc_feature: MA Experiment 108597 PARAMETER Experiment Name: Zm_100uM_ABA_P Parameter: Tissue Value: Aerial
  misc_feature: MA Experiment 108597 PARAMETER Experiment Name: Zm_100uM_ABA_P Parameter: Treatment Value: 100uM ABA vs. No Treatment
  misc_feature: MA Experiment ID: 108689 Result: Up-regulated in Transcription
  misc_feature: MA Experiment 108689 PARAMETER Experiment Name: Zm_Drought_Roots_P Parameter: Age (day) Value: 9
  misc_feature: MA Experiment 108689 PARAMETER Experiment Name: Zm_Drought_Roots_P Parameter: Organism Value: Zea mays
  misc_feature: MA Experiment 108689 PARAMETER Experiment Name: Zm_Drought_Roots_P Parameter: Plant Line Value: 35A19
  misc_feature: MA Experiment 108689 PARAMETER Experiment Name: Zm_Drought_Roots_P Parameter: Timepoint (hr) Value: 24
  misc_feature: MA Experiment 108689 PARAMETER Experiment Name: Zm_Drought_Roots_P Parameter: Tissue Value: Roots
  misc_feature: MA Experiment 108689 PARAMETER Experiment Name: Zm_Drought_Roots_P Parameter: Treatment Value: Drought vs. No Drought
  misc_feature: MA Experiment ID: 20000477 Result: Up-regulated in Transcription
  misc_feature: MA Experiment 20000477 PARAMETER Experiment Name: Zm_5mM_SA_P Parameter: Age (day) Value: 10
  misc_feature: MA Experiment 20000477 PARAMETER Experiment Name: Zm_5mM_SA_P Parameter: Organism Value: Zea mays
  misc_feature: MA Experiment 20000477 PARAMETER Experiment Name: Zm_5mM_SA_P Parameter: Plant Line Value: 35A19
  misc_feature: MA Experiment 20000477 PARAMETER Experiment Name: Zm_5mM_SA_P Parameter: Timepoint (hr) Value: 48
  misc_feature: MA Experiment 20000477 PARAMETER Experiment Name: Zm_5mM_SA_P Parameter: Tissue Value: Aerial
  misc_feature: MA Experiment 20000477 PARAMETER Experiment Name: Zm_5mM_SA_P Parameter: Treatment Value: 5mM SA vs. No Treatment
  misc_feature: MA Experiment ID: 20000479 Result: Up-regulated in Transcription
  misc_feature: MA Experiment 20000479 PARAMETER Experiment Name: Zm_Drought_P Parameter: Age (day) Value: 10
  misc_feature: MA Experiment 20000479 PARAMETER Experiment Name: Zm_Drought_P Parameter: Organism Value: Zea mays
  misc_feature: MA Experiment 20000479 PARAMETER Experiment Name: Zm_Drought_P Parameter: Plant Line Value: 35A19
  misc_feature: MA Experiment 20000479 PARAMETER Experiment Name: Zm_Drought_P Parameter: Timepoint (hr) Value: 48
  misc_feature: MA Experiment 20000479 PARAMETER Experiment Name: Zm_Drought_P Parameter: Tissue Value: Aerial
  misc_feature: MA Experiment 20000479 PARAMETER Experiment Name: Zm_Drought_P Parameter: Treatment Value: Drought vs. No Drought
  misc_feature: MA Experiment ID: 20000480 Result: Up-regulated in Transcription
  misc_feature: MA Experiment 20000480 PARAMETER Experiment Name: Zm_Drought_P Parameter: Age (day) Value: 11
  misc_feature: MA Experiment 20000480 PARAMETER Experiment Name: Zm_Drought_P Parameter: Organism Value: Zea mays
  misc_feature: MA Experiment 20000480 PARAMETER Experiment Name: Zm_Drought_P Parameter: Plant Line Value: 35A19
  misc_feature: MA Experiment 20000480 PARAMETER Experiment Name: Zm_Drought_P Parameter: Timepoint (hr) Value: 72
  misc_feature: MA Experiment 20000480 PARAMETER Experiment Name: Zm_Drought_P Parameter: Tissue Value: Aerial
  misc_feature: MA Experiment 20000480 PARAMETER Experiment Name: Zm_Drought_P Parameter: Treatment Value: Drought vs. No Drought
agtgtctcctcccttccctctagtattttacagtattttactcgctgcctgcgttccaaaacctttcgtcttttcccccgccgtctacaaagacttcacactcgcagtcgcagccgcaggctgctccggcagactccttcaccgcgaagacttctcctctcctctctcctctctcccttccactcgcgctctcctggataccgcgcgcggcgacgagatggcgatagatcacgggacccctctcgggctgaagcggagaggcgccatgggcggaggtggcgagtgctgcgacgacggcagcgagacccggcggttgccgccgtggctgaggccgctgctgtccgcgagcttcttcgtccaatgcagggtccacgccgacgcgcacaagagcgagtgcaacatgtactgcctcgactgcatgggcgacgctctctgcgcgctctgcctcgccgcgcgccaccgcgaccaccactccatccagatacggaggtcgtcgtaccacgacgtgatccgggtgtcggagatacagaaggtgctggacatcgccggcgtgcagacgtacatcatcaacagcgcgcgcgtggtgttcctgaacgagcggccgcagccccgcccgggcaagggcgtcaccaacacctacgaggtctgcgagcgcagcctcctcgactgcttccgcttctgctcccttgggtgcaagatagtgggcacggcccgtggctaccgtcctgggaagaagaagcacggcggcggcggcggtaacaagaagagggcggcgccggcgccggcgcttaaggacgtgcggtctgactcggaggactcgtgcaccagcaccagcggcgccagcagcgacaagagcagcgtcgtgcagagctcccctccgccgccgacctctgccagccaccgcccccccgggaacaagcgccggaagggcgtcccgcaccggtcgcccttgggcagcctcatcgtcgagctctaggactcttcgtcagcgccaaggcaaggcaaggcaacgcactctgtactgtacatgacataccccccgaagagaagggaataacaaacagtaagcctctggacgtggagggcgaagggcgacagcggtaagccgtaagatcggacaatccttagttttgcttcttctcaggttttgttttgcttttacagttactaccactctagcagtggtaccatcagtaagataaccgcgactaagttttgcagccttgtacattgtaatattattattactatagaccagg

SEQ ID NO: 4837 - protein, 324 aa, Zea mays subsp. mays
  peptide (1)..(324): Ceres Seq. ID no. 12358302
  misc_feature (106)..(311): Pfam Name: Protein of unknown function, DUF597 Pfam Description: Protein of unknown function, DUF597
  misc_feature (86)..(323): Homolog of NCBI NO: 38346725 NR Description: OSJNBa0086O06.23 [Oryza sativa (japonica
  misc_feature (73)..(323): Homolog of NCBI NO: 37537092 NR Description: unknown protein [Oryza sativa (japonica
  misc_feature (101)..(323): Homolog of NCBI NO: 6714272 NR Description: F6N18.8 [Arabidopsis thaliana]
  misc_feature (101)..(323): Homolog of NCBI NO: 18398555 NR Description: expressed protein; protein id: At1g32700.1,
  misc_feature (101)..(323): Homolog of NCBI NO: 21554139 NR Description: unknown [Arabidopsis thaliana]
  misc_feature (84)..(318): Homolog of NCBI NO: 15236696 NR Description: putative protein; protein id: At4g17900.1
  misc_feature (106)..(261): Homolog of NCBI NO: 18394936 NR Description: expressed protein; protein id: At1g21000.1, by cDNA: 119384., supported by cDNA: gi_14030626, supported by gi_16226406 [Arabidopsis thaliana]
  misc_feature (106)..(261): Homolog of NCBI NO: 25337907 NR Description: hypothetical protein F9H16.1 - Arabidopsis >gi|4836888|gb|AAD30591.1|AC007369_1 Unknown protein [Arabidopsis >gi|13877713|gb|AAK43934.1|AF370615_1 Unknown protein
  misc_feature (106)..(261): Homolog of NCBI NO: 21537073 NR Description: unknown [Arabidopsis thaliana]
  misc_feature (106)..(312): Homolog of NCBI NO: 18411153 NR Description: expressed protein; protein id: At1g76590.1,
VSPPFPLVFYSILLAACVPKPFVFSPAVYKDFTLAVAAAGCSGRLLHREDFSSPLSSLPSTRALLDTARGDEMAIDHGTPLGLKRRGAMGGGGECCDDGSETRRLPPWLRPLLSASFFVQCRVHADAHKSECNMYCLDCMGDALCALCLAARHRDHHSIQIRRSSYHDVIRVSEIQKVLDIAGVQTYIINSARVVFLNERPQPRPGKGVTNTYEVCERSLLDCFRFCSLGCKIVGTARGYRPGKKKHGGGGGNKKRAAPAPALKDVRSDSEDSCTSTSGASSDKSSVVQSSPPPPTSASHRPPGNKRRKGVPHRSPLGSLIVEL

SEQ ID NO: 4838 - protein, 252 aa, Zea mays subsp. mays
  peptide (1)..(252): Ceres Seq. ID no. 12358303
  misc_feature (54)..(155): Pfam Name: Cupin Pfam Description: Cupin
SVSSLPSSILQYFTRCLRSKTFRLFPRRLQRLHTRSRSRRLLRQTPSPRRLLLSSLLSPFHSRSPGYRARRRDGDRSRDPSRAEAERRHGRRWRVLRRRQRDPAVAAVAEAAAVRELLRPMQGPRRRAQERVQHVLPRLHGRRSLRALPRRAPPRPPLHPDTEVVVPRRDPGVGDTEGAGHRRRADVHHQQRARGVPERAAAAPPGQGRHQHLRGLRAQPPRLLPLLLPWVQDSGHGPWLPSWEEEARRRRR

SEQ ID NO: 4839 - protein, 252 aa, Zea mays subsp. mays
  peptide (1)..(252): Ceres Seq. ID no. 12358304
  misc_feature (34)..(239): Pfam Name: Protein of unknown function, DUF597 Pfam Description: Protein of unknown function, DUF597
  misc_feature (14)..(251): Homolog of NCBI NO: 38346725 NR Description: OSJNBa0086O06.23 [Oryza sativa (japonica
  misc_feature (1)..(251): Homolog of NCBI NO: 37537092 NR Description: unknown protein [Oryza sativa (japonica
  misc_feature (29)..(251): Homolog of NCBI NO: 6714272 NR Description: F6N18.8 [Arabidopsis thaliana]
  misc_feature (29)..(251): Homolog of NCBI NO: 18398555 NR Description: expressed protein; protein id: At1g32700.1,
  misc_feature (29)..(251): Homolog of NCBI NO: 21554139 NR Description: unknown [Arabidopsis thaliana]
  misc_feature (12)..(246): Homolog of NCBI NO: 15236696 NR Description: putative protein; protein id: At4g17900.1
  misc_feature (34)..(189): Homolog of NCBI NO: 18394936 NR Description: expressed protein; protein id: At1g21000.1, by cDNA: 119384., supported by cDNA: gi_14030626, supported by gi_16226406 [Arabidopsis thaliana]
  misc_feature (34)..(189): Homolog of NCBI NO: 25337907 NR Description: hypothetical protein F9H16.1 - Arabidopsis >gi|4836888|gb|AAD30591.1|AC007369_1 Unknown protein [Arabidopsis >gi|13877713|gb|AAK43934.1|AF370615_1 Unknown protein
  misc_feature (34)..(189): Homolog of NCBI NO: 21537073 NR Description: unknown [Arabidopsis thaliana]
  misc_feature (34)..(240): Homolog of NCBI NO: 18411153 NR Description: expressed protein; protein id: At1g76590.1,
MAIDHGTPLGLKRRGAMGGGGECCDDGSETRRLPPWLRPLLSASFFVQCRVHADAHKSECNMYCLDCMGDALCALCLAARHRDHHSIQIRRSSYHDVIRVSEIQKVLDIAGVQTYIINSARVVFLNERPQPRPGKGVTNTYEVCERSLLDCFRFCSLGCKIVGTARGYRPGKKKHGGGGGNKKRAAPAPALKDVRSDSEDSCTSTSGASSDKSSVVQSSPPPPTSASHRPPGNKRRKGVPHRSPLGSLIVEL

SEQ ID NO: 4840 - DNA, 1204 bp, Zea mays subsp. mays
  misc_feature (1)..(1204): Ceres Seq. ID no. 12409816
  misc_feature: MA Experiment ID: 108544 Result: Down-regulated in Transcription
agtcgccccccagtccatcaccacttctccattcctctttcccagtgcccccagtccatcaccacatccgttcaaatgggccgcaaccgcaagggccgcaaggctagggtttcgcacgacgccgacgccgacgccgacgccgatggcagcgaggatgagagggccaccactgcgggcaggagcctctacgagattctaggagttgagaagaccgcttctcaacaagaaataaagaaggcgtatcacaaattggctctgcgcctccacccagataagaatcctggggatgaggaagccaaagagaagtttcagcagctgcagaaggttatatccattcttggagatgtagagaaaagagctttatatgatgagactggcatcactgatgatgatgcactggtgggagaagctgcaaacaatcttcaggagtacttcagaacaatgtacaagaaagtcacggaggctgacattgaagaatttgaagctaaatatagagggtcagattctgagaaaacggacttgaaggaactctacacaaaatataagggcaacatgaacaggctttctgcgcaatgatttgctcagaaccaaagcttgattctcaccgcttcaaggatataattgacgaggcgattggtgaaggtgagctgaagtcaactaaggtgtatgagaaatgggctaaaaagatctcagggatggagccaccaacaaatccgctagagaggagagtgaagaagaggaagaacagtgaggagaatgatctgatactggctatctcacagcgcagggctgagcggaaaaaaacagttcaactccatcctctcgaacatcatgtccaagtgtgactccaaggcgagcagctcggagcccacggaagaagagtttgagcaggcgcaacagaggctggagagcagaagggccaagaggcgcaagtgatgctgctgccagccttcttgccctatgctgaacattgtctgaagcttttggtgtgacctgattttaccagcatgcaagtgatgtttctaagacccagctcagtttgagcgtgtcagggtggggtgtgtgtcatatctcttgtcctctcacgatacactatgtcgtatggttatcggcttatcaccttgccgagagggaagctctatctgaacttttaattccgtagcatttggcaagtactagtagattgcaatgtaatgtttattcc

SEQ ID NO: 4841 - protein, 191 aa, Zea mays subsp. mays
  peptide (1)..(191): Ceres Seq. ID no. 12409817
  misc_feature (61)..(126): Pfam Name: DnaJ domain Pfam Description: DnaJ domain
  misc_feature (26)..(188): Homolog of NCBI NO: 15240212 NR Description: DnaJ homologue (gb|AAB91418.1|); protein id: supported by cDNA: gi_2689719 [Arabidopsis thaliana]
  misc_feature (26)..(188): Homolog of NCBI NO: 2689720 NR Description: DnaJ homologue [Arabidopsis thaliana]
  misc_feature (60)..(191): Homolog of NCBI NO: 15230424 NR Description: DnaJ protein, putative; protein id: At3g12170.1
  misc_feature (60)..(191): Homolog of NCBI NO: 12322012 NR Description: DnaJ protein, putative, 3' partial; 1110-1
  misc_feature (62)..(188): Homolog of NCBI NO: 27597059 NR Description: DnaJ homolog, subfamily C, member 9; DnaJ protein
  misc_feature (62)..(186): Homolog of NCBI NO: 39794528 NR Description: Unknown (protein for MGC:76175) [Silurana
  misc_feature (62)..(188): Homolog of NCBI NO: 9971117 NR Description: dJ1099D15.1 (putative DNAJ protein) [Homo sapiens]
  misc_feature (62)..(188): Homolog of NCBI NO: 23956266 NR Description: similar to DnaJ protein SB73; likely ortholog of
  misc_feature (62)..(188): Homolog of NCBI NO: 26335859 NR Description: unnamed protein product [Mus musculus]
  misc_feature (62)..(188): Homolog of NCBI NO: 25513803 NR Description: J domain of DnaJ-like-protein 1 - rat
SRPPVHHHFSIPLSQCPQSITTSVQMGRNRKGRKARVSHDADADADADGSEDERATTAGRSLYEILGVEKTASQQEIKKAYHKLALRLHPDKNPGDEEAKEKFQQLQKVISILGDVEKRALYDETGITDDDALVGEAANNLQEYFRTMYKKVTEADIEEFEAKYRGSDSEKTDLKELYTKYKGNMNRLSAQ

SEQ ID NO: 4842 - protein, 166 aa, Zea mays subsp. mays
  peptide (1)..(166): Ceres Seq. ID no. 12409818
  misc_feature (36)..(101): Pfam Name: DnaJ domain Pfam Description: DnaJ domain
  misc_feature (1)..(163): Homolog of NCBI NO: 15240212 NR Description: DnaJ homologue (gb|AAB91418.1|); protein id: supported by cDNA: gi_2689719 [Arabidopsis thaliana]
  misc_feature (1)..(163): Homolog of NCBI NO: 2689720 NR Description: DnaJ homologue [Arabidopsis thaliana]
  misc_feature (35)..(166): Homolog of NCBI NO: 15230424 NR Description: DnaJ protein, putative; protein id: At3g12170.1
  misc_feature (35)..(166): Homolog of NCBI NO: 12322012 NR Description: DnaJ protein, putative, 3' partial; 1110-1
  misc_feature (37)..(163): Homolog of NCBI NO: 27597059 NR Description: DnaJ homolog, subfamily C, member 9; DnaJ protein
  misc_feature (37)..(161): Homolog of NCBI NO: 39794528 NR Description: Unknown (protein for MGC:76175) [Silurana
  misc_feature (37)..(163): Homolog of NCBI NO: 9971117 NR Description: dJ1099D15.1 (putative DNAJ protein) [Homo sapiens]
  misc_feature (37)..(163): Homolog of NCBI NO: 23956266 NR Description: similar to DnaJ protein SB73; likely ortholog of
  misc_feature (37)..(163): Homolog of NCBI NO: 26335859 NR Description: unnamed protein product [Mus musculus]
  misc_feature (37)..(163): Homolog of NCBI NO: 25513803 NR Description: J domain of DnaJ-like-protein 1 - rat
MGRNRKGRKARVSHDADADADADGSEDERATTAGRSLYEILGVEKTASQQEIKKAYHKLALRLHPDKNPGDEEAKEKFQQLQKVISILGDVEKRALYDETGITDDDALVGEAANNLQEYFRTMYKKVTEADIEEFEAKYRGSDSEKTDLKELYTKYKGNMNRLSAQ

SEQ ID NO: 4843 - DNA, 1636 bp, Zea mays subsp. mays
  misc_feature (1)..(1636): Ceres Seq. ID no. 12376468
  misc_feature: MA Experiment ID: 108528 Result: Down-regulated in Transcription
  misc_feature: MA Experiment 108528 PARAMETER Experiment Name: Zm_Imbibed_Seeds_P Parameter: Age (day) Value: 5 vs. 2
  misc_feature: MA Experiment 108528 PARAMETER Experiment Name: Zm_Imbibed_Seeds_P Parameter: Organism Value: Zea mays
  misc_feature: MA Experiment 108528 PARAMETER Experiment Name: Zm_Imbibed_Seeds_P Parameter: Plant Line Value: 35A19
  misc_feature: MA Experiment 108528 PARAMETER Experiment Name: Zm_Imbibed_Seeds_P Parameter: Tissue Value: Aerial vs. Embryo
  misc_feature: MA Experiment ID: 108529 Result: Up-regulated in Transcription
  misc_feature: MA Experiment 108529 PARAMETER Experiment Name: Zm_Imbibed_Seeds_P Parameter: Age (day) Value: 5 vs. 2
  misc_feature: MA Experiment 108529 PARAMETER Experiment Name: Zm_Imbibed_Seeds_P Parameter: Organism Value: Zea mays
  misc_feature: MA Experiment 108529 PARAMETER Experiment Name: Zm_Imbibed_Seeds_P Parameter: Plant Line Value: 35A19
  misc_feature: MA Experiment 108529 PARAMETER Experiment Name: Zm_Imbibed_Seeds_P Parameter: Tissue Value: Roots vs. Embryo
  misc_feature: MA Experiment ID: 108535 Result: Down-regulated in Transcription
  misc_feature: MA Experiment 108535 PARAMETER Experiment Name: Zm_Meristem_P Parameter: Age (day) Value: 8
  misc_feature: MA Experiment 108535 PARAMETER Experiment Name: Zm_Meristem_P Parameter: Organism Value: Zea mays
  misc_feature: MA Experiment 108535 PARAMETER Experiment Name: Zm_Meristem_P Parameter: Plant Line Value: 35A19
  misc_feature: MA Experiment 108535 PARAMETER Experiment Name: Zm_Meristem_P Parameter: Tissue Value: Root Meristem vs. Above Root Meristem
  misc_feature: MA Experiment ID: 108536 Result: Up-regulated in Transcription
  misc_feature: MA Experiment 108536 PARAMETER Experiment Name: Zm_Meristem_P Parameter: Age (day) Value: 8
  misc_feature: MA Experiment 108536 PARAMETER Experiment Name: Zm_Meristem_P Parameter: Organism Value: Zea mays
  misc_feature: MA Experiment 108536 PARAMETER Experiment Name: Zm_Meristem_P Parameter: Plant Line Value: 35A19
  misc_feature: MA Experiment 108536 PARAMETER Experiment Name: Zm_Meristem_P Parameter: Tissue Value: Shoot Meristem vs. Above Shoot Meristem
  misc_feature: MA Experiment ID: 108543 Result: Up-regulated in Transcription
  misc_feature: MA Experiment ID: 108545 Result: Down-regulated in Transcription
  misc_feature: MA Experiment 108545 PARAMETER Experiment Name: Zm_Imbibed_Seeds_P Parameter: Age (day) Value: 3 vs. 2
  misc_feature: MA Experiment 108545 PARAMETER Experiment Name: Zm_Imbibed_Seeds_P Parameter: Organism Value: Zea mays
  misc_feature: MA Experiment 108545 PARAMETER Experiment Name: Zm_Imbibed_Seeds_P Parameter: Plant Line Value: 35A19
  misc_feature: MA Experiment 108545 PARAMETER Experiment Name: Zm_Imbibed_Seeds_P Parameter: Tissue Value: Aerial vs. Embryo
  misc_feature: MA Experiment ID: 108546 Result: Up-regulated in Transcription
  misc_feature: MA Experiment 108546 PARAMETER Experiment Name: Zm_Imbibed_Seeds_P Parameter: Age (day) Value: 3 vs. 2
  misc_feature: MA Experiment 108546 PARAMETER Experiment Name: Zm_Imbibed_Seeds_P Parameter: Organism Value: Zea mays
  misc_feature: MA Experiment 108546 PARAMETER Experiment Name: Zm_Imbibed_Seeds_P Parameter: Plant Line Value: 35A19
  misc_feature: MA Experiment 108546 PARAMETER Experiment Name: Zm_Imbibed_Seeds_P Parameter: Tissue Value: Roots vs. Embryo
  misc_feature: MA Experiment ID: 108687 Result: Down-regulated in Transcription
  misc_feature: MA Experiment 108687 PARAMETER Experiment Name: Zm_Embryos-Flowers__P Parameter: Tissue Value: Embryo vs. Aerial+
  misc_feature: MA Experiment ID: 20000108 Result: Down-regulated in Transcription
  misc_feature: MA Experiment 20000108 PARAMETER Experiment Name: Zm_Root-Tips_P Parameter: Age (day) Value: 12
  misc_feature: MA Experiment 20000108 PARAMETER Experiment Name: Zm_Root-Tips_P Parameter: Organism Value: Zea mays
  misc_feature: MA Experiment 20000108 PARAMETER Experiment Name: Zm_Root-Tips_P Parameter: Tissue Value: Root tips vs. Root mid region    35
  misc_feature: MA Experiment 20000108 PARAMETER Experiment Name: Zm_Root-Tips_P Parameter: Tissue Value: Root tips vs. Root mid region   Sequence Listing-Misc Features (4)
  misc_feature: MA Experiment ID: 20000492 Result: Down-regulated in Transcription
  misc_feature: MA Experiment 20000492 PARAMETER Experiment Name: Zm_Hybrid_Seed_Dev_P Parameter: DAP Value: 12
  misc_feature: MA Experiment 20000492 PARAMETER Experiment Name: Zm_Hybrid_Seed_Dev_P Parameter: Organism Value: Zea mays
  misc_feature: MA Experiment 20000492 PARAMETER Experiment Name: Zm_Hybrid_Seed_Dev_P Parameter: Plant Line Value: 35A19
  misc_feature: MA Experiment 20000492 PARAMETER Experiment Name: Zm_Hybrid_Seed_Dev_P Parameter: Tissue Value: Fert Kernel vs. Unfert Floret
  misc_feature: MA Experiment ID: 20000535 Result: Down-regulated in Transcription
  misc_feature: MA Experiment 20000535 PARAMETER Experiment Name: Zm_Hybrid_Seed_Dev_P Parameter: DAP Value: 30 vs. 12
  misc_feature: MA Experiment 20000535 PARAMETER Experiment Name: Zm_Hybrid_Seed_Dev_P Parameter: Organism Value: Zea mays
  misc_feature: MA Experiment 20000535 PARAMETER Experiment Name: Zm_Hybrid_Seed_Dev_P Parameter: Plant Line Value: 35A19
  misc_feature: MA Experiment 20000535 PARAMETER Experiment Name: Zm_Hybrid_Seed_Dev_P Parameter: Tissue Value: Embryo vs. Unfert Floret
gctagctgctaccagccgacgacgacggccgcgcgcgtttgttgtgtgtgtgtgtgtgtgtgtgtgtgtgtgtgtgtgtgtgtgttataagcgcgagggtttctggcgaggttgctaaagcgttagcgggggcgcccatggagcttgacgaggagacgttcttggacgagctcatgtcgctgcggcgggaggcgncggcggcggcgtccgggcagtggcaagcagctgccgcctacacgggcggcggcggagacgaaggcatgatgatgggcgacctcctcttctacggcggggcgacggaggccgccgcgactgccaccagcggcggcggcatggaccagctctcgccgttccaccagcacgcgccgctgcaggtgcaggtgcaggcgcccgcggcggccccgcaccctcactcgcacgaggagttcaacttcgactgcctcagcgaggtttgcaacccgtacaggggggccggcgtcgccgtaataacgggggccgaggccgccgcggtgcctggaagggcgctcgccgctctccacgacgccatggtggaggacgagacgagcggtcacctgccgcaggggcagcaacatggagccggcgggtccccgacgttcgtgttcggcggtgccgccggcgagagctccgagcagatgcccgtcgtcgtcaggggtgccggcggcggcccccaccacaggagcaaggtccacggcggcgcgccgtccaagaatctcatggccgagaggcggcggcggaagcgcctcaacgaccgtctctccatgctccgctccattgttcccaagatcagcaagatggacaggacatccattctcggggacaccattgactacgtgaaggagctgacggagcggatcaaagtcctggaagaggagatcggcgcctctgcggaggacctggacctcctcaacaccttgaaagcttcttcgtccagcggcagcaacgagatgatggtgaggaactccacaaagttcgacgtcgagaggcggggcaacgggagcacgaggatcgagatctgctgcgccacaaaccccgaggtgctgctgtccacggtaagcgcgctggaggtgctgggcctggagatcgagcagtgcgtggtgagctgcttcagcgactttggcatgcaggcctcttgctcacaagaggaggaggacggtaataataagaggcaagttctaagcaccgacgagataaaacaggccttgtttcggagtgctggctacggagggaggtgcctctaatatagctagcttagctaccatgcaagcagctccgatccaaacccaggccatcgatcccggcaaatactgtataaagctagctagtaagttgcatgcatctatgattgttattgctgtgtgtttgatgctttagttttcatcaatatatatatcccgtacgttaattggttttctccatgagttcatagcgctaataagtgtgcgtagtagtagtagcagcaagaggtatgtatgtatatatatctgaatcccagcaccaaattgaagatttgttgctcaggtattgtaagttgatcatttcttacggtctgtatcattgggtcatggtatgtatgcggattgatatattccaataataagcagattgttcctttcgc

SEQ ID NO: 4844 - protein, 373 aa, Zea mays subsp. mays
  peptide (1)..(373): Ceres Seq. ID no. 12376469
  misc_feature (195)..(243): Pfam Name: Helix-loop-helix DNA-binding domain Pfam Description: Helix-loop-helix DNA-binding domain
  misc_feature (1)..(371): Homolog of NCBI NO: 22758263 NR Description: Putative bHLH transcription protein [Oryza sativa
  misc_feature (1)..(341): Homolog of NCBI NO: 37536566 NR Description: hypothetical protein [Oryza sativa (japonica group)] >gi|10140754|gb|AAG13585.1| hypothetical protein [Oryza >gi|31433343|gb|AAP54872.1| hypothetical protein [Oryza sativa
  misc_feature (146)..(373): Homolog of NCBI NO: 21537346 NR Description: unknown [Arabidopsis thaliana]
  misc_feature (168)..(373): Homolog of NCBI NO: 18424973 NR Description: bHLH protein; protein id: At5g65640.1, supported
  misc_feature (193)..(373): Homolog of NCBI NO: 15238199 NR Description: bHLH protein; protein id: At5g10570.1, supported cDNA: gi_20127061 [Arabidopsis thaliana] >gi|11357367|pir||T49982
  misc_feature (193)..(373): Homolog of NCBI NO: 20127062 NR Description: putative bHLH transcription factor [Arabidopsis
  misc_feature (193)..(370): Homolog of NCBI NO: 25513489 NR Description: F13K23.12 protein - Arabidopsis thaliana
  misc_feature (166)..(370): Homolog of NCBI NO: 22331357 NR Description: bHLH protein; protein id: At3g26744.1, supported cDNA: gi_19310474, supported by cDNA: gi_19310474 [Arabidopsis >gi|19310475|gb|AAL84972.1| AT3g26744/MLJ15_15 [Arabidopsis
  misc_feature (193)..(370): Homolog of NCBI NO: 15222101 NR Description: bHLH protein; protein id: At1g12860.1
  misc_feature (164)..(269): Homolog of NCBI NO: 34907076 NR Description: OSJNBa0093F16.27 [Oryza sativa (japonica
  misc_feature (20)..(20): Xaa is any aa, unknown or other
MELDEETFLDELMSLRREAXAAASGQWQAAAAYTGGGGDEGMMMGDLLFYGGATEAAATATSGGGMDQLSPFHQHAPLQVQVQAPAAAPHPHSHEEFNFDCLSEVCNPYRGAGVAVITGAEAAAVPGRALAALHDAMVEDETSGHLPQGQQHGAGGSPTFVFGGAAGESSEQMPVVVRGAGGGPHHRSKVHGGAPSKNLMAERRRRKRLNDRLSMLRSIVPKISKMDRTSILGDTIDYVKELTERIKVLEEEIGASAEDLDLLNTLKASSSSGSNEMMVRNSTKFDVERRGNGSTRIEICCATNPEVLLSTVSALEVLGLEIEQCVVSCFSDFGMQASCSQEEEDGNNKRQVLSTDEIKQALFRSAGYGGRCL

SEQ ID NO: 4845 - protein, 361 aa, Zea mays subsp. mays
  peptide (1)..(361): Ceres Seq. ID no. 12376470
  misc_feature (183)..(231): Pfam Name: Helix-loop-helix DNA-binding domain Pfam Description: Helix-loop-helix DNA-binding domain
  misc_feature (1)..(359): Homolog of NCBI NO: 22758263 NR Description: Putative bHLH transcription protein [Oryza sativa
  misc_feature (1)..(329): Homolog of NCBI NO: 37536566 NR Description: hypothetical protein [Oryza sativa (japonica group)] >gi|10140754|gb|AAG13585.1| hypothetical protein [Oryza >gi|31433343|gb|AAP54872.1| hypothetical protein [Oryza sativa
  misc_feature (134)..(361): Homolog of NCBI NO: 21537346 NR Description: unknown [Arabidopsis thaliana]
  misc_feature (156)..(361): Homolog of NCBI NO: 18424973 NR Description: bHLH protein; protein id: At5g65640.1, supported
  misc_feature (181)..(361): Homolog of NCBI NO: 15238199 NR Description: bHLH protein; protein id: At5g10570.1, supported cDNA: gi_20127061 [Arabidopsis thaliana] >gi|11357367|pir||T49982
  misc_feature (181)..(361): Homolog of NCBI NO: 20127062 NR Description: putative bHLH transcription factor [Arabidopsis
  misc_feature (181)..(358): Homolog of NCBI NO: 25513489 NR Description: F13K23.12 protein - Arabidopsis thaliana
  misc_feature (154)..(358): Homolog of NCBI NO: 22331357 NR Description: bHLH protein; protein id: At3g26744.1, supported cDNA: gi_19310474, supported by cDNA: gi_19310474 [Arabidopsis >gi|19310475|gb|AAL84972.1| AT3g26744/MLJ15_15 [Arabidopsis
  misc_feature (181)..(358): Homolog of NCBI NO: 15222101 NR Description: bHLH protein; protein id: At1g12860.1
  misc_feature (152)..(257): Homolog of NCBI NO: 34907076 NR Description: OSJNBa0093F16.27 [Oryza sativa (japonica
  misc_feature (8)..(8): Xaa is any aa, unknown or other
MSLRREAXAAASGQWQAAAAYTGGGGDEGMMMGDLLFYGGATEAAATATSGGGMDQLSPFHQHAPLQVQVQAPAAAPHPHSHEEFNFDCLSEVCNPYRGAGVAVITGAEAAAVPGRALAALHDAMVEDETSGHLPQGQQHGAGGSPTFVFGGAAGESSEQMPVVVRGAGGGPHHRSKVHGGAPSKNLMAERRRRKRLNDRLSMLRSIVPKISKMDRTSILGDTIDYVKELTERIKVLEEEIGASAEDLDLLNTLKASSSSGSNEMMVRNSTKFDVERRGNGSTRIEICCATNPEVLLSTVSALEVLGLEIEQCVVSCFSDFGMQASCSQEEEDGNNKRQVLSTDEIKQALFRSAGYGGRCL

SEQ ID NO: 4846 - protein, 332 aa, Zea mays subsp. mays
  peptide (1)..(332): Ceres Seq. ID no. 12376471
  misc_feature (154)..(202): Pfam Name: Helix-loop-helix DNA-binding domain Pfam Description: Helix-loop-helix DNA-binding domain
  misc_feature (1)..(330): Homolog of NCBI NO: 22758263 NR Description: Putative bHLH transcription protein [Oryza sativa
  misc_feature (1)..(300): Homolog of NCBI NO: 37536566 NR Description: hypothetical protein [Oryza sativa (japonica group)] >gi|10140754|gb|AAG13585.1| hypothetical protein [Oryza >gi|31433343|gb|AAP54872.1| hypothetical protein [Oryza sativa
  misc_feature (105)..(332): Homolog of NCBI NO: 21537346 NR Description: unknown [Arabidopsis thaliana]
  misc_feature (127)..(332): Homolog of NCBI NO: 18424973 NR Description: bHLH protein; protein id: At5g65640.1, supported
  misc_feature (152)..(332): Homolog of NCBI NO: 15238199 NR Description: bHLH protein; protein id: At5g10570.1, supported cDNA: gi_20127061 [Arabidopsis thaliana] >gi|11357367|pir||T49982
  misc_feature (152)..(332): Homolog of NCBI NO: 20127062 NR Description: putative bHLH transcription factor [Arabidopsis
  misc_feature (152)..(329): Homolog of NCBI NO: 25513489 NR Description: F13K23.12 protein - Arabidopsis thaliana
  misc_feature (125)..(329): Homolog of NCBI NO: 22331357 NR Description: bHLH protein; protein id: At3g26744.1, supported cDNA: gi_19310474, supported by cDNA: gi_19310474 [Arabidopsis >gi|19310475|gb|AAL84972.1| AT3g26744/MLJ15_15 [Arabidopsis
  misc_feature (152)..(329): Homolog of NCBI NO: 15222101 NR Description: bHLH protein; protein id: At1g12860.1
  misc_feature (123)..(228): Homolog of NCBI NO: 34907076 NR Description: OSJNBa0093F16.27 [Oryza sativa (japonica
MMMGDLLFYGGATEAAATATSGGGMDQLSPFHQHAPLQVQVQAPAAAPHPHSHEEFNFDCLSEVCNPYRGAGVAVITGAEAAAVPGRALAALHDAMVEDETSGHLPQGQQHGAGGSPTFVFGGAAGESSEQMPVVVRGAGGGPHHRSKVHGGAPSKNLMAERRRRKRLNDRLSMLRSIVPKISKMDRTSILGDTIDYVKELTERIKVLEEEIGASAEDLDLLNTLKASSSSGSNEMMVRNSTKFDVERRGNGSTRIEICCATNPEVLLSTVSALEVLGLEIEQCVVSCFSDFGMQASCSQEEEDGNNKRQVLSTDEIKQALFRSAGYGGRCL

SEQ ID NO: 4847 - DNA, 1433 bp, Zea mays subsp. mays
  misc_feature (1)..(1433): Ceres Seq. ID no. 13492071
  misc_feature: MA Experiment ID: 108522 Result: Down-regulated in Transcription
  misc_feature: MA Experiment 108522 PARAMETER Experiment Name: Zm_42deg_Heat_P Parameter: Age (day) Value: 8
  misc_feature: MA Experiment 108522 PARAMETER Experiment Name: Zm_42deg_Heat_P Parameter: Organism Value: Zea mays
  misc_feature: MA Experiment 108522 PARAMETER Experiment Name: Zm_42deg_Heat_P Parameter: Plant Line Value: 35A19
  misc_feature: MA Experiment 108522 PARAMETER Experiment Name: Zm_42deg_Heat_P Parameter: Temperature (deg C) Value: 42 vs. 22
  misc_feature: MA Experiment 108522 PARAMETER Experiment Name: Zm_42deg_Heat_P Parameter: Timepoint (hr) Value: 1
  misc_feature: MA Experiment 108522 PARAMETER Experiment Name: Zm_42deg_Heat_P Parameter: Tissue Value: Aerial
  misc_feature: MA Experiment ID: 108527 Result: Down-regulated in Transcription
  misc_feature: MA Experiment 108527 PARAMETER Experiment Name: Zm_5mM_NO_P Parameter: Age (day) Value: 8
  misc_feature: MA Experiment 108527 PARAMETER Experiment Name: Zm_5mM_NO_P Parameter: Organism Value: Zea mays
  misc_feature: MA Experiment 108527 PARAMETER Experiment Name: Zm_5mM_NO_P Parameter: Plant Line Value: 35A19
  misc_feature: MA Experiment 108527 PARAMETER Experiment Name: Zm_5mM_NO_P Parameter: Timepoint (hr) Value: 6
  misc_feature: MA Experiment 108527 PARAMETER Experiment Name: Zm_5mM_NO_P Parameter: Tissue Value: Aerial
  misc_feature: MA Experiment 108527 PARAMETER Experiment Name: Zm_5mM_NO_P Parameter: Treatment Value: 5mM NO vs. No Treatment
  misc_feature: MA Experiment ID: 108528 Result: Down-regulated in Transcription
  misc_feature: MA Experiment 108528 PARAMETER Experiment Name: Zm_Imbibed_Seeds_P Parameter: Age (day) Value: 5 vs. 2
  misc_feature: MA Experiment 108528 PARAMETER Experiment Name: Zm_Imbibed_Seeds_P Parameter: Organism Value: Zea mays
  misc_feature: MA Experiment 108528 PARAMETER Experiment Name: Zm_Imbibed_Seeds_P Parameter: Plant Line Value: 35A19
  misc_feature: MA Experiment 108528 PARAMETER Experiment Name: Zm_Imbibed_Seeds_P Parameter: Tissue Value: Aerial vs. Embryo
  misc_feature: MA Experiment ID: 108529 Result: Down-regulated in Transcription
  misc_feature: MA Experiment 108529 PARAMETER Experiment Name: Zm_Imbibed_Seeds_P Parameter: Age (day) Value: 5 vs. 2
  misc_feature: MA Experiment 108529 PARAMETER Experiment Name: Zm_Imbibed_Seeds_P Parameter: Organism Value: Zea mays
  misc_feature: MA Experiment 108529 PARAMETER Experiment Name: Zm_Imbibed_Seeds_P Parameter: Plant Line Value: 35A19
  misc_feature: MA Experiment 108529 PARAMETER Experiment Name: Zm_Imbibed_Seeds_P Parameter: Tissue Value: Roots vs. Embryo
  misc_feature: MA Experiment ID: 108530 Result: Down-regulated in Transcription
  misc_feature: MA Experiment 108530 PARAMETER Experiment Name: Zm_Imbibed_Seeds_P Parameter: Age (day) Value: 6 vs. 2
  misc_feature: MA Experiment 108530 PARAMETER Experiment Name: Zm_Imbibed_Seeds_P Parameter: Organism Value: Zea mays
  misc_feature: MA Experiment 108530 PARAMETER Experiment Name: Zm_Imbibed_Seeds_P Parameter: Plant Line Value: 35A19
  misc_feature: MA Experiment 108530 PARAMETER Experiment Name: Zm_Imbibed_Seeds_P Parameter: Tissue Value: Aerial vs. Embryo
  misc_feature: MA Experiment ID: 108543 Result: Up-regulated in Transcription
  misc_feature: MA Experiment ID: 108546 Result: Down-regulated in Transcription
  misc_feature: MA Experiment 108546 PARAMETER Experiment Name: Zm_Imbibed_Seeds_P Parameter: Age (day) Value: 3 vs. 2
  misc_feature: MA Experiment 108546 PARAMETER Experiment Name: Zm_Imbibed_Seeds_P Parameter: Organism Value: Zea mays
  misc_feature: MA Experiment 108546 PARAMETER Experiment Name: Zm_Imbibed_Seeds_P Parameter: Plant Line Value: 35A19
  misc_feature: MA Experiment 108546 PARAMETER Experiment Name: Zm_Imbibed_Seeds_P Parameter: Tissue Value: Roots vs. Embryo
  misc_feature: MA Experiment ID: 108689 Result: Down-regulated in Transcription
  misc_feature: MA Experiment 108689 PARAMETER Experiment Name: Zm_Drought_Roots_P Parameter: Age (day) Value: 9
  misc_feature: MA Experiment 108689 PARAMETER Experiment Name: Zm_Drought_Roots_P Parameter: Organism Value: Zea mays
  misc_feature: MA Experiment 108689 PARAMETER Experiment Name: Zm_Drought_Roots_P Parameter: Plant Line Value: 35A19
  misc_feature: MA Experiment 108689 PARAMETER Experiment Name: Zm_Drought_Roots_P Parameter: Timepoint (hr) Value: 24
  misc_feature: MA Experiment 108689 PARAMETER Experiment Name: Zm_Drought_Roots_P Parameter: Tissue Value: Roots
  misc_feature: MA Experiment 108689 PARAMETER Experiment Name: Zm_Drought_Roots_P Parameter: Treatment Value: Drought vs. No Drought
  misc_feature: MA Experiment ID: 20000477 Result: Down-regulated in Transcription
  misc_feature: MA Experiment 20000477 PARAMETER Experiment Name: Zm_5mM_SA_P Parameter: Age (day) Value: 10
  misc_feature: MA Experiment 20000477 PARAMETER Experiment Name: Zm_5mM_SA_P Parameter: Organism Value: Zea mays
  misc_feature: MA Experiment 20000477 PARAMETER Experiment Name: Zm_5mM_SA_P Parameter: Plant Line Value: 35A19
  misc_feature: MA Experiment 20000477 PARAMETER Experiment Name: Zm_5mM_SA_P Parameter: Timepoint (hr) Value: 48
  misc_feature: MA Experiment 20000477 PARAMETER Experiment Name: Zm_5mM_SA_P Parameter: Tissue Value: Aerial
  misc_feature: MA Experiment 20000477 PARAMETER Experiment Name: Zm_5mM_SA_P Parameter: Treatment Value: 5mM SA vs. No Treatment
  misc_feature: MA Experiment ID: 20000535 Result: Up-regulated in Transcription
  misc_feature: MA Experiment 20000535 PARAMETER Experiment Name: Zm_Hybrid_Seed_Dev_P Parameter: DAP Value: 30 vs. 12
  misc_feature: MA Experiment 20000535 PARAMETER Experiment Name: Zm_Hybrid_Seed_Dev_P Parameter: Organism Value: Zea mays
  misc_feature: MA Experiment 20000535 PARAMETER Experiment Name: Zm_Hybrid_Seed_Dev_P Parameter: Plant Line Value: 35A19
  misc_feature: MA Experiment 20000535 PARAMETER Experiment Name: Zm_Hybrid_Seed_Dev_P Parameter: Tissue Value: Embryo vs. Unfert Floret
  misc_feature: MA Experiment ID: 20000626 Result: Down-regulated in Transcription
  misc_feature: MA Experiment 20000626 PARAMETER Experiment Name: Zm_Herbicide-Treatments_P Parameter: Timepoint (hr) Value: 12
  misc_feature: MA Experiment 20000626 PARAMETER Experiment Name: Zm_Herbicide-Treatments_P Parameter: Tissue Value: Aerial
  misc_feature: MA Experiment 20000626 PARAMETER Experiment Name: Zm_Herbicide-Treatments_P Parameter: Treatment Value: Roundup vs. No Treatment
aagaaaaaaaaacgttttctttccttcgtttatgtatgcagggcctgcggttctatttaaagcttgttatcgcaggtagtagaggcacatcccagttggaagggcagccaataaggtaaggggtgacgaaaatggctccaacgaccgccaccaaggacgacagtggctacggcgacgagcgccggcgcgagctgcaggcgttcgacgacacgaagctgggggtgaaaggtctggtggactccggcgtcaagtccatcccgtccatcttccaccacccgccggaagccctgagcgacataatttctccggcgcctctgccgtcgtcgccaccctccggcgccgccatcccggtggtggacctctcggtgacgcggcgcgaggacctagtcgagcaggtgaggcacgcggccgggacggtgggcttcttctggctggtgaaccacggcgtggcggaggagctgatgggcggcatgctccgcggggtgcgccagttcaacgagggccccgtggaggcgaagcaggcgctctactccagggacctggctcgcaacctgcgcttcgcctccaacttcgacctcttcaaggccgctgcggccgactggcgcgacacgctcttctgcgaggtggctccgaacccgccgccgcgggaggagctgccggagccactgaggaacgtgatgctggagtacggcgcggcggtgacgaagctggcgcggttcgtgttcgagctgctgtccgagtccctcggcatgcccagcgaccacctgtacgagatggagtgcatgcagaacctgaacgtggtgtgccagtactacccgccgtgcccggagccgcaccgcaccgtgggcgtcaagaggcacacggaccctggcttcttcaccatcctcctgcaggacggcatgggcggcctgcaggtgcgcctcggcaacaacgggcagagcggcggctgctgggtggacatcgctccccggcctggggcgctcatggtcaacatcggtgatcttctgcagctcgtgaccaatgaccggttcaggagcgtggagcaccgggtgccagccaacaagagcagcgacacggcgagggtctccgtggcgtccttcttcaacacggacgtgaggaggtccgagaggatgtacggccccattccagaccccagcaagcccccgctgtacaggagcgtcagggcccgagacttcatcgcaaagttcaacaccataggactcgatggccgcgcgctcgaccacttcaggctctagctacctggctacgtttcagattcgtcctttcatttgctttggtctctaattaataattccaaataataagcccgcggatggacctctgtctgtctgtctgtaatttagtttccaagtttagtttgttgtggtaattcctgtatcaattatgtcataaataaaagctagggaaccttg

SEQ ID NO: 4848 - protein, 374 aa, Zea mays subsp. mays
  peptide (1)..(374): Ceres Seq. ID no. 13492072
  misc_feature (223)..(325): Pfam Name: 2OG-Fe(II) oxygenase superfamily Pfam Description: 2OG-Fe(II) oxygenase superfamily
  misc_feature (223)..(325): Pfam Name: 2OG-Fe(II) oxygenase superfamily Pfam Description: 2OG-Fe(II) oxygenase superfamily
  misc_feature (1)..(374): Homolog of NCBI NO: 29123084 NR Description: 2-oxoglutarate-dependent oxygenase [Zea mays]
  misc_feature (14)..(374): Homolog of NCBI NO: 40253423 NR Description: putative 2-oxoglutarate-dependent oxygenase
  misc_feature (14)..(374): Homolog of NCBI NO: 40253419 NR Description: putative 2-oxoglutarate-dependent oxygenase
  misc_feature (16)..(374): Homolog of NCBI NO: 13878119 NR Description: putative oxidoreductase [Arabidopsis thaliana]
  misc_feature (16)..(374): Homolog of NCBI NO: 15221545 NR Description: 2-oxoglutarate-dependent dioxygenase, putative thaliana] >gi|23296334|gb|AAN13044.1| putative oxidoreductase
  misc_feature (14)..(374): Homolog of NCBI NO: 40253423 NR Description: putative 2-oxoglutarate-dependent oxygenase
  misc_feature (16)..(374): Homolog of NCBI NO: 13878119 NR Description: putative oxidoreductase [Arabidopsis thaliana]
  misc_feature (16)..(305): Homolog of NCBI NO: 25406927 NR Description: protein F12K11.6 [imported] - Arabidopsis >gi|6692693|gb|AAF24827.1|AC007592_20 F12K11.6 [Arabidopsis
  misc_feature (291)..(374): Homolog of NCBI NO: 25406927 NR Description: protein F12K11.6 [imported] - Arabidopsis >gi|6692693|gb|AAF24827.1|AC007592_20 F12K11.6 [Arabidopsis
  misc_feature (16)..(300): Homolog of NCBI NO: 25406927 NR Description: protein F12K11.6 [imported] - Arabidopsis >gi|6692693|gb|AAF24827.1|AC007592_20 F12K11.6 [Arabidopsis
  misc_feature (14)..(374): Homolog of NCBI NO: 40253431 NR Description: putative 2-oxoglutarate-dependent oxygenase
  misc_feature (16)..(374): Homolog of NCBI NO: 15221544 NR Description: 2-oxoglutarate-dependent dioxygenase, putative thaliana] >gi|13430546|gb|AAK25895.1|AF360185_1 putative [Arabidopsis thaliana] >gi|14532752|gb|AAK64077.1| putative
  misc_feature (16)..(374): Homolog of NCBI NO: 15221545 NR Description: 2-oxoglutarate-dependent dioxygenase, putative thaliana] >gi|23296334|gb|AAN13044.1| putative oxidoreductase
  misc_feature (14)..(374): Homolog of NCBI NO: 40253419 NR Description: putative 2-oxoglutarate-dependent oxygenase
  misc_feature (1)..(374): Homolog of NCBI NO: 29123084 NR Description: 2-oxoglutarate-dependent oxygenase [Zea mays]
  misc_feature (16)..(374): Homolog of NCBI NO: 15221544 NR Description: 2-oxoglutarate-dependent dioxygenase, putative thaliana] >gi|13430546|gb|AAK25895.1|AF360185_1 putative [Arabidopsis thaliana] >gi|14532752|gb|AAK64077.1| putative
  misc_feature (14)..(374): Homolog of NCBI NO: 40253431 NR Description: putative 2-oxoglutarate-dependent oxygenase
  misc_feature (16)..(300): Homolog of NCBI NO: 25406927 NR Description: protein F12K11.6 [imported] - Arabidopsis >gi|6692693|gb|AAF24827.1|AC007592_20 F12K11.6 [Arabidopsis
  misc_feature (291)..(374): Homolog of NCBI NO: 25406927 NR Description: protein F12K11.6 [imported] - Arabidopsis >gi|6692693|gb|AAF24827.1|AC007592_20 F12K11.6 [Arabidopsis
  misc_feature (16)..(305): Homolog of NCBI NO: 25406927 NR Description: protein F12K11.6 [imported] - Arabidopsis >gi|6692693|gb|AAF24827.1|AC007592_20 F12K11.6 [Arabidopsis
MAPTTATKDDSGYGDERRRELQAFDDTKLGVKGLVDSGVKSIPSIFHHPPEALSDIISPAPLPSSPPSGAAIPVVDLSVTRREDLVEQVRHAAGTVGFFWLVNHGVAEELMGGMLRGVRQFNEGPVEAKQALYSRDLARNLRFASNFDLFKAAAADWRDTLFCEVAPNPPPREELPEPLRNVMLEYGAAVTKLARFVFELLSESLGMPSDHLYEMECMQNLNVVCQYYPPCPEPHRTVGVKRHTDPGFFTILLQDGMGGLQVRLGNNGQSGGCWVDIAPRPGALMVNIGDLLQLVTNDRFRSVEHRVPANKSSDTARVSVASFFNTDVRRSERMYGPIPDPSKPPLYRSVRARDFIAKFNTIGLDGRALDHFRL

SEQ ID NO: 4849 - protein, 264 aa, Zea mays subsp. mays
  peptide (1)..(264): Ceres Seq. ID no. 13492073
  misc_feature (113)..(215): Pfam Name: 2OG-Fe(II) oxygenase superfamily Pfam Description: 2OG-Fe(II) oxygenase superfamily
  misc_feature (113)..(215): Pfam Name: 2OG-Fe(II) oxygenase superfamily Pfam Description: 2OG-Fe(II) oxygenase superfamily
  misc_feature (1)..(264): Homolog of NCBI NO: 29123084 NR Description: 2-oxoglutarate-dependent oxygenase [Zea mays]
  misc_feature (1)..(264): Homolog of NCBI NO: 40253423 NR Description: putative 2-oxoglutarate-dependent oxygenase
  misc_feature (1)..(264): Homolog of NCBI NO: 40253419 NR Description: putative 2-oxoglutarate-dependent oxygenase
  misc_feature (1)..(264): Homolog of NCBI NO: 13878119 NR Description: putative oxidoreductase [Arabidopsis thaliana]
  misc_feature (1)..(264): Homolog of NCBI NO: 15221545 NR Description: 2-oxoglutarate-dependent dioxygenase, putative thaliana] >gi|23296334|gb|AAN13044.1| putative oxidoreductase
  misc_feature (1)..(264): Homolog of NCBI NO: 40253423 NR Description: putative 2-oxoglutarate-dependent oxygenase
  misc_feature (1)..(264): Homolog of NCBI NO: 13878119 NR Description: putative oxidoreductase [Arabidopsis thaliana]
  misc_feature (1)..(195): Homolog of NCBI NO: 25406927 NR Description: protein F12K11.6 [imported] - Arabidopsis >gi|6692693|gb|AAF24827.1|AC007592_20 F12K11.6 [Arabidopsis
  misc_feature (181)..(264): Homolog of NCBI NO: 25406927 NR Description: protein F12K11.6 [imported] - Arabidopsis >gi|6692693|gb|AAF24827.1|AC007592_20 F12K11.6 [Arabidopsis
  misc_feature (1)..(190): Homolog of NCBI NO: 25406927 NR Description: protein F12K11.6 [imported] - Arabidopsis >gi|6692693|gb|AAF24827.1|AC007592_20 F12K11.6 [Arabidopsis
  misc_feature (1)..(264): Homolog of NCBI NO: 40253431 NR Description: putative 2-oxoglutarate-dependent oxygenase
  misc_feature (1)..(264): Homolog of NCBI NO: 15221544 NR Description: 2-oxoglutarate-dependent dioxygenase, putative thaliana] >gi|13430546|gb|AAK25895.1|AF360185_1 putative [Arabidopsis thaliana] >gi|14532752|gb|AAK64077.1| putative
  misc_feature (1)..(264): Homolog of NCBI NO: 15221545 NR Description: 2-oxoglutarate-dependent dioxygenase, putative thaliana] >gi|23296334|gb|AAN13044.1| putative oxidoreductase
  misc_feature (1)..(264): Homolog of NCBI NO: 40253419 NR Description: putative 2-oxoglutarate-dependent oxygenase
  misc_feature (1)..(264): Homolog of NCBI NO: 29123084 NR Description: 2-oxoglutarate-dependent oxygenase [Zea mays]
  misc_feature (1)..(264): Homolog of NCBI NO: 15221544 NR Description: 2-oxoglutarate-dependent dioxygenase, putative thaliana] >gi|13430546|gb|AAK25895.1|AF360185_1 putative [Arabidopsis thaliana] >gi|14532752|gb|AAK64077.1| putative
  misc_feature (1)..(264): Homolog of NCBI NO: 40253431 NR Description: putative 2-oxoglutarate-dependent oxygenase
  misc_feature (1)..(190): Homolog of NCBI NO: 25406927 NR Description: protein F12K11.6 [imported] - Arabidopsis >gi|6692693|gb|AAF24827.1|AC007592_20 F12K11.6 [Arabidopsis
  misc_feature (181)..(264): Homolog of NCBI NO: 25406927 NR Description: protein F12K11.6 [imported] - Arabidopsis >gi|6692693|gb|AAF24827.1|AC007592_20 F12K11.6 [Arabidopsis
  misc_feature (1)..(195): Homolog of NCBI NO: 25406927 NR Description: protein F12K11.6 [imported] - Arabidopsis >gi|6692693|gb|AAF24827.1|AC007592_20 F12K11.6 [Arabidopsis
MGGMLRGVRQFNEGPVEAKQALYSRDLARNLRFASNFDLFKAAAADWRDTLFCEVAPNPPPREELPEPLRNVMLEYGAAVTKLARFVFELLSESLGMPSDHLYEMECMQNLNVVCQYYPPCPEPHRTVGVKRHTDPGFFTILLQDGMGGLQVRLGNNGQSGGCWVDIAPRPGALMVNIGDLLQLVTNDRFRSVEHRVPANKSSDTARVSVASFFNTDVRRSERMYGPIPDPSKPPLYRSVRARDFIAKFNTIGLDGRALDHFRL

SEQ ID NO: 4850 - protein, 261 aa, Zea mays subsp. mays
  peptide (1)..(261): Ceres Seq. ID no. 13492074
  misc_feature (110)..(212): Pfam Name: 2OG-Fe(II) oxygenase superfamily Pfam Description: 2OG-Fe(II) oxygenase superfamily
  misc_feature (110)..(212): Pfam Name: 2OG-Fe(II) oxygenase superfamily Pfam Description: 2OG-Fe(II) oxygenase superfamily
  misc_feature (1)..(261): Homolog of NCBI NO: 29123084 NR Description: 2-oxoglutarate-dependent oxygenase [Zea mays]
  misc_feature (1)..(261): Homolog of NCBI NO: 40253423 NR Description: putative 2-oxoglutarate-dependent oxygenase
  misc_feature (1)..(261): Homolog of NCBI NO: 40253419 NR Description: putative 2-oxoglutarate-dependent oxygenase
  misc_feature (1)..(261): Homolog of NCBI NO: 13878119 NR Description: putative oxidoreductase [Arabidopsis thaliana]
  misc_feature (1)..(261): Homolog of NCBI NO: 15221545 NR Description: 2-oxoglutarate-dependent dioxygenase, putative thaliana] >gi|23296334|gb|AAN13044.1| putative oxidoreductase
  misc_feature (1)..(261): Homolog of NCBI NO: 40253423 NR Description: putative 2-oxoglutarate-dependent oxygenase
  misc_feature (1)..(261): Homolog of NCBI NO: 13878119 NR Description: putative oxidoreductase [Arabidopsis thaliana]
  misc_feature (1)..(192): Homolog of NCBI NO: 25406927 NR Description: protein F12K11.6 [imported] - Arabidopsis >gi|6692693|gb|AAF24827.1|AC007592_20 F12K11.6 [Arabidopsis
  misc_feature (178)..(261): Homolog of NCBI NO: 25406927 NR Description: protein F12K11.6 [imported] - Arabidopsis >gi|6692693|gb|AAF24827.1|AC007592_20 F12K11.6 [Arabidopsis
  misc_feature (1)..(187): Homolog of NCBI NO: 25406927 NR Description: protein F12K11.6 [imported] - Arabidopsis >gi|6692693|gb|AAF24827.1|AC007592_20 F12K11.6 [Arabidopsis
  misc_feature (1)..(261): Homolog of NCBI NO: 40253431 NR Description: putative 2-oxoglutarate-dependent oxygenase
  misc_feature (1)..(261): Homolog of NCBI NO: 15221544 NR Description: 2-oxoglutarate-dependent dioxygenase, putative thaliana] >gi|13430546|gb|AAK25895.1|AF360185_1 putative [Arabidopsis thaliana] >gi|14532752|gb|AAK64077.1| putative
  misc_feature (1)..(261): Homolog of NCBI NO: 15221545 NR Description: 2-oxoglutarate-dependent dioxygenase, putative thaliana] >gi|23296334|gb|AAN13044.1| putative oxidoreductase
  misc_feature (1)..(261): Homolog of NCBI NO: 40253419 NR Description: putative 2-oxoglutarate-dependent oxygenase
  misc_feature (1)..(261): Homolog of NCBI NO: 29123084 NR Description: 2-oxoglutarate-dependent oxygenase [Zea mays]
  misc_feature (1)..(261): Homolog of NCBI NO: 15221544 NR Description: 2-oxoglutarate-dependent dioxygenase, putative thaliana] >gi|13430546|gb|AAK25895.1|AF360185_1 putative [Arabidopsis thaliana] >gi|14532752|gb|AAK64077.1| putative
  misc_feature (1)..(261): Homolog of NCBI NO: 40253431 NR Description: putative 2-oxoglutarate-dependent oxygenase
  misc_feature (1)..(187): Homolog of NCBI NO: 25406927 NR Description: protein F12K11.6 [imported] - Arabidopsis >gi|6692693|gb|AAF24827.1|AC007592_20 F12K11.6 [Arabidopsis
  misc_feature (178)..(261): Homolog of NCBI NO: 25406927 NR Description: protein F12K11.6 [imported] - Arabidopsis >gi|6692693|gb|AAF24827.1|AC007592_20 F12K11.6 [Arabidopsis
  misc_feature (1)..(192): Homolog of NCBI NO: 25406927 NR Description: protein F12K11.6 [imported] - Arabidopsis >gi|6692693|gb|AAF24827.1|AC007592_20 F12K11.6 [Arabidopsis
MLRGVRQFNEGPVEAKQALYSRDLARNLRFASNFDLFKAAAADWRDTLFCEVAPNPPPREELPEPLRNVMLEYGAAVTKLARFVFELLSESLGMPSDHLYEMECMQNLNVVCQYYPPCPEPHRTVGVKRHTDPGFFTILLQDGMGGLQVRLGNNGQSGGCWVDIAPRPGALMVNIGDLLQLVTNDRFRSVEHRVPANKSSDTARVSVASFFNTDVRRSERMYGPIPDPSKPPLYRSVRARDFIAKFNTIGLDGRALDHFRL

SEQ ID NO: 4851 - DNA, 1309 bp, Zea mays subsp. mays
  misc_feature (1)..(1309): Ceres Seq. ID no. 12352316
  misc_feature: MA Experiment ID: 108527 Result: Down-regulated in Transcription
  misc_feature: MA Experiment 108527 PARAMETER Experiment Name: Zm_5mM_NO_P Parameter: Age (day) Value: 8
  misc_feature: MA Experiment 108527 PARAMETER Experiment Name: Zm_5mM_NO_P Parameter: Organism Value: Zea mays
  misc_feature: MA Experiment 108527 PARAMETER Experiment Name: Zm_5mM_NO_P Parameter: Plant Line Value: 35A19
  misc_feature: MA Experiment 108527 PARAMETER Experiment Name: Zm_5mM_NO_P Parameter: Timepoint (hr) Value: 6
  misc_feature: MA Experiment 108527 PARAMETER Experiment Name: Zm_5mM_NO_P Parameter: Tissue Value: Aerial
  misc_feature: MA Experiment 108527 PARAMETER Experiment Name: Zm_5mM_NO_P Parameter: Treatment Value: 5mM NO vs. No Treatment
  misc_feature: MA Experiment ID: 108528 Result: Up-regulated in Transcription
  misc_feature: MA Experiment 108528 PARAMETER Experiment Name: Zm_Imbibed_Seeds_P Parameter: Age (day) Value: 5 vs. 2
  misc_feature: MA Experiment 108528 PARAMETER Experiment Name: Zm_Imbibed_Seeds_P Parameter: Organism Value: Zea mays
  misc_feature: MA Experiment 108528 PARAMETER Experiment Name: Zm_Imbibed_Seeds_P Parameter: Plant Line Value: 35A19
  misc_feature: MA Experiment 108528 PARAMETER Experiment Name: Zm_Imbibed_Seeds_P Parameter: Tissue Value: Aerial vs. Embryo
  misc_feature: MA Experiment ID: 108530 Result: Up-regulated in Transcription
  misc_feature: MA Experiment 108530 PARAMETER Experiment Name: Zm_Imbibed_Seeds_P Parameter: Age (day) Value: 6 vs. 2
  misc_feature: MA Experiment 108530 PARAMETER Experiment Name: Zm_Imbibed_Seeds_P Parameter: Organism Value: Zea mays
  misc_feature: MA Experiment 108530 PARAMETER Experiment Name: Zm_Imbibed_Seeds_P Parameter: Plant Line Value: 35A19
  misc_feature: MA Experiment 108530 PARAMETER Experiment Name: Zm_Imbibed_Seeds_P Parameter: Tissue Value: Aerial vs. Embryo
  misc_feature: MA Experiment ID: 108545 Result: Up-regulated in Transcription
  misc_feature: MA Experiment 108545 PARAMETER Experiment Name: Zm_Imbibed_Seeds_P Parameter: Age (day) Value: 3 vs. 2
  misc_feature: MA Experiment 108545 PARAMETER Experiment Name: Zm_Imbibed_Seeds_P Parameter: Organism Value: Zea mays
  misc_feature: MA Experiment 108545 PARAMETER Experiment Name: Zm_Imbibed_Seeds_P Parameter: Plant Line Value: 35A19
  misc_feature: MA Experiment 108545 PARAMETER Experiment Name: Zm_Imbibed_Seeds_P Parameter: Tissue Value: Aerial vs. Embryo
  misc_feature: MA Experiment ID: 108547 Result: Up-regulated in Transcription
  misc_feature: MA Experiment 108547 PARAMETER Experiment Name: Zm_Imbibed_Seeds_P Parameter: Age (day) Value: 4 vs. 2
  misc_feature: MA Experiment 108547 PARAMETER Experiment Name: Zm_Imbibed_Seeds_P Parameter: Organism Value: Zea mays
  misc_feature: MA Experiment 108547 PARAMETER Experiment Name: Zm_Imbibed_Seeds_P Parameter: Plant Line Value: 35A19
  misc_feature: MA Experiment 108547 PARAMETER Experiment Name: Zm_Imbibed_Seeds_P Parameter: Tissue Value: Aerial vs. Embryo
  misc_feature: MA Experiment ID: 108559 Result: Down-regulated in Transcription
  misc_feature: MA Experiment 108559 PARAMETER Experiment Name: Zm_5mM_NO_P Parameter: Age (day) Value: 8
  misc_feature: MA Experiment 108559 PARAMETER Experiment Name: Zm_5mM_NO_P Parameter: Organism Value: Zea mays
  misc_feature: MA Experiment 108559 PARAMETER Experiment Name: Zm_5mM_NO_P Parameter: Plant Line Value: 35A19
  misc_feature: MA Experiment 108559 PARAMETER Experiment Name: Zm_5mM_NO_P Parameter: Timepoint (hr) Value: 12
  misc_feature: MA Experiment 108559 PARAMETER Experiment Name: Zm_5mM_NO_P Parameter: Tissue Value: Aerial
  misc_feature: MA Experiment 108559 PARAMETER Experiment Name: Zm_5mM_NO_P Parameter: Treatment Value: 5mM NO vs. No Treatment
  misc_feature: MA Experiment ID: 108687 Result: Down-regulated in Transcription
  misc_feature: MA Experiment 108687 PARAMETER Experiment Name: Zm_Embryos-Flowers__P Parameter: Tissue Value: Embryo vs. Aerial+
  misc_feature: MA Experiment ID: 108688 Result: Down-regulated in Transcription
  misc_feature: MA Experiment 108688 PARAMETER Experiment Name: Zm_Embryos-Flowers__P Parameter: Tissue Value: Immature Flowers vs. Aerial+
  misc_feature: MA Experiment ID: 108689 Result: Up-regulated in Transcription
  misc_feature: MA Experiment 108689 PARAMETER Experiment Name: Zm_Drought_Roots_P Parameter: Age (day) Value: 9
  misc_feature: MA Experiment 108689 PARAMETER Experiment Name: Zm_Drought_Roots_P Parameter: Organism Value: Zea mays
  misc_feature: MA Experiment 108689 PARAMETER Experiment Name: Zm_Drought_Roots_P Parameter: Plant Line Value: 35A19
  misc_feature: MA Experiment 108689 PARAMETER Experiment Name: Zm_Drought_Roots_P Parameter: Timepoint (hr) Value: 24
  misc_feature: MA Experiment 108689 PARAMETER Experiment Name: Zm_Drought_Roots_P Parameter: Tissue Value: Roots
  misc_feature: MA Experiment 108689 PARAMETER Experiment Name: Zm_Drought_Roots_P Parameter: Treatment Value: Drought vs. No Drought
  misc_feature: MA Experiment ID: 20000477 Result: Down-regulated in Transcription
  misc_feature: MA Experiment 20000477 PARAMETER Experiment Name: Zm_5mM_SA_P Parameter: Age (day) Value: 10
  misc_feature: MA Experiment 20000477 PARAMETER Experiment Name: Zm_5mM_SA_P Parameter: Organism Value: Zea mays
  misc_feature: MA Experiment 20000477 PARAMETER Experiment Name: Zm_5mM_SA_P Parameter: Plant Line Value: 35A19
  misc_feature: MA Experiment 20000477 PARAMETER Experiment Name: Zm_5mM_SA_P Parameter: Timepoint (hr) Value: 48
  misc_feature: MA Experiment 20000477 PARAMETER Experiment Name: Zm_5mM_SA_P Parameter: Tissue Value: Aerial
  misc_feature: MA Experiment 20000477 PARAMETER Experiment Name: Zm_5mM_SA_P Parameter: Treatment Value: 5mM SA vs. No Treatment
  misc_feature: MA Experiment ID: 20000478 Result: Down-regulated in Transcription
  misc_feature: MA Experiment 20000478 PARAMETER Experiment Name: Zm_5mM_SA_P Parameter: Age (day) Value: 11
  misc_feature: MA Experiment 20000478 PARAMETER Experiment Name: Zm_5mM_SA_P Parameter: Organism Value: Zea mays
  misc_feature: MA Experiment 20000478 PARAMETER Experiment Name: Zm_5mM_SA_P Parameter: Plant Line Value: 35A19
  misc_feature: MA Experiment 20000478 PARAMETER Experiment Name: Zm_5mM_SA_P Parameter: Timepoint (hr) Value: 72
  misc_feature: MA Experiment 20000478 PARAMETER Experiment Name: Zm_5mM_SA_P Parameter: Tissue Value: Aerial
  misc_feature: MA Experiment 20000478 PARAMETER Experiment Name: Zm_5mM_SA_P Parameter: Treatment Value: 5mM SA vs. No Treatment
  misc_feature: MA Experiment ID: 20000626 Result: Down-regulated in Transcription
  misc_feature: MA Experiment 20000626 PARAMETER Experiment Name: Zm_Herbicide-Treatments_P Parameter: Timepoint (hr) Value: 12
  misc_feature: MA Experiment 20000626 PARAMETER Experiment Name: Zm_Herbicide-Treatments_P Parameter: Tissue Value: Aerial
  misc_feature: MA Experiment 20000626 PARAMETER Experiment Name: Zm_Herbicide-Treatments_P Parameter: Treatment Value: Roundup vs. No Treatment
cgaaaaatataataagcagagagggtatgcgctggtggtggtggcgactggcgacggccgcgatcgaccatggctacgacggcgccgctcgttctcctcttccccctcgtgctgctgctgcaggcgaggtggtcgtcgcagcagcagcagcagcaggctgtgacggcggtgatcgtgttcggcgactccatcgtggacccggggaacaacaatggtttgcacacgctgatcaaggccaaccatccgccctacggcatggacatgttgaaccacgaggccaccggacgctactccaacggcctcataccaacagacctcattgcccagcagctcggcgtcaagcagctgcttccgccctacctgggcgtggacctgagccccgatgaccttctcaccggcgtcagcttcgcgtccggcgccaccggattcgacccgctcacgcccgtcgtggtcagcgtcatctcgctggaccagcagctcgcctacttcgacgggtaccgggggaggctggtggacatcgccggcgaggccgagacggcgcggatcatcgacggcgcgctgttcctggtgtgcgccggcaccgacgacgtggccaacacctacttcaccacgccgttccgcagcgccgagtacgacatcccgggctacgtggacctgctggtgggccatgccgaggagttcctccgcgagctggtcgtcagctccaggggcgccaggaggatcggcttcgtggggatgccgccggtaggctgcgtgccgtcgcagcgcacgctcgggggcggcctcgccaccagggcctgcgagcccaagcgaaacgaggcggcgctgctgtacaacgccagggcccaggagatgatcgccgccttcaacaacaacaacgccgacgccgatgtgctggtcgtgttcctcgacatctaccgcatcctggacgacctcatggagcgcggggaggagtacggcttctccgagaccaccaggggatgctgcggcaccggcaccatcgaggtcacggggctatgtgactcccgcttcgtctccgtctgcgacgacgtctcgcagcacgtcttcttcgacagctaccacccaacagagagagcctacaggatcatcgtcaacgacatctttctaaactacgcacacgtgctcttctcatgactatatatcacgtactctctgtctctgtctctgtctctgtctctgtctctgtctctggtagctggcccaatcgacccaacagcatccaaatataattaaatgagctagcccatcctccaaataccgcagcccattgttacactactactttcct

SEQ ID NO: 4852 - protein, 361 aa, Zea mays subsp. mays
  peptide (1)..(361): Ceres Seq. ID no. 12352317
  misc_feature (34)..(349): Pfam Name: GDSL-like Lipase/Acylhydrolase Pfam Description: GDSL-like Lipase/Acylhydrolase
  misc_feature (8)..(354): Homolog of NCBI NO: 15222901 NR Description: family II extracellular lipase 3 (EXL3); protein At1g75900.1, supported by cDNA: gi_15054385 [Arabidopsis >gi|15054386|gb|AAK30018.1| family II lipase EXL3 [Arabidopsis
  misc_feature (8)..(354): Homolog of NCBI NO: 26449364 NR Description: putative family II lipase EXL3 [Arabidopsis
  misc_feature (8)..(345): Homolog of NCBI NO: 25404994 NR Description: protein T4O12.13 [imported] - Arabidopsis >gi|8778808|gb|AAF79815.1|AC007396_8 T4O12.13 [Arabidopsis
  misc_feature (10)..(360): Homolog of NCBI NO: 28393626 NR Description: putative family II extracellular lipase 1 (EXL1) thaliana] >gi|28827430|gb|AAO50559.1| putative family II
  misc_feature (22)..(361): Homolog of NCBI NO: 30102970 NR Description: putative lipase/acylhydrolase [Oryza sativa
  misc_feature (1)..(355): Homolog of NCBI NO: 37534726 NR Description: putative anter-specific proline-rich protein
  misc_feature (10)..(360): Homolog of NCBI NO: 18410954 NR Description: family II extracellular lipase 1 (EXL1); protein At1g75880.1, supported by cDNA: gi_15054381 [Arabidopsis >gi|15054382|gb|AAK30016.1| family II lipase EXL1 [Arabidopsis
  misc_feature (8)..(355): Homolog of NCBI NO: 18406327 NR Description: proline-rich protein, putative; protein id:
  misc_feature (33)..(347): Homolog of NCBI NO: 21592372 NR Description: anter-specific proline-rich protein APG
  misc_feature (33)..(347): Homolog of NCBI NO: 18394825 NR Description: anter-specific proline-rich protein APG putative; protein id: At1g20120.1, supported by cDNA: 22980.
MATTAPLVLLFPLVLLLQARWSSQQQQQQAVTAVIVFGDSIVDPGNNNGLHTLIKANHPPYGMDMLNHEATGRYSNGLIPTDLIAQQLGVKQLLPPYLGVDLSPDDLLTGVSFASGATGFDPLTPVVVSVISLDQQLAYFDGYRGRLVDIAGEAETARIIDGALFLVCAGTDDVANTYFTTPFRSAEYDIPGYVDLLVGHAEEFLRELVVSSRGARRIGFVGMPPVGCVPSQRTLGGGLATRACEPKRNEAALLYNARAQEMIAAFNNNNADADVLVVFLDIYRILDDLMERGEEYGFSETTRGCCGTGTIEVTGLCDSRFVSVCDDVSQHVFFDSYHPTERAYRIIVNDIFLNYAHVLFS

SEQ ID NO: 4853 - protein, 299 aa, Zea mays subsp. mays
  peptide (1)..(299): Ceres Seq. ID no. 12352318
  misc_feature (1)..(287): Pfam Name: GDSL-like Lipase/Acylhydrolase Pfam Description: GDSL-like Lipase/Acylhydrolase
  misc_feature (1)..(299): Homolog of NCBI NO: 30102970 NR Description: putative lipase/acylhydrolase [Oryza sativa
  misc_feature (1)..(293): Homolog of NCBI NO: 37534726 NR Description: putative anter-specific proline-rich protein
  misc_feature (1)..(292): Homolog of NCBI NO: 15222901 NR Description: family II extracellular lipase 3 (EXL3); protein At1g75900.1, supported by cDNA: gi_15054385 [Arabidopsis >gi|15054386|gb|AAK30018.1| family II lipase EXL3 [Arabidopsis
  misc_feature (1)..(292): Homolog of NCBI NO: 26449364 NR Description: putative family II lipase EXL3 [Arabidopsis
  misc_feature (1)..(283): Homolog of NCBI NO: 25404994 NR Description: protein T4O12.13 [imported] - Arabidopsis >gi|8778808|gb|AAF79815.1|AC007396_8 T4O12.13 [Arabidopsis
  misc_feature (1)..(298): Homolog of NCBI NO: 28393626 NR Description: putative family II extracellular lipase 1 (EXL1) thaliana] >gi|28827430|gb|AAO50559.1| putative family II
  misc_feature (1)..(298): Homolog of NCBI NO: 18410954 NR Description: family II extracellular lipase 1 (EXL1); protein At1g75880.1, supported by cDNA: gi_15054381 [Arabidopsis >gi|15054382|gb|AAK30016.1| family II lipase EXL1 [Arabidopsis
  misc_feature (1)..(293): Homolog of NCBI NO: 18406327 NR Description: proline-rich protein, putative; protein id:
  misc_feature (1)..(285): Homolog of NCBI NO: 21592372 NR Description: anter-specific proline-rich protein APG
  misc_feature (1)..(285): Homolog of NCBI NO: 18394825 NR Description: anter-specific proline-rich protein APG putative; protein id: At1g20120.1, supported by cDNA: 22980.
MDMLNHEATGRYSNGLIPTDLIAQQLGVKQLLPPYLGVDLSPDDLLTGVSFASGATGFDPLTPVVVSVISLDQQLAYFDGYRGRLVDIAGEAETARIIDGALFLVCAGTDDVANTYFTTPFRSAEYDIPGYVDLLVGHAEEFLRELVVSSRGARRIGFVGMPPVGCVPSQRTLGGGLATRACEPKRNEAALLYNARAQEMIAAFNNNNADADVLVVFLDIYRILDDLMERGEEYGFSETTRGCCGTGTIEVTGLCDSRFVSVCDDVSQHVFFDSYHPTERAYRIIVNDIFLNYAHVLFS

SEQ ID NO: 4854 - protein, 297 aa, Zea mays subsp. mays
  peptide (1)..(297): Ceres Seq. ID no. 12352319
  misc_feature (1)..(285): Pfam Name: GDSL-like Lipase/Acylhydrolase Pfam Description: GDSL-like Lipase/Acylhydrolase
  misc_feature (1)..(297): Homolog of NCBI NO: 30102970 NR Description: putative lipase/acylhydrolase [Oryza sativa
  misc_feature (1)..(291): Homolog of NCBI NO: 37534726 NR Description: putative anter-specific proline-rich protein
  misc_feature (1)..(290): Homolog of NCBI NO: 15222901 NR Description: family II extracellular lipase 3 (EXL3); protein At1g75900.1, supported by cDNA: gi_15054385 [Arabidopsis >gi|15054386|gb|AAK30018.1| family II lipase EXL3 [Arabidopsis
  misc_feature (1)..(290): Homolog of NCBI NO: 26449364 NR Description: putative family II lipase EXL3 [Arabidopsis
  misc_feature (1)..(281): Homolog of NCBI NO: 25404994 NR Description: protein T4O12.13 [imported] - Arabidopsis >gi|8778808|gb|AAF79815.1|AC007396_8 T4O12.13 [Arabidopsis
  misc_feature (1)..(296): Homolog of NCBI NO: 28393626 NR Description: putative family II extracellular lipase 1 (EXL1) thaliana] >gi|28827430|gb|AAO50559.1| putative family II
  misc_feature (1)..(296): Homolog of NCBI NO: 18410954 NR Description: family II extracellular lipase 1 (EXL1); protein At1g75880.1, supported by cDNA: gi_15054381 [Arabidopsis >gi|15054382|gb|AAK30016.1| family II lipase EXL1 [Arabidopsis
  misc_feature (1)..(291): Homolog of NCBI NO: 18406327 NR Description: proline-rich protein, putative; protein id:
  misc_feature (1)..(283): Homolog of NCBI NO: 21592372 NR Description: anter-specific proline-rich protein APG
  misc_feature (1)..(283): Homolog of NCBI NO: 18394825 NR Description: anter-specific proline-rich protein APG putative; protein id: At1g20120.1, supported by cDNA: 22980.
MLNHEATGRYSNGLIPTDLIAQQLGVKQLLPPYLGVDLSPDDLLTGVSFASGATGFDPLTPVVVSVISLDQQLAYFDGYRGRLVDIAGEAETARIIDGALFLVCAGTDDVANTYFTTPFRSAEYDIPGYVDLLVGHAEEFLRELVVSSRGARRIGFVGMPPVGCVPSQRTLGGGLATRACEPKRNEAALLYNARAQEMIAAFNNNNADADVLVVFLDIYRILDDLMERGEEYGFSETTRGCCGTGTIEVTGLCDSRFVSVCDDVSQHVFFDSYHPTERAYRIIVNDIFLNYAHVLFS

SEQ ID NO: 4855 - DNA, 1301 bp, Zea mays subsp. mays
  misc_feature (1)..(1301): Ceres Seq. ID no. 12435108
  misc_feature: MA Experiment ID: 108534 Result: Down-regulated in Transcription
  misc_feature: MA Experiment 108534 PARAMETER Experiment Name: Zm_4deg_Cold_P Parameter: Age (hr) Value: 8
  misc_feature: MA Experiment 108534 PARAMETER Experiment Name: Zm_4deg_Cold_P Parameter: Organism Value: Zea mays
  misc_feature: MA Experiment 108534 PARAMETER Experiment Name: Zm_4deg_Cold_P Parameter: Plant Line Value: 35A19
  misc_feature: MA Experiment 108534 PARAMETER Experiment Name: Zm_4deg_Cold_P Parameter: Temperature (deg C) Value: 4 vs. 22
  misc_feature: MA Experiment 108534 PARAMETER Experiment Name: Zm_4deg_Cold_P Parameter: Timepoint (hr) Value: 6
  misc_feature: MA Experiment 108534 PARAMETER Experiment Name: Zm_4deg_Cold_P Parameter: Tissue Value: Aerial
gcacgagaccattacctagaacatcctaatcgaaaaactgcgcgtgtgcgccactacaccaaccgtttggtccgccgttcggggattccttccgcactactacatagtagcacccgtgtggccgtgtccgagctacccacgcccccaacgccaagaacgtcgacgggcgcgacggcatggcggcggcggacccggacaccgaggtgcaggcagagttcccacccctcgtccgccagtacaaaagcggccgcgtcgagcggttcttcaacctggccccgctcccggccggcaccgacccggccacgggcgtcgtgtccaaggacgtcgtcgtcgacccggccaccggcctctgggcgcgcctcttcctccccgccggcagccacgggaagaagctccccgtcgtcgtctactaccatggcggcgcctacgtgatcggctcggcggccgacccgatgacgcacggctacctcaacgcgctcgtcgccaaggccggcgtcctcgcggtcgcgctcgagtaccgcctcgcgccggagcacccgctcccggccgcctacgaggactcatgggagggactcaagtgggtggccacccacgcctccgcctccgccgccgcgggaggaggaccggccgccgagccgtggctaaccgagcacggcgacttctcccgcgtgttcctggccggggccagcgcgggggccaccatcgctcacttcgtagcagtccgtgccggtgagcagcacaagagcggcggcctcgggatgcggatcagggggctgctgatagtgcacccctacttcagcggcgcggcggacatcggcgacgaggggacgacggggaaggcgcgcaaggcgcgggccgacgcgttctggcggttcctgtgccctggcacccccgggctcgacgaccctctctccaacccgttctcggaggcctccggcgggagcgcggcgcgcgtcgccgccgagcgcgtgctcgtctgcgtcgccgagaaggacgacctcagggacaggggcgtctggtactacgagagcctcaaggccagcggctaccctggcgaggtggagctgctcgagtccatgggcgagggccacgtcttctactgcatgaacccgcgctgcgacagggcgcgggagatggaggagcgcgtcctcggcttcctgcgcaagtgagcgagcgacggagcgcgcgccttgctncgcgattgagatggaataatttcaccgtttccagatgtggaggcgtttgagcatgaggccatgagggtcttatttgtttgcttaagatcaattgattgaagtttc

SEQ ID NO: 4856 - protein, 330 aa, Zea mays subsp. mays
  peptide (1)..(330): Ceres Seq. ID no. 12435109
  misc_feature (70)..(118): Pfam Name: Carboxylesterase Pfam Description: Carboxylesterase
  misc_feature (7)..(329): Homolog of NCBI NO: 15228425 NR Description: putative protein; protein id: At3g48690.1, by cDNA: gi_18086340 [Arabidopsis thaliana]
  misc_feature (7)..(329): Homolog of NCBI NO: 18086341 NR Description: AT3g48690/T8P19_200 [Arabidopsis thaliana]
  misc_feature (7)..(330): Homolog of NCBI NO: 15227669 NR Description: putative esterase; protein id: At2g03550.1
  misc_feature (16)..(330): Homolog of NCBI NO: 28393060 NR Description: putative esterase [Arabidopsis thaliana]
  misc_feature (7)..(329): Homolog of NCBI NO: 15228426 NR Description: putative protein; protein id: At3g48700.1
  misc_feature (7)..(328): Homolog of NCBI NO: 15222795 NR Description: unknown protein; protein id: At1g49660.1
  misc_feature (8)..(328): Homolog of NCBI NO: 21537287 NR Description: putative esterase [Arabidopsis thaliana]
  misc_feature (8)..(328): Homolog of NCBI NO: 18402731 NR Description: expressed protein; protein id: At1g49650.1, by cDNA: 12638. [Arabidopsis thaliana]
  misc_feature (1)..(330): Homolog of NCBI NO: 34393904 NR Description: putative cell death associated protein [Oryza
  misc_feature (7)..(330): Homolog of NCBI NO: 15221975 NR Description: hypothetical protein; protein id: At1g19190.1
MAAADPDTEVQAEFPPLVRQYKSGRVERFFNLAPLPAGTDPATGVVSKDVVVDPATGLWARLFLPAGSHGKKLPVVVYYHGGAYVIGSAADPMTHGYLNALVAKAGVLAVALEYRLAPEHPLPAAYEDSWEGLKWVATHASASAAAGGGPAAEPWLTEHGDFSRVFLAGASAGATIAHFVAVRAGEQHKSGGLGMRIRGLLIVHPYFSGAADIGDEGTTGKARKARADAFWRFLCPGTPGLDDPLSNPFSEASGGSAARVAAERVLVCVAEKDDLRDRGVWYYESLKASGYPGEVELLESMGEGHVFYCMNPRCDRAREMEERVLGFLRK

SEQ ID NO: 4857 - protein, 238 aa, Zea mays subsp. mays
  peptide (1)..(238): Ceres Seq. ID no. 12435110
  misc_feature (1)..(237): Homolog of NCBI NO: 15228425 NR Description: putative protein; protein id: At3g48690.1, by cDNA: gi_18086340 [Arabidopsis thaliana]
  misc_feature (1)..(237): Homolog of NCBI NO: 18086341 NR Description: AT3g48690/T8P19_200 [Arabidopsis thaliana]
  misc_feature (1)..(238): Homolog of NCBI NO: 15227669 NR Description: putative esterase; protein id: At2g03550.1
  misc_feature (1)..(238): Homolog of NCBI NO: 28393060 NR Description: putative esterase [Arabidopsis thaliana]
  misc_feature (1)..(237): Homolog of NCBI NO: 15228426 NR Description: putative protein; protein id: At3g48700.1
  misc_feature (1)..(236): Homolog of NCBI NO: 15222795 NR Description: unknown protein; protein id: At1g49660.1
  misc_feature (1)..(236): Homolog of NCBI NO: 21537287 NR Description: putative esterase [Arabidopsis thaliana]
  misc_feature (1)..(236): Homolog of NCBI NO: 18402731 NR Description: expressed protein; protein id: At1g49650.1, by cDNA: 12638. [Arabidopsis thaliana]
  misc_feature (1)..(238): Homolog of NCBI NO: 34393904 NR Description: putative cell death associated protein [Oryza
  misc_feature (1)..(238): Homolog of NCBI NO: 15221975 NR Description: hypothetical protein; protein id: At1g19190.1
MTHGYLNALVAKAGVLAVALEYRLAPEHPLPAAYEDSWEGLKWVATHASASAAAGGGPAAEPWLTEHGDFSRVFLAGASAGATIAHFVAVRAGEQHKSGGLGMRIRGLLIVHPYFSGAADIGDEGTTGKARKARADAFWRFLCPGTPGLDDPLSNPFSEASGGSAARVAAERVLVCVAEKDDLRDRGVWYYESLKASGYPGEVELLESMGEGHVFYCMNPRCDRAREMEERVLGFLRK

SEQ ID NO: 4858 - DNA, 1229 bp, Zea mays subsp. mays
  misc_feature (1)..(1229): Ceres Seq. ID no. 12434883
  misc_feature: MA Experiment ID: 108522 Result: Up-regulated in Transcription
  misc_feature: MA Experiment 108522 PARAMETER Experiment Name: Zm_42deg_Heat_P Parameter: Age (day) Value: 8
  misc_feature: MA Experiment 108522 PARAMETER Experiment Name: Zm_42deg_Heat_P Parameter: Organism Value: Zea mays
  misc_feature: MA Experiment 108522 PARAMETER Experiment Name: Zm_42deg_Heat_P Parameter: Plant Line Value: 35A19
  misc_feature: MA Experiment 108522 PARAMETER Experiment Name: Zm_42deg_Heat_P Parameter: Temperature (deg C) Value: 42 vs. 22
  misc_feature: MA Experiment 108522 PARAMETER Experiment Name: Zm_42deg_Heat_P Parameter: Timepoint (hr) Value: 1
  misc_feature: MA Experiment 108522 PARAMETER Experiment Name: Zm_42deg_Heat_P Parameter: Tissue Value: Aerial
  misc_feature: MA Experiment ID: 108523 Result: Up-regulated in Transcription
  misc_feature: MA Experiment 108523 PARAMETER Experiment Name: Zm_42deg_Heat_P Parameter: Age (day) Value: 8
  misc_feature: MA Experiment 108523 PARAMETER Experiment Name: Zm_42deg_Heat_P Parameter: Organism Value: Zea mays
  misc_feature: MA Experiment 108523 PARAMETER Experiment Name: Zm_42deg_Heat_P Parameter: Plant Line Value: 35A19
  misc_feature: MA Experiment 108523 PARAMETER Experiment Name: Zm_42deg_Heat_P Parameter: Temperature (deg C) Value: 42 vs. 22
  misc_feature: MA Experiment 108523 PARAMETER Experiment Name: Zm_42deg_Heat_P Parameter: Timepoint (hr) Value: 6
  misc_feature: MA Experiment 108523 PARAMETER Experiment Name: Zm_42deg_Heat_P Parameter: Tissue Value: Aerial
  misc_feature: MA Experiment ID: 108559 Result: Up-regulated in Transcription
  misc_feature: MA Experiment 108559 PARAMETER Experiment Name: Zm_5mM_NO_P Parameter: Age (day) Value: 8
  misc_feature: MA Experiment 108559 PARAMETER Experiment Name: Zm_5mM_NO_P Parameter: Organism Value: Zea mays
  misc_feature: MA Experiment 108559 PARAMETER Experiment Name: Zm_5mM_NO_P Parameter: Plant Line Value: 35A19
  misc_feature: MA Experiment 108559 PARAMETER Experiment Name: Zm_5mM_NO_P Parameter: Timepoint (hr) Value: 12
  misc_feature: MA Experiment 108559 PARAMETER Experiment Name: Zm_5mM_NO_P Parameter: Tissue Value: Aerial
  misc_feature: MA Experiment 108559 PARAMETER Experiment Name: Zm_5mM_NO_P Parameter: Treatment Value: 5mM NO vs. No Treatment
atacccaaacccaccgaccgccgcctaggcttccacctctcccgctcaaactccggccactgaggtcgaacccgagcacgcgccgcagcggcacgatggtgaacgacgccgcggcgatggccgtcgtgagggcggcgcgcccagccctccgtggcgcccacgatggcgtcgccttcgccgcccacgccgccttcctcgccgatgggtactcgctctgcgccgtcggccctgccgcgctcgccgacccctcgaccttaggtgatgaggaggtggggattgatggttggaacatcatggaggattgttacgcctttttgtatagcaaggaggagaagggcaagaagaaaagggtactagtgaaatgtctggtgatcggtgaagtacttgcaattgatgtcttggatcttgaggcacaagataaggcgccttataatatccagattaatgtgaaagacttctttgttgaagagcagccaaagaattatggggatatgtacaagaattttacaagtctcattgatactgtgaactcaaatgtgttgtgcaaattgcatggagacggttctggtgctgaggctgctaagagcactgccgtcgctgctgccaagaactctgatgggagaagttcaccaatacagagctctggagatccaggtcctagaactgctgacccttccggcctaatttatcctccaatagcaccgattggttctgatgatctctaccctggacctggtgcaggcttctaccctcacagtggcattgggagcggtggcagcatgcatgttggtcctaatgatccgcgcttctttccttctaatcccttctctgccccatttggtgggcttgggagtgttccaccaggtggtcgctatgatccaattggcccacctgacgtcccagggtttgagccatctagctttgttaggcgtccaaggcggcctccaggcgggagcacccacccagacctcgagttcttccagcaaggcccagacttctgagagtcgcgcatcgcgcagaggccggccggagcctcgccctaccctcacgaaataacttcaaaatgctgagccctcgagctagatatcccgcttgttgtgattgcaactgctgtatcgagtatagtcctagtgcgctttggctgtaaagatggatgtgaacatcgtcctagtgtatttactcttaattccaaaccatcgtctgtcatagcctaatatactcttttgtgt

SEQ ID NO: 4859 - protein, 332 aa, Zea mays subsp. mays
  peptide (1)..(332): Ceres Seq. ID no. 12434884
  misc_feature (32)..(296): Homolog of NCBI NO: 34898580 NR Description: P0534A03.16 [Oryza sativa (japonica
  misc_feature (32)..(332): Homolog of NCBI NO: 15232382 NR Description: putative protein; protein id: At3g53970.1, by cDNA: gi_17381083 [Arabidopsis thaliana] Putative proteasome inhibitor >gi|11357821|pir||T45937
  misc_feature (227)..(330): Homolog of NCBI NO: 34898580 NR Description: P0534A03.16 [Oryza sativa (japonica
  misc_feature (268)..(332): Homolog of NCBI NO: 7489377 NR Description: hypothetical protein - barley (fragment)
  misc_feature (32)..(196): Homolog of NCBI NO: 15221211 NR Description: hypothetical protein; protein id: At1g48530.1
TQTHRPPPRLPPLPLKLRPLRSNPSTRRSGTMVNDAAAMAVVRAARPALRGAHDGVAFAAHAAFLADGYSLCAVGPAALADPSTLGDEEVGIDGWNIMEDCYAFLYSKEEKGKKKRVLVKCLVIGEVLAIDVLDLEAQDKAPYNIQINVKDFFVEEQPKNYGDMYKNFTSLIDTVNSNVLCKLHGDGSGAEAAKSTAVAAAKNSDGRSSPIQSSGDPGPRTADPSGLIYPPIAPIGSDDLYPGPGAGFYPHSGIGSGGSMHVGPNDPRFFPSNPFSAPFGGLGSVPPGGRYDPIGPPDVPGFEPSSFVRRPRRPPGGSTHPDLEFFQQGPDF

SEQ ID NO: 4860 - protein, 301 aa, Zea mays subsp. mays
  peptide (1)..(301): Ceres Seq. ID no. 12434885
  misc_feature (1)..(265): Homolog of NCBI NO: 34898580 NR Description: P0534A03.16 [Oryza sativa (japonica
  misc_feature (1)..(301): Homolog of NCBI NO: 15232382 NR Description: putative protein; protein id: At3g53970.1, by cDNA: gi_17381083 [Arabidopsis thaliana] Putative proteasome inhibitor >gi|11357821|pir||T45937
  misc_feature (196)..(299): Homolog of NCBI NO: 34898580 NR Description: P0534A03.16 [Oryza sativa (japonica
  misc_feature (237)..(301): Homolog of NCBI NO: 7489377 NR Description: hypothetical protein - barley (fragment)
  misc_feature (1)..(165): Homolog of NCBI NO: 15221211 NR Description: hypothetical protein; protein id: At1g48530.1
MVNDAAAMAVVRAARPALRGAHDGVAFAAHAAFLADGYSLCAVGPAALADPSTLGDEEVGIDGWNIMEDCYAFLYSKEEKGKKKRVLVKCLVIGEVLAIDVLDLEAQDKAPYNIQINVKDFFVEEQPKNYGDMYKNFTSLIDTVNSNVLCKLHGDGSGAEAAKSTAVAAAKNSDGRSSPIQSSGDPGPRTADPSGLIYPPIAPIGSDDLYPGPGAGFYPHSGIGSGGSMHVGPNDPRFFPSNPFSAPFGGLGSVPPGGRYDPIGPPDVPGFEPSSFVRRPRRPPGGSTHPDLEFFQQGPDF

SEQ ID NO: 4861 - protein, 294 aa, Zea mays subsp. mays
  peptide (1)..(294): Ceres Seq. ID no. 12434886
  misc_feature (1)..(258): Homolog of NCBI NO: 34898580 NR Description: P0534A03.16 [Oryza sativa (japonica
  misc_feature (1)..(294): Homolog of NCBI NO: 15232382 NR Description: putative protein; protein id: At3g53970.1, by cDNA: gi_17381083 [Arabidopsis thaliana] Putative proteasome inhibitor >gi|11357821|pir||T45937
  misc_feature (189)..(292): Homolog of NCBI NO: 34898580 NR Description: P0534A03.16 [Oryza sativa (japonica
  misc_feature (230)..(294): Homolog of NCBI NO: 7489377 NR Description: hypothetical protein - barley (fragment)
  misc_feature (1)..(158): Homolog of NCBI NO: 15221211 NR Description: hypothetical protein; protein id: At1g48530.1
MAVVRAARPALRGAHDGVAFAAHAAFLADGYSLCAVGPAALADPSTLGDEEVGIDGWNIMEDCYAFLYSKEEKGKKKRVLVKCLVIGEVLAIDVLDLEAQDKAPYNIQINVKDFFVEEQPKNYGDMYKNFTSLIDTVNSNVLCKLHGDGSGAEAAKSTAVAAAKNSDGRSSPIQSSGDPGPRTADPSGLIYPPIAPIGSDDLYPGPGAGFYPHSGIGSGGSMHVGPNDPRFFPSNPFSAPFGGLGSVPPGGRYDPIGPPDVPGFEPSSFVRRPRRPPGGSTHPDLEFFQQGPDF

SEQ ID NO: 4862 - DNA, 1535 bp, Zea mays subsp. mays
  misc_feature (1)..(1535): Ceres Seq. ID no. 12347934
  misc_feature: MA Experiment ID: 108529 Result: Up-regulated in Transcription
  misc_feature: MA Experiment 108529 PARAMETER Experiment Name: Zm_Imbibed_Seeds_P Parameter: Age (day) Value: 5 vs. 2
  misc_feature: MA Experiment 108529 PARAMETER Experiment Name: Zm_Imbibed_Seeds_P Parameter: Organism Value: Zea mays
  misc_feature: MA Experiment 108529 PARAMETER Experiment Name: Zm_Imbibed_Seeds_P Parameter: Plant Line Value: 35A19
  misc_feature: MA Experiment 108529 PARAMETER Experiment Name: Zm_Imbibed_Seeds_P Parameter: Tissue Value: Roots vs. Embryo
  misc_feature: MA Experiment ID: 108535 Result: Down-regulated in Transcription
  misc_feature: MA Experiment 108535 PARAMETER Experiment Name: Zm_Meristem_P Parameter: Age (day) Value: 8
  misc_feature: MA Experiment 108535 PARAMETER Experiment Name: Zm_Meristem_P Parameter: Organism Value: Zea mays
  misc_feature: MA Experiment 108535 PARAMETER Experiment Name: Zm_Meristem_P Parameter: Plant Line Value: 35A19
  misc_feature: MA Experiment 108535 PARAMETER Experiment Name: Zm_Meristem_P Parameter: Tissue Value: Root Meristem vs. Above Root Meristem
  misc_feature: MA Experiment ID: 20000535 Result: Down-regulated in Transcription
  misc_feature: MA Experiment 20000535 PARAMETER Experiment Name: Zm_Hybrid_Seed_Dev_P Parameter: DAP Value: 30 vs. 12
  misc_feature: MA Experiment 20000535 PARAMETER Experiment Name: Zm_Hybrid_Seed_Dev_P Parameter: Organism Value: Zea mays
  misc_feature: MA Experiment 20000535 PARAMETER Experiment Name: Zm_Hybrid_Seed_Dev_P Parameter: Plant Line Value: 35A19
  misc_feature: MA Experiment 20000535 PARAMETER Experiment Name: Zm_Hybrid_Seed_Dev_P Parameter: Tissue Value: Embryo vs. Unfert Floret
agctcctctgttccctgcccccgggctggcttcctccccttcctggtctgcttctcctcaccgttgacgaatcacgaggcctgcctgcctgcctgctttctctgtgctccgttcgaatggacgggcagaggagtcgatgagcggccgtgggctttgatttcccctggggtctgctcttcttggtcagcaaggagacctgaacacgaattgatctctgcgccgctgcaaccccggcccgtcgaagccatggggtccggggactggttcaagacgatcatcagcaagaaaaaatcgaagcggggaaagtcaaagcacgcaaagctctctggtcaagtaacaaatggaggcaaccagacaaatcagaagttagatggcccttcttccagtagtgaggaccacgaagacaatgcagcactagaggaatgggctgctactcgcattcagaatgcgtttcggaaatacaaggcaaggaagaccctgcgttgtctcaagggagtcaaaagattgcgcgttgtcggtcaggcgaatccggttaagaagcagactgctgccacgctgagttacatacagtcttggaacaagttgcagtcggagataagaaaccgacgtgctttcatggtcaccgaaggacgcaacaggaagaagaagcaggagaaccaaatgaaacttgaggcaaaactgcataatttgcagattgaatggaatggaggctcggatactatggatgaaattcttgctaggatacaacaacgggaagaagcagcagtaaagcgtgagcgagccatggcgtacgcgttcaaccatcagtggagagcaaggtctgccacaagtctaggaaacttcagctatgaagtcggtaagggtggctggggctggagctggatggaccgctggatcgcagcacgaccatgggagccgcgatccatggtccaccctgagaacccgaagaaagcacaggcaaagaaagagaacaccacaaacccatcagctctcaagctgcaaggctccattaccctaagcaacaatatcaatgaccggaaaaccctgaaaaagaagccattgccttcagcttctcctgctgatcagaagaagccatcaccgtcgccttcttccgatcagaagaaaccagtaccgaaggagcagagagcaaaggcagctggcactcctccaaaaccaaaggccaaagatatgaaggggagtcaagagaaaaagccacaaccacaacagaaagtgcctcctccggttagcgcatgaagcttgctgctgcgaaaatggttactgatcatgtaagatacatcttgtgaagttctctcatgttcaacactcatgcttgtatgttttcgttttttgttttatggtgttatgggacgaggggtgcccaatctagaatgtgcttggtttgagcgattgcgcacgcacaacatatctgatgagaattgtttttggttaggattaggatctctgttattcattgttgtggtgttgtaataagacttgccttgcctggctatatgcttgaatggaaggtcttgttg

SEQ ID NO: 4863 - protein, 417 aa, Zea mays subsp. mays
  peptide (1)..(417): Ceres Seq. ID no. 12347935
  misc_feature (83)..(326): Homolog of NCBI NO: 15232474 NR Description: hypothetical protein; protein id: At3g15050.1 thaliana] >gi|8777488|dbj|BAA97068.1| contains similarity to SF16
  misc_feature (83)..(319): Homolog of NCBI NO: 15226186 NR Description: putative SF16 protein {Helianthus annuus}; id: At2g33990.1 [Arabidopsis thaliana] >gi|25408319|pir||A84751
  misc_feature (88)..(400): Homolog of NCBI NO: 15225258 NR Description: putative SF16 protein {Helianthus annuus}; id: At2g26180.1 [Arabidopsis thaliana] >gi|25367166|pir||D84657
  misc_feature (135)..(409): Homolog of NCBI NO: 15233296 NR Description: unknown protein; protein id: At3g22190.1
  misc_feature (135)..(417): Homolog of NCBI NO: 11994738 NR Description: contains similarity to SF16
  misc_feature (85)..(400): Homolog of NCBI NO: 15232741 NR Description: putative SF16 protein; protein id: At3g09710.1 thaliana] >gi|6682249|gb|AAF23301.1|AC016661_26 putative SF16
  misc_feature (140)..(385): Homolog of NCBI NO: 15225299 NR Description: putative SF16 protein {Helianthus annuus}; id: At2g26410.1 [Arabidopsis thaliana] >gi|7487891|pir||T00974
  misc_feature (141)..(369): Homolog of NCBI NO: 15218562 NR Description: hypothetical protein; protein id: At1g72670.1
  misc_feature (138)..(412): Homolog of NCBI NO: 15231175 NR Description: unknown protein; protein id: At3g52290.1
  misc_feature (137)..(359): Homolog of NCBI NO: 34903518 NR Description: P0001B06.11 [Oryza sativa (japonica
SSSVPCPRAGFLPFLVCFSSPLTNHEACLPACFLCAPFEWTGRGVDERPWALISPGVCSSWSARRPEHELISAPLQPRPVEAMGSGDWFKTIISKKKSKRGKSKHAKLSGQVTNGGNQTNQKLDGPSSSSEDHEDNAALEEWAATRIQNAFRKYKARKTLRCLKGVKRLRVVGQANPVKKQTAATLSYIQSWNKLQSEIRNRRAFMVTEGRNRKKKQENQMKLEAKLHNLQIEWNGGSDTMDEILARIQQREEAAVKRERAMAYAFNHQWRARSATSLGNFSYEVGKGGWGWSWMDRWIAARPWEPRSMVHPENPKKAQAKKENTTNPSALKLQGSITLSNNINDRKTLKKKPLPSASPADQKKPSPSPSSDQKKPVPKEQRAKAAGTPPKPKAKDMKGSQEKKPQPQQKVPPPVSA

SEQ ID NO: 4864 - protein, 335 aa, Zea mays subsp. mays
  peptide (1)..(335): Ceres Seq. ID no. 12347936
  misc_feature (1)..(244): Homolog of NCBI NO: 15232474 NR Description: hypothetical protein; protein id: At3g15050.1 thaliana] >gi|8777488|dbj|BAA97068.1| contains similarity to SF16
  misc_feature (1)..(237): Homolog of NCBI NO: 15226186 NR Description: putative SF16 protein {Helianthus annuus}; id: At2g33990.1 [Arabidopsis thaliana] >gi|25408319|pir||A84751
  misc_feature (6)..(318): Homolog of NCBI NO: 15225258 NR Description: putative SF16 protein {Helianthus annuus}; id: At2g26180.1 [Arabidopsis thaliana] >gi|25367166|pir||D84657
  misc_feature (53)..(327): Homolog of NCBI NO: 15233296 NR Description: unknown protein; protein id: At3g22190.1
  misc_feature (53)..(335): Homolog of NCBI NO: 11994738 NR Description: contains similarity to SF16
  misc_feature (3)..(318): Homolog of NCBI NO: 15232741 NR Description: putative SF16 protein; protein id: At3g09710.1 thaliana] >gi|6682249|gb|AAF23301.1|AC016661_26 putative SF16
  misc_feature (58)..(303): Homolog of NCBI NO: 15225299 NR Description: putative SF16 protein {Helianthus annuus}; id: At2g26410.1 [Arabidopsis thaliana] >gi|7487891|pir||T00974
  misc_feature (59)..(287): Homolog of NCBI NO: 15218562 NR Description: hypothetical protein; protein id: At1g72670.1
  misc_feature (56)..(330): Homolog of NCBI NO: 15231175 NR Description: unknown protein; protein id: At3g52290.1
  misc_feature (55)..(277): Homolog of NCBI NO: 34903518 NR Description: P0001B06.11 [Oryza sativa (japonica
MGSGDWFKTIISKKKSKRGKSKHAKLSGQVTNGGNQTNQKLDGPSSSSEDHEDNAALEEWAATRIQNAFRKYKARKTLRCLKGVKRLRVVGQANPVKKQTAATLSYIQSWNKLQSEIRNRRAFMVTEGRNRKKKQENQMKLEAKLHNLQIEWNGGSDTMDEILARIQQREEAAVKRERAMAYAFNHQWRARSATSLGNFSYEVGKGGWGWSWMDRWIAARPWEPRSMVHPENPKKAQAKKENTTNPSALKLQGSITLSNNINDRKTLKKKPLPSASPADQKKPSPSPSSDQKKPVPKEQRAKAAGTPPKPKAKDMKGSQEKKPQPQQKVPPPVSA

SEQ ID NO: 4865 - protein, 212 aa, Zea mays subsp. mays
  peptide (1)..(212): Ceres Seq. ID no. 12347937
  misc_feature (1)..(121): Homolog of NCBI NO: 15232474 NR Description: hypothetical protein; protein id: At3g15050.1 thaliana] >gi|8777488|dbj|BAA97068.1| contains similarity to SF16
  misc_feature (1)..(114): Homolog of NCBI NO: 15226186 NR Description: putative SF16 protein {Helianthus annuus}; id: At2g33990.1 [Arabidopsis thaliana] >gi|25408319|pir||A84751
  misc_feature (1)..(195): Homolog of NCBI NO: 15225258 NR Description: putative SF16 protein {Helianthus annuus}; id: At2g26180.1 [Arabidopsis thaliana] >gi|25367166|pir||D84657
  misc_feature (1)..(204): Homolog of NCBI NO: 15233296 NR Description: unknown protein; protein id: At3g22190.1
  misc_feature (1)..(212): Homolog of NCBI NO: 11994738 NR Description: contains similarity to SF16
  misc_feature (1)..(195): Homolog of NCBI NO: 15232741 NR Description: putative SF16 protein; protein id: At3g09710.1 thaliana] >gi|6682249|gb|AAF23301.1|AC016661_26 putative SF16
  misc_feature (1)..(180): Homolog of NCBI NO: 15225299 NR Description: putative SF16 protein {Helianthus annuus}; id: At2g26410.1 [Arabidopsis thaliana] >gi|7487891|pir||T00974
  misc_feature (1)..(164): Homolog of NCBI NO: 15218562 NR Description: hypothetical protein; protein id: At1g72670.1
  misc_feature (1)..(207): Homolog of NCBI NO: 15231175 NR Description: unknown protein; protein id: At3g52290.1
  misc_feature (1)..(154): Homolog of NCBI NO: 34903518 NR Description: P0001B06.11 [Oryza sativa (japonica
MVTEGRNRKKKQENQMKLEAKLHNLQIEWNGGSDTMDEILARIQQREEAAVKRERAMAYAFNHQWRARSATSLGNFSYEVGKGGWGWSWMDRWIAARPWEPRSMVHPENPKKAQAKKENTTNPSALKLQGSITLSNNINDRKTLKKKPLPSASPADQKKPSPSPSSDQKKPVPKEQRAKAAGTPPKPKAKDMKGSQEKKPQPQQKVPPPVSA

SEQ ID NO: 4866 - DNA, 1445 bp, Zea mays subsp. mays
  misc_feature (1)..(1445): Ceres Seq. ID no. 12373700
  misc_feature: MA Experiment ID: 108504 Result: Up-regulated in Transcription
  misc_feature: MA Experiment 108504 PARAMETER Experiment Name: Zm_Drought_P Parameter: Age (day) Value: 8
  misc_feature: MA Experiment 108504 PARAMETER Experiment Name: Zm_Drought_P Parameter: Organism Value: Zea mays
  misc_feature: MA Experiment 108504 PARAMETER Experiment Name: Zm_Drought_P Parameter: Plant Line Value: 35A19
  misc_feature: MA Experiment 108504 PARAMETER Experiment Name: Zm_Drought_P Parameter: Timepoint (hr) Value: 12
  misc_feature: MA Experiment 108504 PARAMETER Experiment Name: Zm_Drought_P Parameter: Tissue Value: Aerial
  misc_feature: MA Experiment 108504 PARAMETER Experiment Name: Zm_Drought_P Parameter: Treatment Value: Drought vs. No Drought
  misc_feature: MA Experiment ID: 108527 Result: Down-regulated in Transcription
  misc_feature: MA Experiment 108527 PARAMETER Experiment Name: Zm_5mM_NO_P Parameter: Age (day) Value: 8
  misc_feature: MA Experiment 108527 PARAMETER Experiment Name: Zm_5mM_NO_P Parameter: Organism Value: Zea mays
  misc_feature: MA Experiment 108527 PARAMETER Experiment Name: Zm_5mM_NO_P Parameter: Plant Line Value: 35A19
  misc_feature: MA Experiment 108527 PARAMETER Experiment Name: Zm_5mM_NO_P Parameter: Timepoint (hr) Value: 6
  misc_feature: MA Experiment 108527 PARAMETER Experiment Name: Zm_5mM_NO_P Parameter: Tissue Value: Aerial
  misc_feature: MA Experiment 108527 PARAMETER Experiment Name: Zm_5mM_NO_P Parameter: Treatment Value: 5mM NO vs. No Treatment
  misc_feature: MA Experiment ID: 108528 Result: Up-regulated in Transcription
  misc_feature: MA Experiment 108528 PARAMETER Experiment Name: Zm_Imbibed_Seeds_P Parameter: Age (day) Value: 5 vs. 2
  misc_feature: MA Experiment 108528 PARAMETER Experiment Name: Zm_Imbibed_Seeds_P Parameter: Organism Value: Zea mays
  misc_feature: MA Experiment 108528 PARAMETER Experiment Name: Zm_Imbibed_Seeds_P Parameter: Plant Line Value: 35A19
  misc_feature: MA Experiment 108528 PARAMETER Experiment Name: Zm_Imbibed_Seeds_P Parameter: Tissue Value: Aerial vs. Embryo
  misc_feature: MA Experiment ID: 108529 Result: Up-regulated in Transcription
  misc_feature: MA Experiment 108529 PARAMETER Experiment Name: Zm_Imbibed_Seeds_P Parameter: Age (day) Value: 5 vs. 2
  misc_feature: MA Experiment 108529 PARAMETER Experiment Name: Zm_Imbibed_Seeds_P Parameter: Organism Value: Zea mays
  misc_feature: MA Experiment 108529 PARAMETER Experiment Name: Zm_Imbibed_Seeds_P Parameter: Plant Line Value: 35A19
  misc_feature: MA Experiment 108529 PARAMETER Experiment Name: Zm_Imbibed_Seeds_P Parameter: Tissue Value: Roots vs. Embryo
  misc_feature: MA Experiment ID: 108530 Result: Up-regulated in Transcription
  misc_feature: MA Experiment 108530 PARAMETER Experiment Name: Zm_Imbibed_Seeds_P Parameter: Age (day) Value: 6 vs. 2
  misc_feature: MA Experiment 108530 PARAMETER Experiment Name: Zm_Imbibed_Seeds_P Parameter: Organism Value: Zea mays
  misc_feature: MA Experiment 108530 PARAMETER Experiment Name: Zm_Imbibed_Seeds_P Parameter: Plant Line Value: 35A19
  misc_feature: MA Experiment 108530 PARAMETER Experiment Name: Zm_Imbibed_Seeds_P Parameter: Tissue Value: Aerial vs. Embryo
  misc_feature: MA Experiment ID: 108534 Result: Down-regulated in Transcription
  misc_feature: MA Experiment 108534 PARAMETER Experiment Name: Zm_4deg_Cold_P Parameter: Age (hr) Value: 8
  misc_feature: MA Experiment 108534 PARAMETER Experiment Name: Zm_4deg_Cold_P Parameter: Organism Value: Zea mays
  misc_feature: MA Experiment 108534 PARAMETER Experiment Name: Zm_4deg_Cold_P Parameter: Plant Line Value: 35A19
  misc_feature: MA Experiment 108534 PARAMETER Experiment Name: Zm_4deg_Cold_P Parameter: Temperature (deg C) Value: 4 vs. 22
  misc_feature: MA Experiment 108534 PARAMETER Experiment Name: Zm_4deg_Cold_P Parameter: Timepoint (hr) Value: 6
  misc_feature: MA Experiment 108534 PARAMETER Experiment Name: Zm_4deg_Cold_P Parameter: Tissue Value: Aerial
  misc_feature: MA Experiment ID: 108545 Result: Up-regulated in Transcription
  misc_feature: MA Experiment 108545 PARAMETER Experiment Name: Zm_Imbibed_Seeds_P Parameter: Age (day) Value: 3 vs. 2
  misc_feature: MA Experiment 108545 PARAMETER Experiment Name: Zm_Imbibed_Seeds_P Parameter: Organism Value: Zea mays
  misc_feature: MA Experiment 108545 PARAMETER Experiment Name: Zm_Imbibed_Seeds_P Parameter: Plant Line Value: 35A19
  misc_feature: MA Experiment 108545 PARAMETER Experiment Name: Zm_Imbibed_Seeds_P Parameter: Tissue Value: Aerial vs. Embryo
  misc_feature: MA Experiment ID: 108546 Result: Up-regulated in Transcription
  misc_feature: MA Experiment 108546 PARAMETER Experiment Name: Zm_Imbibed_Seeds_P Parameter: Age (day) Value: 3 vs. 2
  misc_feature: MA Experiment 108546 PARAMETER Experiment Name: Zm_Imbibed_Seeds_P Parameter: Organism Value: Zea mays
  misc_feature: MA Experiment 108546 PARAMETER Experiment Name: Zm_Imbibed_Seeds_P Parameter: Plant Line Value: 35A19
  misc_feature: MA Experiment 108546 PARAMETER Experiment Name: Zm_Imbibed_Seeds_P Parameter: Tissue Value: Roots vs. Embryo
  misc_feature: MA Experiment ID: 108547 Result: Up-regulated in Transcription
  misc_feature: MA Experiment 108547 PARAMETER Experiment Name: Zm_Imbibed_Seeds_P Parameter: Age (day) Value: 4 vs. 2
  misc_feature: MA Experiment 108547 PARAMETER Experiment Name: Zm_Imbibed_Seeds_P Parameter: Organism Value: Zea mays
  misc_feature: MA Experiment 108547 PARAMETER Experiment Name: Zm_Imbibed_Seeds_P Parameter: Plant Line Value: 35A19
  misc_feature: MA Experiment 108547 PARAMETER Experiment Name: Zm_Imbibed_Seeds_P Parameter: Tissue Value: Aerial vs. Embryo
  misc_feature: MA Experiment ID: 108687 Result: Down-regulated in Transcription
  misc_feature: MA Experiment 108687 PARAMETER Experiment Name: Zm_Embryos-Flowers__P Parameter: Tissue Value: Embryo vs. Aerial+
  misc_feature: MA Experiment ID: 108689 Result: Up-regulated in Transcription
  misc_feature: MA Experiment 108689 PARAMETER Experiment Name: Zm_Drought_Roots_P Parameter: Age (day) Value: 9
  misc_feature: MA Experiment 108689 PARAMETER Experiment Name: Zm_Drought_Roots_P Parameter: Organism Value: Zea mays
  misc_feature: MA Experiment 108689 PARAMETER Experiment Name: Zm_Drought_Roots_P Parameter: Plant Line Value: 35A19
  misc_feature: MA Experiment 108689 PARAMETER Experiment Name: Zm_Drought_Roots_P Parameter: Timepoint (hr) Value: 24
  misc_feature: MA Experiment 108689 PARAMETER Experiment Name: Zm_Drought_Roots_P Parameter: Tissue Value: Roots
  misc_feature: MA Experiment 108689 PARAMETER Experiment Name: Zm_Drought_Roots_P Parameter: Treatment Value: Drought vs. No Drought
  misc_feature: MA Experiment ID: 20000108 Result: Down-regulated in Transcription
  misc_feature: MA Experiment 20000108 PARAMETER Experiment Name: Zm_Root-Tips_P Parameter: Age (day) Value: 12
  misc_feature: MA Experiment 20000108 PARAMETER Experiment Name: Zm_Root-Tips_P Parameter: Organism Value: Zea mays
  misc_feature: MA Experiment 20000108 PARAMETER Experiment Name: Zm_Root-Tips_P Parameter: Tissue Value: Root tips vs. Root mid region    35
  misc_feature: MA Experiment 20000108 PARAMETER Experiment Name: Zm_Root-Tips_P Parameter: Tissue Value: Root tips vs. Root mid region   Sequence Listing-Misc Features (4)
  misc_feature: MA Experiment ID: 20000492 Result: Down-regulated in Transcription
  misc_feature: MA Experiment 20000492 PARAMETER Experiment Name: Zm_Hybrid_Seed_Dev_P Parameter: DAP Value: 12
  misc_feature: MA Experiment 20000492 PARAMETER Experiment Name: Zm_Hybrid_Seed_Dev_P Parameter: Organism Value: Zea mays
  misc_feature: MA Experiment 20000492 PARAMETER Experiment Name: Zm_Hybrid_Seed_Dev_P Parameter: Plant Line Value: 35A19
  misc_feature: MA Experiment 20000492 PARAMETER Experiment Name: Zm_Hybrid_Seed_Dev_P Parameter: Tissue Value: Fert Kernel vs. Unfert Floret
  misc_feature: MA Experiment ID: 20000534 Result: Down-regulated in Transcription
  misc_feature: MA Experiment 20000534 PARAMETER Experiment Name: Zm_Hybrid_Pollen_P Parameter: Age (day) Value: 8
  misc_feature: MA Experiment 20000534 PARAMETER Experiment Name: Zm_Hybrid_Pollen_P Parameter: Organism Value: Zea mays
  misc_feature: MA Experiment 20000534 PARAMETER Experiment Name: Zm_Hybrid_Pollen_P Parameter: Plant Line Value: 35A19
  misc_feature: MA Experiment 20000534 PARAMETER Experiment Name: Zm_Hybrid_Pollen_P Parameter: Tissue Value: Pollen vs. Aerial
  misc_feature: MA Experiment ID: 20000535 Result: Down-regulated in Transcription
  misc_feature: MA Experiment 20000535 PARAMETER Experiment Name: Zm_Hybrid_Seed_Dev_P Parameter: DAP Value: 30 vs. 12
  misc_feature: MA Experiment 20000535 PARAMETER Experiment Name: Zm_Hybrid_Seed_Dev_P Parameter: Organism Value: Zea mays
  misc_feature: MA Experiment 20000535 PARAMETER Experiment Name: Zm_Hybrid_Seed_Dev_P Parameter: Plant Line Value: 35A19
  misc_feature: MA Experiment 20000535 PARAMETER Experiment Name: Zm_Hybrid_Seed_Dev_P Parameter: Tissue Value: Embryo vs. Unfert Floret
aaggtatttctttttacttttgcgtttgcacaggccactccaccggttctcctattcttcctagcacaaaggggaggaagtaaagccttcccctcgccggagatgctgccgtcggcgaccgggtacactgccggcgacgtccactcggcacgcgagatgttccatcccttctacctctgacttcttgcgcacgcggcctctagtagatagtaattggacacttcatacttggattggatctctagatagcctagaaggtgagcggggcgtggaaggagaaatccgggaagcgatgagctttagcgccgcaagagtctcggagcatggcggcgagttcgaggaggcaagggggatgccggcagaggtgagctgggagatgctcgacaagtcgcggttttttgtactcgtcgccgcgctcttctctggcgtctccgcggcgctatatccggccgtcgtcctcaagacgcacctccaggttgctgcccccgcacaggccgcggcctcggcggcagcggcggcgattctccggcgcgacggtccccgagggttctaccgtggcttcggtgcgtccctcgcgggcacggtgcccgcgcgcgctctctatatggcggcgctcgaggccaccaagagcgtcgtgggctccgccgccctccgcctcggcgtcgcggaaccggccgcctcggctgccgcctcggccgcgggcggcgtctccgctgccgtagccgcgcaggtcgtctggaccccggtggacgtcgtcagccagcgtctcatgcttcagacggcgcccctcgctgccgcccgctaccgcggcggtaccgacgcgttccggaagatcctactcgcggacggcgtgcgcggcctgtaccgcggcttcggcatctcggtgctgacctacgcgccctccagtgccgcgtggtgggcctcctacgtgaccgcgcagcggctcctctggcgcgccgtcggccccgcggcgcacgacagccgcggcgccgcgatagccctgcagggtgcgagcgcggccgcggcgggaagcgcggcggcgctggtgacgatgccgctggacaccgtgaagacgcggctgcaggttatggacgctggggcgcaggcgccgacgctcgcggccgcggcgcgcgcgctagttcgggagggaggttggtctgcttgctaccgcgggttcgggccgcggtgggcgtccatgtcgctgtcttcggccaccatggtcaccgtctacgagttcttgaagcggctctcggccaaggaaggctccctctaagctctggatcaaagtgtatccatggatgatccttgtaagcatccatgtccaaatgcgaatatcctgcactgatctcttgatgggatgttaggaagcaagatttctgctgggtttgtctgttgatgacgatgatgatgaattttgtaaaataaagatttgtgtatatacttcg

SEQ ID NO: 4867 - protein, 326 aa, Zea mays subsp. mays
  peptide (1)..(326): Ceres Seq. ID no. 12373701
  misc_feature (227)..(323): Homolog of NCBI NO: 11358653 NR Description: probable mitochondrial carrier protein - thaliana >gi|9755609|emb|CAC01763.1| putative mitochondrial
  misc_feature (24)..(323): Homolog of NCBI NO: 21553961 NR Description: putative mitochondrial carrier protein
  misc_feature (4)..(326): Homolog of NCBI NO: 37534064 NR Description: putative Tricarboxylate transport protein,
  misc_feature (21)..(224): Homolog of NCBI NO: 18410193 NR Description: mitochondrial carrier protein family; protein id:
  misc_feature (229)..(322): Homolog of NCBI NO: 18410193 NR Description: mitochondrial carrier protein family; protein id:
  misc_feature (21)..(323): Homolog of NCBI NO: 21594326 NR Description: mitochondrial carrier-like protein [Arabidopsis
  misc_feature (21)..(323): Homolog of NCBI NO: 7486721 NR Description: hypothetical protein F9D12.12 - Arabidopsis >gi|3319342|gb|AAC26231.1| similar to mitochondrial carrier
  misc_feature (21)..(323): Homolog of NCBI NO: 15239622 NR Description: mitochondrial carrier protein family; protein id: supported by cDNA: 6836., supported by cDNA: gi_16604514 thaliana] >gi|16604515|gb|AAL24263.1| AT5g26200/T19G15_50
  misc_feature (24)..(323): Homolog of NCBI NO: 18417739 NR Description: mitochondrial carrier protein family; protein id: supported by cDNA: 18738., supported by cDNA: gi_18252182, by cDNA: gi_20258916 [Arabidopsis thaliana]
  misc_feature (24)..(221): Homolog of NCBI NO: 11358653 NR Description: probable mitochondrial carrier protein - thaliana >gi|9755609|emb|CAC01763.1| putative mitochondrial
MSFSAARVSEHGGEFEEARGMPAEVSWEMLDKSRFFVLVAALFSGVSAALYPAVVLKTHLQVAAPAQAAASAAAAAILRRDGPRGFYRGFGASLAGTVPARALYMAALEATKSVVGSAALRLGVAEPAASAAASAAGGVSAAVAAQVVWTPVDVVSQRLMLQTAPLAAARYRGGTDAFRKILLADGVRGLYRGFGISVLTYAPSSAAWWASYVTAQRLLWRAVGPAAHDSRGAAIALQGASAAAAGSAAALVTMPLDTVKTRLQVMDAGAQAPTLAAAARALVREGGWSACYRGFGPRWASMSLSSATMVTVYEFLKRLSAKEGSL

SEQ ID NO: 4868 - protein, 306 aa, Zea mays subsp. mays
  peptide (1)..(306): Ceres Seq. ID no. 12373702
  misc_feature (1)..(306): Homolog of NCBI NO: 37534064 NR Description: putative Tricarboxylate transport protein,
  misc_feature (1)..(204): Homolog of NCBI NO: 18410193 NR Description: mitochondrial carrier protein family; protein id:
  misc_feature (209)..(302): Homolog of NCBI NO: 18410193 NR Description: mitochondrial carrier protein family; protein id:
  misc_feature (1)..(303): Homolog of NCBI NO: 21594326 NR Description: mitochondrial carrier-like protein [Arabidopsis
  misc_feature (1)..(303): Homolog of NCBI NO: 7486721 NR Description: hypothetical protein F9D12.12 - Arabidopsis >gi|3319342|gb|AAC26231.1| similar to mitochondrial carrier
  misc_feature (1)..(303): Homolog of NCBI NO: 15239622 NR Description: mitochondrial carrier protein family; protein id: supported by cDNA: 6836., supported by cDNA: gi_16604514 thaliana] >gi|16604515|gb|AAL24263.1| AT5g26200/T19G15_50
  misc_feature (4)..(303): Homolog of NCBI NO: 18417739 NR Description: mitochondrial carrier protein family; protein id: supported by cDNA: 18738., supported by cDNA: gi_18252182, by cDNA: gi_20258916 [Arabidopsis thaliana]
  misc_feature (4)..(201): Homolog of NCBI NO: 11358653 NR Description: probable mitochondrial carrier protein - thaliana >gi|9755609|emb|CAC01763.1| putative mitochondrial
  misc_feature (207)..(303): Homolog of NCBI NO: 11358653 NR Description: probable mitochondrial carrier protein - thaliana >gi|9755609|emb|CAC01763.1| putative mitochondrial
  misc_feature (4)..(303): Homolog of NCBI NO: 21553961 NR Description: putative mitochondrial carrier protein
MPAEVSWEMLDKSRFFVLVAALFSGVSAALYPAVVLKTHLQVAAPAQAAASAAAAAILRRDGPRGFYRGFGASLAGTVPARALYMAALEATKSVVGSAALRLGVAEPAASAAASAAGGVSAAVAAQVVWTPVDVVSQRLMLQTAPLAAARYRGGTDAFRKILLADGVRGLYRGFGISVLTYAPSSAAWWASYVTAQRLLWRAVGPAAHDSRGAAIALQGASAAAAGSAAALVTMPLDTVKTRLQVMDAGAQAPTLAAAARALVREGGWSACYRGFGPRWASMSLSSATMVTVYEFLKRLSAKEGSL

SEQ ID NO: 4869 - protein, 298 aa, Zea mays subsp. mays
  peptide (1)..(298): Ceres Seq. ID no. 12373703
  misc_feature (1)..(298): Homolog of NCBI NO: 37534064 NR Description: putative Tricarboxylate transport protein,
  misc_feature (1)..(196): Homolog of NCBI NO: 18410193 NR Description: mitochondrial carrier protein family; protein id:
  misc_feature (201)..(294): Homolog of NCBI NO: 18410193 NR Description: mitochondrial carrier protein family; protein id:
  misc_feature (1)..(295): Homolog of NCBI NO: 21594326 NR Description: mitochondrial carrier-like protein [Arabidopsis
  misc_feature (1)..(295): Homolog of NCBI NO: 7486721 NR Description: hypothetical protein F9D12.12 - Arabidopsis >gi|3319342|gb|AAC26231.1| similar to mitochondrial carrier
  misc_feature (1)..(295): Homolog of NCBI NO: 15239622 NR Description: mitochondrial carrier protein family; protein id: supported by cDNA: 6836., supported by cDNA: gi_16604514 thaliana] >gi|16604515|gb|AAL24263.1| AT5g26200/T19G15_50
  misc_feature (1)..(295): Homolog of NCBI NO: 18417739 NR Description: mitochondrial carrier protein family; protein id: supported by cDNA: 18738., supported by cDNA: gi_18252182, by cDNA: gi_20258916 [Arabidopsis thaliana]
  misc_feature (1)..(193): Homolog of NCBI NO: 11358653 NR Description: probable mitochondrial carrier protein - thaliana >gi|9755609|emb|CAC01763.1| putative mitochondrial
  misc_feature (199)..(295): Homolog of NCBI NO: 11358653 NR Description: probable mitochondrial carrier protein - thaliana >gi|9755609|emb|CAC01763.1| putative mitochondrial
  misc_feature (1)..(295): Homolog of NCBI NO: 21553961 NR Description: putative mitochondrial carrier protein
MLDKSRFFVLVAALFSGVSAALYPAVVLKTHLQVAAPAQAAASAAAAAILRRDGPRGFYRGFGASLAGTVPARALYMAALEATKSVVGSAALRLGVAEPAASAAASAAGGVSAAVAAQVVWTPVDVVSQRLMLQTAPLAAARYRGGTDAFRKILLADGVRGLYRGFGISVLTYAPSSAAWWASYVTAQRLLWRAVGPAAHDSRGAAIALQGASAAAAGSAAALVTMPLDTVKTRLQVMDAGAQAPTLAAAARALVREGGWSACYRGFGPRWASMSLSSATMVTVYEFLKRLSAKEGSL

SEQ ID NO: 4870 - DNA, 968 bp, Zea mays subsp. mays
  misc_feature (1)..(968): Ceres Seq. ID no. 12368885
  misc_feature: MA Experiment ID: 108530 Result: Down-regulated in Transcription
  misc_feature: MA Experiment 108530 PARAMETER Experiment Name: Zm_Imbibed_Seeds_P Parameter: Age (day) Value: 6 vs. 2
  misc_feature: MA Experiment 108530 PARAMETER Experiment Name: Zm_Imbibed_Seeds_P Parameter: Organism Value: Zea mays
  misc_feature: MA Experiment 108530 PARAMETER Experiment Name: Zm_Imbibed_Seeds_P Parameter: Plant Line Value: 35A19
  misc_feature: MA Experiment 108530 PARAMETER Experiment Name: Zm_Imbibed_Seeds_P Parameter: Tissue Value: Aerial vs. Embryo
  misc_feature: MA Experiment ID: 108535 Result: Up-regulated in Transcription
  misc_feature: MA Experiment 108535 PARAMETER Experiment Name: Zm_Meristem_P Parameter: Age (day) Value: 8
  misc_feature: MA Experiment 108535 PARAMETER Experiment Name: Zm_Meristem_P Parameter: Organism Value: Zea mays
  misc_feature: MA Experiment 108535 PARAMETER Experiment Name: Zm_Meristem_P Parameter: Plant Line Value: 35A19
  misc_feature: MA Experiment 108535 PARAMETER Experiment Name: Zm_Meristem_P Parameter: Tissue Value: Root Meristem vs. Above Root Meristem
  misc_feature: MA Experiment ID: 108556 Result: Down-regulated in Transcription
  misc_feature: MA Experiment 108556 PARAMETER Experiment Name: Zm_Drought_P Parameter: Age (day) Value: 9
  misc_feature: MA Experiment 108556 PARAMETER Experiment Name: Zm_Drought_P Parameter: Organism Value: Zea mays
  misc_feature: MA Experiment 108556 PARAMETER Experiment Name: Zm_Drought_P Parameter: Plant Line Value: 35A19
  misc_feature: MA Experiment 108556 PARAMETER Experiment Name: Zm_Drought_P Parameter: Timepoint (hr) Value: 24
  misc_feature: MA Experiment 108556 PARAMETER Experiment Name: Zm_Drought_P Parameter: Tissue Value: Aerial
  misc_feature: MA Experiment 108556 PARAMETER Experiment Name: Zm_Drought_P Parameter: Treatment Value: Drought vs. No Drought
  misc_feature: MA Experiment ID: 20000108 Result: Up-regulated in Transcription
  misc_feature: MA Experiment 20000108 PARAMETER Experiment Name: Zm_Root-Tips_P Parameter: Age (day) Value: 12
  misc_feature: MA Experiment 20000108 PARAMETER Experiment Name: Zm_Root-Tips_P Parameter: Organism Value: Zea mays
  misc_feature: MA Experiment 20000108 PARAMETER Experiment Name: Zm_Root-Tips_P Parameter: Tissue Value: Root tips vs. Root mid region    35
  misc_feature: MA Experiment 20000108 PARAMETER Experiment Name: Zm_Root-Tips_P Parameter: Tissue Value: Root tips vs. Root mid region   Sequence Listing-Misc Features (4)
  misc_feature: MA Experiment ID: 20000492 Result: Up-regulated in Transcription
  misc_feature: MA Experiment 20000492 PARAMETER Experiment Name: Zm_Hybrid_Seed_Dev_P Parameter: DAP Value: 12
  misc_feature: MA Experiment 20000492 PARAMETER Experiment Name: Zm_Hybrid_Seed_Dev_P Parameter: Organism Value: Zea mays
  misc_feature: MA Experiment 20000492 PARAMETER Experiment Name: Zm_Hybrid_Seed_Dev_P Parameter: Plant Line Value: 35A19
  misc_feature: MA Experiment 20000492 PARAMETER Experiment Name: Zm_Hybrid_Seed_Dev_P Parameter: Tissue Value: Fert Kernel vs. Unfert Floret
  misc_feature: MA Experiment ID: 20001606 Result: Up-regulated in Transcription
  misc_feature: MA Experiment 20001606 PARAMETER Experiment Name: Zm_50ppm_KNO3_L-to-H_P Parameter: Age (day) Value: 19
  misc_feature: MA Experiment 20001606 PARAMETER Experiment Name: Zm_50ppm_KNO3_L-to-H_P Parameter: Organism Value: Zea mays
  misc_feature: MA Experiment 20001606 PARAMETER Experiment Name: Zm_50ppm_KNO3_L-to-H_P Parameter: Plant Line Value: 35A19
  misc_feature: MA Experiment 20001606 PARAMETER Experiment Name: Zm_50ppm_KNO3_L-to-H_P Parameter: Timepoint (hr) Value: 8
  misc_feature: MA Experiment 20001606 PARAMETER Experiment Name: Zm_50ppm_KNO3_L-to-H_P Parameter: Tissue Value: Shoots
  misc_feature: MA Experiment 20001606 PARAMETER Experiment Name: Zm_50ppm_KNO3_L-to-H_P Parameter: Treatment Value: 50ppm KNO3 vs. 50ppm KCl
acataacccgccattcccactcccctcgccgcctgcgtccacctccgccccccgccctccccgcgtcccccctctcctacgcagatcgtccaggtaagatgtcgtccgaggcggtgaaggtggcggtgccggagtcggtactccgcaagcggaagcgcgaggagcagtgggccgccgagaagaaggagaagtccctggccgagaggaagaagtccatcgagaaccggaagctcatcttcacccgcgccaagcagtacgccgaggagtacgatgcccaggagaaggaactggtacagcttaagcgtgaggcccgtttgaagggtggtttctatgtcagtcctgaggcaaagctgctatttgtgatccgcatccgtggtatcaatgccatgcatcctaagaccaggaagatattgcagcttctgcgtttgaggcagatattcaatggcgtgttcctgaaagtcaacaaggctaccattaacatgcttcgcagggttgagccttatgttgcatatgggtacccgaacttgaagagtgtcagggagttgatctacaagaggggctacggaaaactgaacaagcagaggatccctctgtctaacaaccaagtcatcgaggagggcttgggcaagcacaacatcatttgcattgaggatcttgttcatgagatcatgactgtcggcccacacttcaaggaggcgaacaacttcctttggccatttaagctgaaggcaccgctgggaggtctgaagaagaagaggaaccactatgtggagggtggtgatgccggtaaccgtgagaattacatcaacgagctcatcaaaaggatgaattaggttcacgatcaagctctattgtgttctaagaaactttctgtgctctcccaattttacattattaggaagcggatgaatatgcatgcagttttgttgtttggaactagatgtgtatggaagaaacatgatcttttc

SEQ ID NO: 4871 - protein, 276 aa, Zea mays subsp. mays
  peptide (1)..(276): Ceres Seq. ID no. 12368886
  misc_feature (116)..(168): Pfam Name: Ribosomal protein L30p/L7e Pfam Description: Ribosomal protein L30p/L7e
  misc_feature (33)..(276): Homolog of NCBI NO: 38637548 NR Description: putative 60S ribosomal protein L7 [Oryza sativa
  misc_feature (33)..(276): Homolog of NCBI NO: 38346542 NR Description: OSJNBa0035M09.3 [Oryza sativa (japonica
  misc_feature (39)..(276): Homolog of NCBI NO: 15226212 NR Description: putative ribosomal protein L7; protein id: supported by cDNA: 13298., supported by cDNA: gi_13877566, by cDNA: gi_15028382, supported by cDNA: gi_19310656, supported
  misc_feature (40)..(276): Homolog of NCBI NO: 445613 NR Description: ribosomal protein L7
  misc_feature (31)..(276): Homolog of NCBI NO: 30689623 NR Description: 60S ribosomal protein L7 (RPL7C) [Arabidopsis >gi|6174958|sp|Q42208|RL7_ARATH 60S ribosomal protein L7
  misc_feature (33)..(276): Homolog of NCBI NO: 15231288 NR Description: ribosomal protein, putative; protein id: supported by cDNA: gi_14532551, supported by cDNA: gi_15810195, by cDNA: gi_18655394 [Arabidopsis thaliana]
  misc_feature (39)..(276): Homolog of NCBI NO: 30689617 NR Description: 60S ribosomal protein L7 (RPL7C) [Arabidopsis >gi|15450713|gb|AAK96628.1| At2g44120/F6E13.25 [Arabidopsis >gi|17386142|gb|AAL38617.1|AF446884_1 At2g44120/F6E13.25
  misc_feature (39)..(276): Homolog of NCBI NO: 27311547 NR Description: Unknown protein [Arabidopsis thaliana]
  misc_feature (42)..(275): Homolog of NCBI NO: 28630259 NR Description: ribosomal protein L7 [Branchiostoma lanceolatum]
  misc_feature (29)..(275): Homolog of NCBI NO: 18253049 NR Description: ribosomal protein L7 [Spodoptera frugiperda]
ITRHSHSPRRLRPPPPPALPASPLSYADRPGKMSSEAVKVAVPESVLRKRKREEQWAAEKKEKSLAERKKSIENRKLIFTRAKQYAEEYDAQEKELVQLKREARLKGGFYVSPEAKLLFVIRIRGINAMHPKTRKILQLLRLRQIFNGVFLKVNKATINMLRRVEPYVAYGYPNLKSVRELIYKRGYGKLNKQRIPLSNNQVIEEGLGKHNIICIEDLVHEIMTVGPHFKEANNFLWPFKLKAPLGGLKKKRNHYVEGGDAGNRENYINELIKRMN

SEQ ID NO: 4872 - protein, 244 aa, Zea mays subsp. mays
  peptide (1)..(244): Ceres Seq. ID no. 12368887
  misc_feature (84)..(136): Pfam Name: Ribosomal protein L30p/L7e Pfam Description: Ribosomal protein L30p/L7e
  misc_feature (1)..(244): Homolog of NCBI NO: 38637548 NR Description: putative 60S ribosomal protein L7 [Oryza sativa
  misc_feature (1)..(244): Homolog of NCBI NO: 38346542 NR Description: OSJNBa0035M09.3 [Oryza sativa (japonica
  misc_feature (7)..(244): Homolog of NCBI NO: 15226212 NR Description: putative ribosomal protein L7; protein id: supported by cDNA: 13298., supported by cDNA: gi_13877566, by cDNA: gi_15028382, supported by cDNA: gi_19310656, supported
  misc_feature (8)..(244): Homolog of NCBI NO: 445613 NR Description: ribosomal protein L7
  misc_feature (1)..(244): Homolog of NCBI NO: 30689623 NR Description: 60S ribosomal protein L7 (RPL7C) [Arabidopsis >gi|6174958|sp|Q42208|RL7_ARATH 60S ribosomal protein L7
  misc_feature (1)..(244): Homolog of NCBI NO: 15231288 NR Description: ribosomal protein, putative; protein id: supported by cDNA: gi_14532551, supported by cDNA: gi_15810195, by cDNA: gi_18655394 [Arabidopsis thaliana]
  misc_feature (7)..(244): Homolog of NCBI NO: 30689617 NR Description: 60S ribosomal protein L7 (RPL7C) [Arabidopsis >gi|15450713|gb|AAK96628.1| At2g44120/F6E13.25 [Arabidopsis >gi|17386142|gb|AAL38617.1|AF446884_1 At2g44120/F6E13.25
  misc_feature (7)..(244): Homolog of NCBI NO: 27311547 NR Description: Unknown protein [Arabidopsis thaliana]
  misc_feature (10)..(243): Homolog of NCBI NO: 28630259 NR Description: ribosomal protein L7 [Branchiostoma lanceolatum]
  misc_feature (1)..(243): Homolog of NCBI NO: 18253049 NR Description: ribosomal protein L7 [Spodoptera frugiperda]
MSSEAVKVAVPESVLRKRKREEQWAAEKKEKSLAERKKSIENRKLIFTRAKQYAEEYDAQEKELVQLKREARLKGGFYVSPEAKLLFVIRIRGINAMHPKTRKILQLLRLRQIFNGVFLKVNKATINMLRRVEPYVAYGYPNLKSVRELIYKRGYGKLNKQRIPLSNNQVIEEGLGKHNIICIEDLVHEIMTVGPHFKEANNFLWPFKLKAPLGGLKKKRNHYVEGGDAGNRENYINELIKRMN

SEQ ID NO: 4873 - protein, 148 aa, Zea mays subsp. mays
  peptide (1)..(148): Ceres Seq. ID no. 12368888
  misc_feature (1)..(40): Pfam Name: Ribosomal protein L30p/L7e Pfam Description: Ribosomal protein L30p/L7e
  misc_feature (1)..(148): Homolog of NCBI NO: 38637548 NR Description: putative 60S ribosomal protein L7 [Oryza sativa
  misc_feature (1)..(148): Homolog of NCBI NO: 38346542 NR Description: OSJNBa0035M09.3 [Oryza sativa (japonica
  misc_feature (1)..(148): Homolog of NCBI NO: 15226212 NR Description: putative ribosomal protein L7; protein id: supported by cDNA: 13298., supported by cDNA: gi_13877566, by cDNA: gi_15028382, supported by cDNA: gi_19310656, supported
  misc_feature (1)..(148): Homolog of NCBI NO: 445613 NR Description: ribosomal protein L7
  misc_feature (1)..(148): Homolog of NCBI NO: 30689623 NR Description: 60S ribosomal protein L7 (RPL7C) [Arabidopsis >gi|6174958|sp|Q42208|RL7_ARATH 60S ribosomal protein L7
  misc_feature (1)..(148): Homolog of NCBI NO: 15231288 NR Description: ribosomal protein, putative; protein id: supported by cDNA: gi_14532551, supported by cDNA: gi_15810195, by cDNA: gi_18655394 [Arabidopsis thaliana]
  misc_feature (1)..(148): Homolog of NCBI NO: 30689617 NR Description: 60S ribosomal protein L7 (RPL7C) [Arabidopsis >gi|15450713|gb|AAK96628.1| At2g44120/F6E13.25 [Arabidopsis >gi|17386142|gb|AAL38617.1|AF446884_1 At2g44120/F6E13.25
  misc_feature (1)..(148): Homolog of NCBI NO: 27311547 NR Description: Unknown protein [Arabidopsis thaliana]
  misc_feature (1)..(147): Homolog of NCBI NO: 28630259 NR Description: ribosomal protein L7 [Branchiostoma lanceolatum]
  misc_feature (1)..(147): Homolog of NCBI NO: 18253049 NR Description: ribosomal protein L7 [Spodoptera frugiperda]
MHPKTRKILQLLRLRQIFNGVFLKVNKATINMLRRVEPYVAYGYPNLKSVRELIYKRGYGKLNKQRIPLSNNQVIEEGLGKHNIICIEDLVHEIMTVGPHFKEANNFLWPFKLKAPLGGLKKKRNHYVEGGDAGNRENYINELIKRMN

SEQ ID NO: 4874 - DNA, 1231 bp, Zea mays subsp. mays
  misc_feature (1)..(1231): Ceres Seq. ID no. 12363179
  misc_feature: MA Experiment ID: 108535 Result: Down-regulated in Transcription
  misc_feature: MA Experiment 108535 PARAMETER Experiment Name: Zm_Meristem_P Parameter: Age (day) Value: 8
  misc_feature: MA Experiment 108535 PARAMETER Experiment Name: Zm_Meristem_P Parameter: Organism Value: Zea mays
  misc_feature: MA Experiment 108535 PARAMETER Experiment Name: Zm_Meristem_P Parameter: Plant Line Value: 35A19
  misc_feature: MA Experiment 108535 PARAMETER Experiment Name: Zm_Meristem_P Parameter: Tissue Value: Root Meristem vs. Above Root Meristem
  misc_feature: MA Experiment ID: 20000108 Result: Down-regulated in Transcription
  misc_feature: MA Experiment 20000108 PARAMETER Experiment Name: Zm_Root-Tips_P Parameter: Age (day) Value: 12
  misc_feature: MA Experiment 20000108 PARAMETER Experiment Name: Zm_Root-Tips_P Parameter: Organism Value: Zea mays
  misc_feature: MA Experiment 20000108 PARAMETER Experiment Name: Zm_Root-Tips_P Parameter: Tissue Value: Root tips vs. Root mid region    35
  misc_feature: MA Experiment 20000108 PARAMETER Experiment Name: Zm_Root-Tips_P Parameter: Tissue Value: Root tips vs. Root mid region   Sequence Listing-Misc Features (4)
gcacgagaccattacctagaacatcctaatcgaaaaaaaggaaaaccacacaccggccaaaccacgactgcaggaggcgggtagtagcaagagaaaggaaacgctctcccagccccaaagaaaaaggcagcacaccaactcaccaagaaagtgtggaactgctcctgcctgcagcctcctgctcatcgaccctttcgccccacaagctcgattcctcgctcggccatggctgcacccgcggaggagacgcttgccgccgaggatacggcgtcaccaccgccgccggcgaggtctgcggggttctggttccttggcgaggataagtctgtccacaaggctctcggcgggggtaaaactgctgatgtacttttgtggaaagacaagaagacctctgctgcggtagttggtggtgcaactgtcctatgggttctgttcgaaattgtagaataccatctcctgaccctggtttctcatgtgctgatcgctgcactgaccatcttgttcctgtggtccaatgcgactgtctttatcaaaaagagtcctcctgatgttcctgaagtgcagatatctgaagaccttgctgtaaacattgcgctagcattgcgtgctgacatcaacaaggcacttgccctgcttcgggagattgctctgggccataacctgatgaagttcctaggcgtggtcgtcgccctttggattctttcagagatcggggagctatgtgatctcctgagattgatgtacattgtggtcttgatcctccacacagtgccgatactgtaccacaagtatcaggaccaggtggacaatttcgctgcaaaggcgcacagggagctctgcaagcaatacgcggtcctggatgccaaagttctgagcaagattccaagagctccaccaaaagataagaaacagaactagaacgtggaggatgacaagcgccttgttttcggcttgggcgacgagagtttgtagccaatggtctgatgtggttcgtgggctttgtgtaggtgcacagtttcacgtatatgttctggtcgtgtaatctatatgtttatataaacctgtaggggtgttgatgaccatcgaaagtgtcgtaaatattcagtagtatatgtagcttagggcttaagcggttgtgtttataaggtcattgtcgttgtcgatgggaagtattatcatgttattttcaggactcaggagtataaaatgaaataaaatgtgaattcatctg

SEQ ID NO: 4875 - protein, 230 aa, Zea mays subsp. mays
  peptide (1)..(230): Ceres Seq. ID no. 12363180
  misc_feature (1)..(228): Homolog of NCBI NO: 34904202 NR Description: P0492F05.25 [Oryza sativa (japonica
  misc_feature (1)..(230): Homolog of NCBI NO: 15237093 NR Description: putative protein; protein id: At4g11220.1, by cDNA: 23536., supported by cDNA: gi_14334419, supported by gi_15081760, supported by cDNA: gi_16209686 [Arabidopsis
  misc_feature (1)..(228): Homolog of NCBI NO: 34909318 NR Description: OSJNBb0021A09.5 [Oryza sativa (japonica
  misc_feature (1)..(230): Homolog of NCBI NO: 15236556 NR Description: putative protein; protein id: At4g23630.1, by cDNA: 39185., supported by cDNA: gi_15215585 [Arabidopsis
  misc_feature (18)..(227): Homolog of NCBI NO: 18406991 NR Description: expressed protein; protein id: At2g46170.1, by cDNA: gi_15450758, supported by cDNA: gi_18491130 [Arabidopsis >gi|25408969|pir||E84899 hypothetical protein At2g46170
  misc_feature (30)..(225): Homolog of NCBI NO: 15222616 NR Description: hypothetical protein; protein id: At1g64090.1, by cDNA: gi_17381217 [Arabidopsis thaliana] F22C12.15 [Arabidopsis thaliana] >gi|17381218|gb|AAL36421.1|
  misc_feature (12)..(228): Homolog of NCBI NO: 15238125 NR Description: putative protein; protein id: At5g41600.1, by cDNA: gi_14334529, supported by cDNA: gi_16323068 [Arabidopsis >gi|10178014|dbj|BAB11466.1| contains similarity to 24 kDa seed
  misc_feature (30)..(228): Homolog of NCBI NO: 34897094 NR Description: unknown protein [Oryza sativa (japonica
  misc_feature (33)..(220): Homolog of NCBI NO: 18398810 NR Description: expressed protein; protein id: At3g10260.1, by cDNA: 15153., supported by cDNA: gi_20259182 [Arabidopsis >gi|6056199|gb|AAF02816.1|AC009400_12 unknown protein
  misc_feature (33)..(220): Homolog of NCBI NO: 30681227 NR Description: expressed protein [Arabidopsis thaliana]
MAAPAEETLAAEDTASPPPPARSAGFWFLGEDKSVHKALGGGKTADVLLWKDKKTSAAVVGGATVLWVLFEIVEYHLLTLVSHVLIAALTILFLWSNATVFIKKSPPDVPEVQISEDLAVNIALALRADINKALALLREIALGHNLMKFLGVVVALWILSEIGELCDLLRLMYIVVLILHTVPILYHKYQDQVDNFAAKAHRELCKQYAVLDAKVLSKIPRAPPKDKKQN

SEQ ID NO: 4876 - DNA, 1485 bp, Zea mays subsp. mays
  misc_feature (1)..(1485): Ceres Seq. ID no. 12352324
  misc_feature: MA Experiment ID: 108689 Result: Down-regulated in Transcription
  misc_feature: MA Experiment 108689 PARAMETER Experiment Name: Zm_Drought_Roots_P Parameter: Age (day) Value: 9
  misc_feature: MA Experiment 108689 PARAMETER Experiment Name: Zm_Drought_Roots_P Parameter: Organism Value: Zea mays
  misc_feature: MA Experiment 108689 PARAMETER Experiment Name: Zm_Drought_Roots_P Parameter: Plant Line Value: 35A19
  misc_feature: MA Experiment 108689 PARAMETER Experiment Name: Zm_Drought_Roots_P Parameter: Timepoint (hr) Value: 24
  misc_feature: MA Experiment 108689 PARAMETER Experiment Name: Zm_Drought_Roots_P Parameter: Tissue Value: Roots
  misc_feature: MA Experiment 108689 PARAMETER Experiment Name: Zm_Drought_Roots_P Parameter: Treatment Value: Drought vs. No Drought
ctaccgtctgcgtctgcccgtcttcctctctctctctctctctcctctccctcattctggatccaccgccgcagccttagctgggtccgtcgctgtcgctccgcctcccgctcgcttgccgggcccgacacgcccgccaccgcctccgctttgtctctccggcgatccgacgccccacccggcgtctgtgcagagcagtcgtgaggagttctctgttgtgggctgcccggcgatggaccggggcgagcgtctcggccgcgcgctggacgccttcgggggcaacctgtgggcgctggttgacgcagcgctggacgcggccgctcgcgaccgccccgacgagcttcgcgcgcgccgcgatagcatcgtcgagcgcctctacgctgccnccgcgggctgtagcaactgcgccgggcgtccgccgtctgttgccgctttagcggccgcggggctggaggaagaggacggcgaggaggcggctccggcttctccgtgggcggaggctgacgcgcaagccggtggcgcggaggcacagaccgaggtgctcggcgccggcgagcctgatctcgagagcaagatcgtggccatcagggacttcttggaggaccctaatcagcccgagaacgagctggtgagcttgctgcagaacctggcagacatggatgttacctacaacgcactccaggagactgacatcgggcggcaggttaatggtctgcgcaagcatccttcggccgaggtcaggcggctggtgaagcagctcatcaggaagtggaaggagatagtggacgactgggtgcgcctggacaattccggcggtgacggcagtgcctctgttatgacagctgatggtgactccccacataaaatccaaggcagaagccaccaaagccctcgggtttcggggtttcagtattctccaagcccacagaggtttaatggttcaacttcagagatggctaacaatgggtttgagtcaacaatggatgcgaagcgtagggccagccctgtaccagcacatcataactccaggcagatgaacaacaatcatcattctactactattaccaccagcacgtcatctgctccagctaaagtgacaagggagcaaaagcagagtcttgtggaccttgacaggcttgattctgccaggaagaggctccaggagaattaccaagaagcacaaaatgccaaaaagcagaggacaatccaagtgatggacatcaatgacataccaaagccgaagagcagaaacgctttcatccgcaagagcggcagcggtgggctcccggcgaggcaccgatagcctaacctcctccgtcggctggatatctgcgacacttgcgaagttgtgcctagaaccgcaacgggaaagaaaaagaagcaaacggtttcttgttctttttttccctgtaccttgactgcctaggtttacctccagtgtaatattgtcaggtacataagggtgaaatgatatgatgtttcccg

SEQ ID NO: 4877 - protein, 433 aa, Zea mays subsp. mays
  peptide (1)..(433): Ceres Seq. ID no. 12352325
  misc_feature (88)..(427): Homolog of NCBI NO: 18416107 NR Description: putative protein; protein id: At5g09850.1,
  misc_feature (88)..(427): Homolog of NCBI NO: 9758963 NR Description: gb|AAF19567.1~gene_id:MYH9.6~similar to unknown
  misc_feature (151)..(427): Homolog of NCBI NO: 16648730 NR Description: AT5g09850/MYH9_6 [Arabidopsis thaliana]
  misc_feature (76)..(265): Homolog of NCBI NO: 34904746 NR Description: contains ESTs
  misc_feature (330)..(417): Homolog of NCBI NO: 34904746 NR Description: contains ESTs
  misc_feature (94)..(315): Homolog of NCBI NO: 15228385 NR Description: hypothetical protein; protein id: At3g10820.1 thaliana] >gi|6630548|gb|AAF19567.1|AC011708_10 hypothetical
  misc_feature (356)..(422): Homolog of NCBI NO: 15228385 NR Description: hypothetical protein; protein id: At3g10820.1 thaliana] >gi|6630548|gb|AAF19567.1|AC011708_10 hypothetical
  misc_feature (195)..(249): Homolog of NCBI NO: 38567964 NR Description: OSJNBa0093F12.5 [Oryza sativa (japonica
  misc_feature (330)..(422): Homolog of NCBI NO: 37531730 NR Description: putative transcription elongation factor [Oryza
  misc_feature (206)..(287): Homolog of NCBI NO: 37531730 NR Description: putative transcription elongation factor [Oryza
  misc_feature (129)..(129): Xaa is any aa, unknown or other
YRLRLPVFLSLSLSPLPHSGSTAAALAGSVAVAPPPARLPGPTRPPPPPLCLSGDPTPHPASVQSSREEFSVVGCPAMDRGERLGRALDAFGGNLWALVDAALDAAARDRPDELRARRDSIVERLYAAXAGCSNCAGRPPSVAALAAAGLEEEDGEEAAPASPWAEADAQAGGAEAQTEVLGAGEPDLESKIVAIRDFLEDPNQPENELVSLLQNLADMDVTYNALQETDIGRQVNGLRKHPSAEVRRLVKQLIRKWKEIVDDWVRLDNSGGDGSASVMTADGDSPHKIQGRSHQSPRVSGFQYSPSPQRFNGSTSEMANNGFESTMDAKRRASPVPAHHNSRQMNNNHHSTTITTSTSSAPAKVTREQKQSLVDLDRLDSARKRLQENYQEAQNAKKQRTIQVMDINDIPKPKSRNAFIRKSGSGGLPARHR

SEQ ID NO: 4878 - protein, 356 aa, Zea mays subsp. mays
  peptide (1)..(356): Ceres Seq. ID no. 12352326
  misc_feature (11)..(350): Homolog of NCBI NO: 18416107 NR Description: putative protein; protein id: At5g09850.1,
  misc_feature (11)..(350): Homolog of NCBI NO: 9758963 NR Description: gb|AAF19567.1~gene_id:MYH9.6~similar to unknown
  misc_feature (74)..(350): Homolog of NCBI NO: 16648730 NR Description: AT5g09850/MYH9_6 [Arabidopsis thaliana]
  misc_feature (1)..(188): Homolog of NCBI NO: 34904746 NR Description: contains ESTs
  misc_feature (253)..(340): Homolog of NCBI NO: 34904746 NR Description: contains ESTs
  misc_feature (17)..(238): Homolog of NCBI NO: 15228385 NR Description: hypothetical protein; protein id: At3g10820.1 thaliana] >gi|6630548|gb|AAF19567.1|AC011708_10 hypothetical
  misc_feature (279)..(345): Homolog of NCBI NO: 15228385 NR Description: hypothetical protein; protein id: At3g10820.1 thaliana] >gi|6630548|gb|AAF19567.1|AC011708_10 hypothetical
  misc_feature (118)..(172): Homolog of NCBI NO: 38567964 NR Description: OSJNBa0093F12.5 [Oryza sativa (japonica
  misc_feature (253)..(345): Homolog of NCBI NO: 37531730 NR Description: putative transcription elongation factor [Oryza
  misc_feature (129)..(210): Homolog of NCBI NO: 37531730 NR Description: putative transcription elongation factor [Oryza
  misc_feature (52)..(52): Xaa is any aa, unknown or other
MDRGERLGRALDAFGGNLWALVDAALDAAARDRPDELRARRDSIVERLYAAXAGCSNCAGRPPSVAALAAAGLEEEDGEEAAPASPWAEADAQAGGAEAQTEVLGAGEPDLESKIVAIRDFLEDPNQPENELVSLLQNLADMDVTYNALQETDIGRQVNGLRKHPSAEVRRLVKQLIRKWKEIVDDWVRLDNSGGDGSASVMTADGDSPHKIQGRSHQSPRVSGFQYSPSPQRFNGSTSEMANNGFESTMDAKRRASPVPAHHNSRQMNNNHHSTTITTSTSSAPAKVTREQKQSLVDLDRLDSARKRLQENYQEAQNAKKQRTIQVMDINDIPKPKSRNAFIRKSGSGGLPARHR

SEQ ID NO: 4879 - DNA, 1407 bp, Zea mays subsp. mays
  misc_feature (1)..(1407): Ceres Seq. ID no. 12409806
  misc_feature: MA Experiment ID: 108529 Result: Up-regulated in Transcription
  misc_feature: MA Experiment 108529 PARAMETER Experiment Name: Zm_Imbibed_Seeds_P Parameter: Age (day) Value: 5 vs. 2
  misc_feature: MA Experiment 108529 PARAMETER Experiment Name: Zm_Imbibed_Seeds_P Parameter: Organism Value: Zea mays
  misc_feature: MA Experiment 108529 PARAMETER Experiment Name: Zm_Imbibed_Seeds_P Parameter: Plant Line Value: 35A19
  misc_feature: MA Experiment 108529 PARAMETER Experiment Name: Zm_Imbibed_Seeds_P Parameter: Tissue Value: Roots vs. Embryo
  misc_feature: MA Experiment ID: 108535 Result: Down-regulated in Transcription
  misc_feature: MA Experiment 108535 PARAMETER Experiment Name: Zm_Meristem_P Parameter: Age (day) Value: 8
  misc_feature: MA Experiment 108535 PARAMETER Experiment Name: Zm_Meristem_P Parameter: Organism Value: Zea mays
  misc_feature: MA Experiment 108535 PARAMETER Experiment Name: Zm_Meristem_P Parameter: Plant Line Value: 35A19
  misc_feature: MA Experiment 108535 PARAMETER Experiment Name: Zm_Meristem_P Parameter: Tissue Value: Root Meristem vs. Above Root Meristem
  misc_feature: MA Experiment ID: 108544 Result: Down-regulated in Transcription
  misc_feature: MA Experiment ID: 108556 Result: Down-regulated in Transcription
  misc_feature: MA Experiment 108556 PARAMETER Experiment Name: Zm_Drought_P Parameter: Age (day) Value: 9
  misc_feature: MA Experiment 108556 PARAMETER Experiment Name: Zm_Drought_P Parameter: Organism Value: Zea mays
  misc_feature: MA Experiment 108556 PARAMETER Experiment Name: Zm_Drought_P Parameter: Plant Line Value: 35A19
  misc_feature: MA Experiment 108556 PARAMETER Experiment Name: Zm_Drought_P Parameter: Timepoint (hr) Value: 24
  misc_feature: MA Experiment 108556 PARAMETER Experiment Name: Zm_Drought_P Parameter: Tissue Value: Aerial
  misc_feature: MA Experiment 108556 PARAMETER Experiment Name: Zm_Drought_P Parameter: Treatment Value: Drought vs. No Drought
  misc_feature: MA Experiment ID: 20000477 Result: Down-regulated in Transcription
  misc_feature: MA Experiment 20000477 PARAMETER Experiment Name: Zm_5mM_SA_P Parameter: Age (day) Value: 10
  misc_feature: MA Experiment 20000477 PARAMETER Experiment Name: Zm_5mM_SA_P Parameter: Organism Value: Zea mays
  misc_feature: MA Experiment 20000477 PARAMETER Experiment Name: Zm_5mM_SA_P Parameter: Plant Line Value: 35A19
  misc_feature: MA Experiment 20000477 PARAMETER Experiment Name: Zm_5mM_SA_P Parameter: Timepoint (hr) Value: 48
  misc_feature: MA Experiment 20000477 PARAMETER Experiment Name: Zm_5mM_SA_P Parameter: Tissue Value: Aerial
  misc_feature: MA Experiment 20000477 PARAMETER Experiment Name: Zm_5mM_SA_P Parameter: Treatment Value: 5mM SA vs. No Treatment
  misc_feature: MA Experiment ID: 20000478 Result: Down-regulated in Transcription
  misc_feature: MA Experiment 20000478 PARAMETER Experiment Name: Zm_5mM_SA_P Parameter: Age (day) Value: 11
  misc_feature: MA Experiment 20000478 PARAMETER Experiment Name: Zm_5mM_SA_P Parameter: Organism Value: Zea mays
  misc_feature: MA Experiment 20000478 PARAMETER Experiment Name: Zm_5mM_SA_P Parameter: Plant Line Value: 35A19
  misc_feature: MA Experiment 20000478 PARAMETER Experiment Name: Zm_5mM_SA_P Parameter: Timepoint (hr) Value: 72
  misc_feature: MA Experiment 20000478 PARAMETER Experiment Name: Zm_5mM_SA_P Parameter: Tissue Value: Aerial
  misc_feature: MA Experiment 20000478 PARAMETER Experiment Name: Zm_5mM_SA_P Parameter: Treatment Value: 5mM SA vs. No Treatment
  misc_feature: MA Experiment ID: 20000479 Result: Down-regulated in Transcription
  misc_feature: MA Experiment 20000479 PARAMETER Experiment Name: Zm_Drought_P Parameter: Age (day) Value: 10
  misc_feature: MA Experiment 20000479 PARAMETER Experiment Name: Zm_Drought_P Parameter: Organism Value: Zea mays
  misc_feature: MA Experiment 20000479 PARAMETER Experiment Name: Zm_Drought_P Parameter: Plant Line Value: 35A19
  misc_feature: MA Experiment 20000479 PARAMETER Experiment Name: Zm_Drought_P Parameter: Timepoint (hr) Value: 48
  misc_feature: MA Experiment 20000479 PARAMETER Experiment Name: Zm_Drought_P Parameter: Tissue Value: Aerial
  misc_feature: MA Experiment 20000479 PARAMETER Experiment Name: Zm_Drought_P Parameter: Treatment Value: Drought vs. No Drought
  misc_feature: MA Experiment ID: 20000480 Result: Down-regulated in Transcription
  misc_feature: MA Experiment 20000480 PARAMETER Experiment Name: Zm_Drought_P Parameter: Age (day) Value: 11
  misc_feature: MA Experiment 20000480 PARAMETER Experiment Name: Zm_Drought_P Parameter: Organism Value: Zea mays
  misc_feature: MA Experiment 20000480 PARAMETER Experiment Name: Zm_Drought_P Parameter: Plant Line Value: 35A19
  misc_feature: MA Experiment 20000480 PARAMETER Experiment Name: Zm_Drought_P Parameter: Timepoint (hr) Value: 72
  misc_feature: MA Experiment 20000480 PARAMETER Experiment Name: Zm_Drought_P Parameter: Tissue Value: Aerial
  misc_feature: MA Experiment 20000480 PARAMETER Experiment Name: Zm_Drought_P Parameter: Treatment Value: Drought vs. No Drought
  misc_feature: MA Experiment ID: 20000492 Result: Down-regulated in Transcription
  misc_feature: MA Experiment 20000492 PARAMETER Experiment Name: Zm_Hybrid_Seed_Dev_P Parameter: DAP Value: 12
  misc_feature: MA Experiment 20000492 PARAMETER Experiment Name: Zm_Hybrid_Seed_Dev_P Parameter: Organism Value: Zea mays
  misc_feature: MA Experiment 20000492 PARAMETER Experiment Name: Zm_Hybrid_Seed_Dev_P Parameter: Plant Line Value: 35A19
  misc_feature: MA Experiment 20000492 PARAMETER Experiment Name: Zm_Hybrid_Seed_Dev_P Parameter: Tissue Value: Fert Kernel vs. Unfert Floret
atccatcccgagcaagcaagtaatatggcttggtcttgtgctcgtccgatgagcatcgccctcgctgccgtcctcctgctgtgcggcggcgcgtggctgcagcaggcggcggaggcgcgcccccaccacatggacgacgacagcagcatcgacatggaccgcggcagcgacgacttcttctccatcgtggggtactcgccggaggacctgacgcagcacgaccggctcgtcaggctgttcgaggagtgggtggccaagtaccgcaaggcgtacggcagcttcgaggagaagctgcgccggttcgaggtgttcaaggacaacctgcaccacatcgacgaggccaacaggaaggaggtcaccagctactggctggggcctcaacgccttcgccgacctcacgcacgacgagttcaaggccacctacctgggcctcctgcccgaagaggaccagcggtggccggttcaggtacggcggcgtgggcgacggcggcgacgaggtgcccgcgtccgtggactggcggaagaagggcgccgtgacggaggtcaagaaccaggggcagtgcggcagctgctgggccttctccacggtggcggccgtggaagggatcaaccagatcgtgacgggcaacctcacgtcgctgtcggagcagcagctggtcgactgcagcaccgacgggaacaacgggtgcagcggcggcgtcatggacaacgccttctcgttcatcgccaccggcgccgggctccgctccgaggaggcgtacccgtacctcatggaggaaggggactgcgacgacagggcccgcgacggcgaggtgctcgtcactatatccgggtacgaggacgtgccggccaacgacgagcaggcgctcgtcaaggccctcgcccaccagcccgtcagcgtcgccatcgaggcgtccgggaggcacttccagttctacagcgggggcgtgttcgatggaccgtgcgggtcggagctggaccacggcgtggcggcggtgggctacggcagcagcaaggggcaggactacatcatcgtcaagaactcgtggggcacccactggggcgagaagggctacatccgcatgaagaggggcaccggcaagccggagggcctctgcggcatcaacaagatggcatcctacccgaccaaggaccattgatggatcatggacgacggagatcatatctatcttcccttccctttcatccgactctttcgatttccatcgtttgcccccttttcctgaatgtgtgtgttttttttatatattactgtgtcaagtaatttctcgatggatcgatcgaggaagaacgacaaacatgcactcaagcacgagcgcagcaatgtcatctttctcttcatttggtgcgttgaaatgacgaatatcaaataaagtggtttatttc

SEQ ID NO: 4880 - protein, 178 aa, Zea mays subsp. mays
  peptide (1)..(178): Ceres Seq. ID no. 12409807
  misc_feature (60)..(125): Homolog of NCBI NO: 14719319 NR Description: putative cysteine proteinase [Oryza sativa]
  misc_feature (61)..(125): Homolog of NCBI NO: 34905996 NR Description: putative cysteine proteinase [Oryza sativa
  misc_feature (60)..(125): Homolog of NCBI NO: 18418684 NR Description: cysteine protease XCP1; protein id: At4g35350.1, by cDNA: gi_6708180 [Arabidopsis thaliana]
  misc_feature (60)..(125): Homolog of NCBI NO: 37780039 NR Description: cysteine protease 14 [Trifolium repens]
  misc_feature (60)..(125): Homolog of NCBI NO: 37780041 NR Description: cysteine protease 14 [Trifolium repens]
  misc_feature (60)..(125): Homolog of NCBI NO: 22759715 NR Description: cysteine proteinase [Zinnia elegans]
  misc_feature (60)..(125): Homolog of NCBI NO: 30141025 NR Description: cysteine protease-4 [Helianthus annuus]
  misc_feature (48)..(125): Homolog of NCBI NO: 18394919 NR Description: cysteine proteinase XCP2; protein id: supported by cDNA: gi_6708182 [Arabidopsis thaliana]
  misc_feature (60)..(125): Homolog of NCBI NO: 7435773 NR Description: cysteine proteinase (EC 3.4.22.-) precursor -
  misc_feature (60)..(125): Homolog of NCBI NO: 2118132 NR Description: cysteine proteinase (EC 3.4.22.-) - Douglas fir
IHPEQASNMAWSCARPMSIALAAVLLLCGGAWLQQAAEARPHHMDDDSSIDMDRGSDDFFSIVGYSPEDLTQHDRLVRLFEEWVAKYRKAYGSFEEKLRRFEVFKDNLHHIDEANRKEVTSYWLGPQRLRRPHARRVQGHLPGPPARRGPAVAGSGTAAWATAATRCPRPWTGGRRAP

SEQ ID NO: 4881 - protein, 170 aa, Zea mays subsp. mays
  peptide (1)..(170): Ceres Seq. ID no. 12409808
  misc_feature (52)..(117): Homolog of NCBI NO: 22759715 NR Description: cysteine proteinase [Zinnia elegans]
  misc_feature (52)..(117): Homolog of NCBI NO: 30141025 NR Description: cysteine protease-4 [Helianthus annuus]
  misc_feature (40)..(117): Homolog of NCBI NO: 18394919 NR Description: cysteine proteinase XCP2; protein id: supported by cDNA: gi_6708182 [Arabidopsis thaliana]
  misc_feature (52)..(117): Homolog of NCBI NO: 7435773 NR Description: cysteine proteinase (EC 3.4.22.-) precursor -
  misc_feature (52)..(117): Homolog of NCBI NO: 2118132 NR Description: cysteine proteinase (EC 3.4.22.-) - Douglas fir
  misc_feature (52)..(117): Homolog of NCBI NO: 14719319 NR Description: putative cysteine proteinase [Oryza sativa]
  misc_feature (53)..(117): Homolog of NCBI NO: 34905996 NR Description: putative cysteine proteinase [Oryza sativa
  misc_feature (52)..(117): Homolog of NCBI NO: 18418684 NR Description: cysteine protease XCP1; protein id: At4g35350.1, by cDNA: gi_6708180 [Arabidopsis thaliana]
  misc_feature (52)..(117): Homolog of NCBI NO: 37780039 NR Description: cysteine protease 14 [Trifolium repens]
  misc_feature (52)..(117): Homolog of NCBI NO: 37780041 NR Description: cysteine protease 14 [Trifolium repens]
MAWSCARPMSIALAAVLLLCGGAWLQQAAEARPHHMDDDSSIDMDRGSDDFFSIVGYSPEDLTQHDRLVRLFEEWVAKYRKAYGSFEEKLRRFEVFKDNLHHIDEANRKEVTSYWLGPQRLRRPHARRVQGHLPGPPARRGPAVAGSGTAAWATAATRCPRPWTGGRRAP

SEQ ID NO: 4882 - protein, 162 aa, Zea mays subsp. mays
  peptide (1)..(162): Ceres Seq. ID no. 12409809
  misc_feature (44)..(109): Homolog of NCBI NO: 14719319 NR Description: putative cysteine proteinase [Oryza sativa]
  misc_feature (45)..(109): Homolog of NCBI NO: 34905996 NR Description: putative cysteine proteinase [Oryza sativa
  misc_feature (44)..(109): Homolog of NCBI NO: 18418684 NR Description: cysteine protease XCP1; protein id: At4g35350.1, by cDNA: gi_6708180 [Arabidopsis thaliana]
  misc_feature (44)..(109): Homolog of NCBI NO: 37780039 NR Description: cysteine protease 14 [Trifolium repens]
  misc_feature (44)..(109): Homolog of NCBI NO: 37780041 NR Description: cysteine protease 14 [Trifolium repens]
  misc_feature (44)..(109): Homolog of NCBI NO: 22759715 NR Description: cysteine proteinase [Zinnia elegans]
  misc_feature (44)..(109): Homolog of NCBI NO: 30141025 NR Description: cysteine protease-4 [Helianthus annuus]
  misc_feature (32)..(109): Homolog of NCBI NO: 18394919 NR Description: cysteine proteinase XCP2; protein id: supported by cDNA: gi_6708182 [Arabidopsis thaliana]
  misc_feature (44)..(109): Homolog of NCBI NO: 7435773 NR Description: cysteine proteinase (EC 3.4.22.-) precursor -
  misc_feature (44)..(109): Homolog of NCBI NO: 2118132 NR Description: cysteine proteinase (EC 3.4.22.-) - Douglas fir
MSIALAAVLLLCGGAWLQQAAEARPHHMDDDSSIDMDRGSDDFFSIVGYSPEDLTQHDRLVRLFEEWVAKYRKAYGSFEEKLRRFEVFKDNLHHIDEANRKEVTSYWLGPQRLRRPHARRVQGHLPGPPARRGPAVAGSGTAAWATAATRCPRPWTGGRRAP

SEQ ID NO: 4883 - DNA, 1024 bp, Zea mays subsp. mays
  misc_feature (1)..(1024): Ceres Seq. ID no. 12407960
  misc_feature: MA Experiment ID: 108527 Result: Up-regulated in Transcription
  misc_feature: MA Experiment 108527 PARAMETER Experiment Name: Zm_5mM_NO_P Parameter: Age (day) Value: 8
  misc_feature: MA Experiment 108527 PARAMETER Experiment Name: Zm_5mM_NO_P Parameter: Organism Value: Zea mays
  misc_feature: MA Experiment 108527 PARAMETER Experiment Name: Zm_5mM_NO_P Parameter: Plant Line Value: 35A19
  misc_feature: MA Experiment 108527 PARAMETER Experiment Name: Zm_5mM_NO_P Parameter: Timepoint (hr) Value: 6
  misc_feature: MA Experiment 108527 PARAMETER Experiment Name: Zm_5mM_NO_P Parameter: Tissue Value: Aerial
  misc_feature: MA Experiment 108527 PARAMETER Experiment Name: Zm_5mM_NO_P Parameter: Treatment Value: 5mM NO vs. No Treatment
  misc_feature: MA Experiment ID: 20000535 Result: Down-regulated in Transcription
  misc_feature: MA Experiment 20000535 PARAMETER Experiment Name: Zm_Hybrid_Seed_Dev_P Parameter: DAP Value: 30 vs. 12
  misc_feature: MA Experiment 20000535 PARAMETER Experiment Name: Zm_Hybrid_Seed_Dev_P Parameter: Organism Value: Zea mays
  misc_feature: MA Experiment 20000535 PARAMETER Experiment Name: Zm_Hybrid_Seed_Dev_P Parameter: Plant Line Value: 35A19
  misc_feature: MA Experiment 20000535 PARAMETER Experiment Name: Zm_Hybrid_Seed_Dev_P Parameter: Tissue Value: Embryo vs. Unfert Floret
gtccatccatccatccaggtagtccgagccagcgaaccaactattcgtttgcttttcgtcttcgtcctctctttgcccagttgtcggtcgcccgcgccgtcgtctccgctccgccggccggcctgcgaaaccctagcgaggcgagcgagagagaaactagcggccatgttcggctacaggaaggctgacccggacctcgaggccggcgggtcctcgctgctgtacccgggaatgacggagaagccccgagcttcggtgggcgttcgtccgcaaggatctacgtcatcctagccgtccagctcgccatgacggccgcggtctccgccttcgtcgtcaaggtgcccgccgtctccaacttcttcgtctcctccaacgccggggtcgcactctacatcttcctcatcatcctgcctttcctcgtgctgtgccctctgcgctactaccaccagaagcatccggtcaatctgctgctgctcggcctcttcaccgtcgccatcagctttgccgtcggcatgacatgcgctttcactagcggaaaaatcattttggaggctgccattcttacagcagtggtggtgatcagcttaactgcgtacactttctgggctgcaaagaggggccatgacttcaacttcctcggtcccttcctatttgctgctatcatggtgctcatggtgttttcactaatccagatctttttcccgctgggtaagatatctgtgatgatatacggtgggttggcatcacttatcttctgtggatacatcatctatgacacggacaatgtcatcaagcgctacacctacgatgaatatatatgggctgctgtttcactctacctcgacgtcatcaacctgttcctgtctctgctgcagctgctgagggcagccgatagctgagctcgtcaagctttcacttggatcttgttctcacatacatttgtgtatatcacaaactctgtaatggtcatggatactccaatttataactatactttgtcggtggctcggtgttaccttggtcc

SEQ ID NO: 4884 - protein, 197 aa, Zea mays subsp. mays
  peptide (1)..(197): Ceres Seq. ID no. 12407961
  misc_feature (1)..(196): Pfam Name: Uncharacterised protein family UPF0005 Pfam Description: Uncharacterised protein family UPF0005
  misc_feature (1)..(196): Homolog of NCBI NO: 34393841 NR Description: putative z-protein [Oryza sativa (japonica
  misc_feature (1)..(197): Homolog of NCBI NO: 14626300 NR Description: putative receptor-associated protein [Oryza
  misc_feature (1)..(197): Homolog of NCBI NO: 15229411 NR Description: putative protein; protein id: At3g63310.1
  misc_feature (1)..(196): Homolog of NCBI NO: 15218701 NR Description: putative glutamate/aspartate-binding peptide;
  misc_feature (1)..(194): Homolog of NCBI NO: 15235466 NR Description: putative glutamate-/aspartate-binding peptide; id: At4g02690.1 [Arabidopsis thaliana] >gi|7486855|pir||T01080
  misc_feature (1)..(197): Homolog of NCBI NO: 18414455 NR Description: Expressed protein; protein id: At4g15470.1, by cDNA: gi_15215826, supported by cDNA: gi_15810200, supported cDNA: gi_20453266 [Arabidopsis thaliana]
  misc_feature (1)..(197): Homolog of NCBI NO: 34393840 NR Description: putative z-protein [Oryza sativa (japonica
  misc_feature (1)..(157): Homolog of NCBI NO: 15810201 NR Description: AT4g15470/dl3775w [Arabidopsis thaliana]
  misc_feature (1)..(77): Homolog of NCBI NO: 7485070 NR Description: hypothetical protein - Arabidopsis thaliana hypothetical protein [Arabidopsis thaliana]
  misc_feature (77)..(148): Homolog of NCBI NO: 7485070 NR Description: hypothetical protein - Arabidopsis thaliana hypothetical protein [Arabidopsis thaliana]
MTAAVSAFVVKVPAVSNFFVSSNAGVALYIFLIILPFLVLCPLRYYHQKHPVNLLLLGLFTVAISFAVGMTCAFTSGKIILEAAILTAVVVISLTAYTFWAAKRGHDFNFLGPFLFAAIMVLMVFSLIQIFFPLGKISVMIYGGLASLIFCGYIIYDTDNVIKRYTYDEYIWAAVSLYLDVINLFLSLLQLLRAADS

SEQ ID NO: 4885 - protein, 128 aa, Zea mays subsp. mays
  peptide (1)..(128): Ceres Seq. ID no. 12407962
  misc_feature (1)..(127): Pfam Name: Uncharacterised protein family UPF0005 Pfam Description: Uncharacterised protein family UPF0005
  misc_feature (1)..(127): Homolog of NCBI NO: 34393841 NR Description: putative z-protein [Oryza sativa (japonica
  misc_feature (1)..(128): Homolog of NCBI NO: 14626300 NR Description: putative receptor-associated protein [Oryza
  misc_feature (1)..(128): Homolog of NCBI NO: 15229411 NR Description: putative protein; protein id: At3g63310.1
  misc_feature (1)..(127): Homolog of NCBI NO: 15218701 NR Description: putative glutamate/aspartate-binding peptide;
  misc_feature (1)..(125): Homolog of NCBI NO: 15235466 NR Description: putative glutamate-/aspartate-binding peptide; id: At4g02690.1 [Arabidopsis thaliana] >gi|7486855|pir||T01080
  misc_feature (1)..(128): Homolog of NCBI NO: 18414455 NR Description: Expressed protein; protein id: At4g15470.1, by cDNA: gi_15215826, supported by cDNA: gi_15810200, supported cDNA: gi_20453266 [Arabidopsis thaliana]
  misc_feature (1)..(128): Homolog of NCBI NO: 34393840 NR Description: putative z-protein [Oryza sativa (japonica
  misc_feature (1)..(88): Homolog of NCBI NO: 15810201 NR Description: AT4g15470/dl3775w [Arabidopsis thaliana]
  misc_feature (8)..(79): Homolog of NCBI NO: 7485070 NR Description: hypothetical protein - Arabidopsis thaliana hypothetical protein [Arabidopsis thaliana]
  misc_feature (1)..(127): Homolog of NCBI NO: 40018604 NR Description: Unknown (protein for MGC:73002) [Rattus >gi|38014718|gb|AAH60596.1| Unknown (protein for MGC:73002)
MTCAFTSGKIILEAAILTAVVVISLTAYTFWAAKRGHDFNFLGPFLFAAIMVLMVFSLIQIFFPLGKISVMIYGGLASLIFCGYIIYDTDNVIKRYTYDEYIWAAVSLYLDVINLFLSLLQLLRAADS

SEQ ID NO: 4886 - DNA, 1474 bp, Zea mays subsp. mays
  misc_feature (1)..(1474): Ceres Seq. ID no. 12352327
  misc_feature: MA Experiment ID: 108504 Result: Up-regulated in Transcription
  misc_feature: MA Experiment 108504 PARAMETER Experiment Name: Zm_Drought_P Parameter: Age (day) Value: 8
  misc_feature: MA Experiment 108504 PARAMETER Experiment Name: Zm_Drought_P Parameter: Organism Value: Zea mays
  misc_feature: MA Experiment 108504 PARAMETER Experiment Name: Zm_Drought_P Parameter: Plant Line Value: 35A19
  misc_feature: MA Experiment 108504 PARAMETER Experiment Name: Zm_Drought_P Parameter: Timepoint (hr) Value: 12
  misc_feature: MA Experiment 108504 PARAMETER Experiment Name: Zm_Drought_P Parameter: Tissue Value: Aerial
  misc_feature: MA Experiment 108504 PARAMETER Experiment Name: Zm_Drought_P Parameter: Treatment Value: Drought vs. No Drought
  misc_feature: MA Experiment ID: 108527 Result: Up-regulated in Transcription
  misc_feature: MA Experiment 108527 PARAMETER Experiment Name: Zm_5mM_NO_P Parameter: Age (day) Value: 8
  misc_feature: MA Experiment 108527 PARAMETER Experiment Name: Zm_5mM_NO_P Parameter: Organism Value: Zea mays
  misc_feature: MA Experiment 108527 PARAMETER Experiment Name: Zm_5mM_NO_P Parameter: Plant Line Value: 35A19
  misc_feature: MA Experiment 108527 PARAMETER Experiment Name: Zm_5mM_NO_P Parameter: Timepoint (hr) Value: 6
  misc_feature: MA Experiment 108527 PARAMETER Experiment Name: Zm_5mM_NO_P Parameter: Tissue Value: Aerial
  misc_feature: MA Experiment 108527 PARAMETER Experiment Name: Zm_5mM_NO_P Parameter: Treatment Value: 5mM NO vs. No Treatment
  misc_feature: MA Experiment ID: 108529 Result: Up-regulated in Transcription
  misc_feature: MA Experiment 108529 PARAMETER Experiment Name: Zm_Imbibed_Seeds_P Parameter: Age (day) Value: 5 vs. 2
  misc_feature: MA Experiment 108529 PARAMETER Experiment Name: Zm_Imbibed_Seeds_P Parameter: Organism Value: Zea mays
  misc_feature: MA Experiment 108529 PARAMETER Experiment Name: Zm_Imbibed_Seeds_P Parameter: Plant Line Value: 35A19
  misc_feature: MA Experiment 108529 PARAMETER Experiment Name: Zm_Imbibed_Seeds_P Parameter: Tissue Value: Roots vs. Embryo
  misc_feature: MA Experiment ID: 108544 Result: Up-regulated in Transcription
  misc_feature: MA Experiment ID: 108556 Result: Up-regulated in Transcription
  misc_feature: MA Experiment 108556 PARAMETER Experiment Name: Zm_Drought_P Parameter: Age (day) Value: 9
  misc_feature: MA Experiment 108556 PARAMETER Experiment Name: Zm_Drought_P Parameter: Organism Value: Zea mays
  misc_feature: MA Experiment 108556 PARAMETER Experiment Name: Zm_Drought_P Parameter: Plant Line Value: 35A19
  misc_feature: MA Experiment 108556 PARAMETER Experiment Name: Zm_Drought_P Parameter: Timepoint (hr) Value: 24
  misc_feature: MA Experiment 108556 PARAMETER Experiment Name: Zm_Drought_P Parameter: Tissue Value: Aerial
  misc_feature: MA Experiment 108556 PARAMETER Experiment Name: Zm_Drought_P Parameter: Treatment Value: Drought vs. No Drought
  misc_feature: MA Experiment ID: 108597 Result: Up-regulated in Transcription
  misc_feature: MA Experiment 108597 PARAMETER Experiment Name: Zm_100uM_ABA_P Parameter: Age (day) Value: 9
  misc_feature: MA Experiment 108597 PARAMETER Experiment Name: Zm_100uM_ABA_P Parameter: Organism Value: Zea mays
  misc_feature: MA Experiment 108597 PARAMETER Experiment Name: Zm_100uM_ABA_P Parameter: Plant Line Value: 35A19
  misc_feature: MA Experiment 108597 PARAMETER Experiment Name: Zm_100uM_ABA_P Parameter: Timepoint (hr) Value: 24
  misc_feature: MA Experiment 108597 PARAMETER Experiment Name: Zm_100uM_ABA_P Parameter: Tissue Value: Aerial
  misc_feature: MA Experiment 108597 PARAMETER Experiment Name: Zm_100uM_ABA_P Parameter: Treatment Value: 100uM ABA vs. No Treatment
  misc_feature: MA Experiment ID: 108689 Result: Up-regulated in Transcription
  misc_feature: MA Experiment 108689 PARAMETER Experiment Name: Zm_Drought_Roots_P Parameter: Age (day) Value: 9
  misc_feature: MA Experiment 108689 PARAMETER Experiment Name: Zm_Drought_Roots_P Parameter: Organism Value: Zea mays
  misc_feature: MA Experiment 108689 PARAMETER Experiment Name: Zm_Drought_Roots_P Parameter: Plant Line Value: 35A19
  misc_feature: MA Experiment 108689 PARAMETER Experiment Name: Zm_Drought_Roots_P Parameter: Timepoint (hr) Value: 24
  misc_feature: MA Experiment 108689 PARAMETER Experiment Name: Zm_Drought_Roots_P Parameter: Tissue Value: Roots
  misc_feature: MA Experiment 108689 PARAMETER Experiment Name: Zm_Drought_Roots_P Parameter: Treatment Value: Drought vs. No Drought
  misc_feature: MA Experiment ID: 20000477 Result: Up-regulated in Transcription
  misc_feature: MA Experiment 20000477 PARAMETER Experiment Name: Zm_5mM_SA_P Parameter: Age (day) Value: 10
  misc_feature: MA Experiment 20000477 PARAMETER Experiment Name: Zm_5mM_SA_P Parameter: Organism Value: Zea mays
  misc_feature: MA Experiment 20000477 PARAMETER Experiment Name: Zm_5mM_SA_P Parameter: Plant Line Value: 35A19
  misc_feature: MA Experiment 20000477 PARAMETER Experiment Name: Zm_5mM_SA_P Parameter: Timepoint (hr) Value: 48
  misc_feature: MA Experiment 20000477 PARAMETER Experiment Name: Zm_5mM_SA_P Parameter: Tissue Value: Aerial
  misc_feature: MA Experiment 20000477 PARAMETER Experiment Name: Zm_5mM_SA_P Parameter: Treatment Value: 5mM SA vs. No Treatment
  misc_feature: MA Experiment ID: 20000478 Result: Up-regulated in Transcription
  misc_feature: MA Experiment 20000478 PARAMETER Experiment Name: Zm_5mM_SA_P Parameter: Age (day) Value: 11
  misc_feature: MA Experiment 20000478 PARAMETER Experiment Name: Zm_5mM_SA_P Parameter: Organism Value: Zea mays
  misc_feature: MA Experiment 20000478 PARAMETER Experiment Name: Zm_5mM_SA_P Parameter: Plant Line Value: 35A19
  misc_feature: MA Experiment 20000478 PARAMETER Experiment Name: Zm_5mM_SA_P Parameter: Timepoint (hr) Value: 72
  misc_feature: MA Experiment 20000478 PARAMETER Experiment Name: Zm_5mM_SA_P Parameter: Tissue Value: Aerial
  misc_feature: MA Experiment 20000478 PARAMETER Experiment Name: Zm_5mM_SA_P Parameter: Treatment Value: 5mM SA vs. No Treatment
  misc_feature: MA Experiment ID: 20000479 Result: Up-regulated in Transcription
  misc_feature: MA Experiment 20000479 PARAMETER Experiment Name: Zm_Drought_P Parameter: Age (day) Value: 10
  misc_feature: MA Experiment 20000479 PARAMETER Experiment Name: Zm_Drought_P Parameter: Organism Value: Zea mays
  misc_feature: MA Experiment 20000479 PARAMETER Experiment Name: Zm_Drought_P Parameter: Plant Line Value: 35A19
  misc_feature: MA Experiment 20000479 PARAMETER Experiment Name: Zm_Drought_P Parameter: Timepoint (hr) Value: 48
  misc_feature: MA Experiment 20000479 PARAMETER Experiment Name: Zm_Drought_P Parameter: Tissue Value: Aerial
  misc_feature: MA Experiment 20000479 PARAMETER Experiment Name: Zm_Drought_P Parameter: Treatment Value: Drought vs. No Drought
  misc_feature: MA Experiment ID: 20000480 Result: Up-regulated in Transcription
  misc_feature: MA Experiment 20000480 PARAMETER Experiment Name: Zm_Drought_P Parameter: Age (day) Value: 11
  misc_feature: MA Experiment 20000480 PARAMETER Experiment Name: Zm_Drought_P Parameter: Organism Value: Zea mays
  misc_feature: MA Experiment 20000480 PARAMETER Experiment Name: Zm_Drought_P Parameter: Plant Line Value: 35A19
  misc_feature: MA Experiment 20000480 PARAMETER Experiment Name: Zm_Drought_P Parameter: Timepoint (hr) Value: 72
  misc_feature: MA Experiment 20000480 PARAMETER Experiment Name: Zm_Drought_P Parameter: Tissue Value: Aerial
  misc_feature: MA Experiment 20000480 PARAMETER Experiment Name: Zm_Drought_P Parameter: Treatment Value: Drought vs. No Drought
  misc_feature: MA Experiment ID: 20000487 Result: Down-regulated in Transcription
  misc_feature: MA Experiment 20000487 PARAMETER Experiment Name: Zm_50mM_NH4NO3_L_to_H_P Parameter: Organism Value: Zea mays
  misc_feature: MA Experiment 20000487 PARAMETER Experiment Name: Zm_50mM_NH4NO3_L_to_H_P Parameter: Timepoint (hr) Value: 4
  misc_feature: MA Experiment 20000487 PARAMETER Experiment Name: Zm_50mM_NH4NO3_L_to_H_P Parameter: Tissue Value: Leaves
  misc_feature: MA Experiment 20000487 PARAMETER Experiment Name: Zm_50mM_NH4NO3_L_to_H_P Parameter: Treatment Value: 50mM NH4NO3 vs. 100mM Mannitol
  misc_feature: MA Experiment ID: 20000488 Result: Down-regulated in Transcription
  misc_feature: MA Experiment 20000488 PARAMETER Experiment Name: Zm_50mM_NH4NO3_L_to_H_P Parameter: Organism Value: Zea mays
  misc_feature: MA Experiment 20000488 PARAMETER Experiment Name: Zm_50mM_NH4NO3_L_to_H_P Parameter: Timepoint (hr) Value: 8
  misc_feature: MA Experiment 20000488 PARAMETER Experiment Name: Zm_50mM_NH4NO3_L_to_H_P Parameter: Tissue Value: Leaves
  misc_feature: MA Experiment 20000488 PARAMETER Experiment Name: Zm_50mM_NH4NO3_L_to_H_P Parameter: Treatment Value: 50mM NH4NO3 vs. 100mM Mannitol
  misc_feature: MA Experiment ID: 20000535 Result: Down-regulated in Transcription
  misc_feature: MA Experiment 20000535 PARAMETER Experiment Name: Zm_Hybrid_Seed_Dev_P Parameter: DAP Value: 30 vs. 12
  misc_feature: MA Experiment 20000535 PARAMETER Experiment Name: Zm_Hybrid_Seed_Dev_P Parameter: Organism Value: Zea mays
  misc_feature: MA Experiment 20000535 PARAMETER Experiment Name: Zm_Hybrid_Seed_Dev_P Parameter: Plant Line Value: 35A19
  misc_feature: MA Experiment 20000535 PARAMETER Experiment Name: Zm_Hybrid_Seed_Dev_P Parameter: Tissue Value: Embryo vs. Unfert Floret
  misc_feature: MA Experiment ID: 20000626 Result: Up-regulated in Transcription
  misc_feature: MA Experiment 20000626 PARAMETER Experiment Name: Zm_Herbicide-Treatments_P Parameter: Timepoint (hr) Value: 12
  misc_feature: MA Experiment 20000626 PARAMETER Experiment Name: Zm_Herbicide-Treatments_P Parameter: Tissue Value: Aerial
  misc_feature: MA Experiment 20000626 PARAMETER Experiment Name: Zm_Herbicide-Treatments_P Parameter: Treatment Value: Roundup vs. No Treatment
agaaatcctccttcaagatggtcgttttgggccaacaacgtacgactcctcccacaggggggctgctgccggagaaatccgtgcaggagcagaactcagtctcatcatcttcctccacccgacagatgattggaggaggtatccagtggtggagcaggtccctgtgggtcaagtccagggcgtggatccggaaccccatgaacatggccctgtccgtctggatcctggccgtcggcgtctcgggcgccatcctcttcatggtgatgacggggatgctcaaccgcgtgctgccaagcaagccgcggagggacacgtggttcgaggtgaacaaccagatcctgaacgcgctcttcaccctcatgtgcctgtaccagcacccgaggaggttctaccacctggccctcgtgtgccgctggaaggccggcgacatgcaccagctccgccaagcgtactgcaaggacggggcctgcaagcccaacgagaggaagcacatgacggctgtcatcctgctgctccacctcaactgctttgctcagtacgcgctctgtggcctcaaccttggctaccggaggccccggcgtccggtggtcggtgtcgccctcaccgtagcggtcgccatctgcgcgccggccgtcgctgggatgtacaacaacctcagtcctctcgggagagactacgaggcgccggcgccggcggaggggatgataataagtgaggaagagtcgcagctccagcgcaaaacgcccgacaccgagaggcgctactcgttggtgccacggcaaggacaaggagaagaaccgcagtgggtcggcgggctgtgggaggacctgtgggacgacatgtcgctggcgtacctgtcgctgttctgcagctgctgcgtgttcgggtggaacgcgagcaggctcggcttgggcaacatgtacgtccacgtcgccaccttcgtgctcctgtgcctggcgcccttcttcatcttggacctggcggccatcaacgtggacgacgaggcggtcagggacgcgctggggctggccggcatcttcctctgcgtgttcggcctgctctacggcggattctggaggatccagatgcgcaggcggttcggcctccccgagaaccgcgcctgctgcggcaagccggacctcaccgactgcctactgtggctctgctgctacccgtgctcgctagcgcaggaggtccgtacggcagacgcctacgaggtggtggtgctgctggacacgccgatgcatcgccatccgactctgcaggaagagctggccacgatgcaggagccaccagatgaagaagaaggaggcggtgtcatccccccttcgacagtgtcagctacacgctcataagcagtacccaacatgtacaggatgagcagtttcaatttcaacatcaggtggtcatttcaatgtatccatgcagccgctgaatatcatcattaaaaaaagcagcaaaaacagccttctct

SEQ ID NO: 4887 - protein, 450 aa, Zea mays subsp. mays
  peptide (1)..(450): Ceres Seq. ID no. 12352328
  misc_feature (265)..(402): Pfam Name: Protein of unknown function, DUF614 Pfam Description: Protein of unknown function, DUF614
  misc_feature (31)..(407): Homolog of NCBI NO: 17064778 NR Description: Unknown protein [Arabidopsis thaliana]
  misc_feature (22)..(407): Homolog of NCBI NO: 15239077 NR Description: putative protein; protein id: At5g05350.1
  misc_feature (50)..(406): Homolog of NCBI NO: 34907898 NR Description: P0439E11.13 [Oryza sativa (japonica
  misc_feature (22)..(278): Homolog of NCBI NO: 10176747 NR Description: gb|AAF01523.1~gene_id:K18I23.15~strong similarity
  misc_feature (31)..(268): Homolog of NCBI NO: 15228414 NR Description: unknown protein; protein id: At3g10980.1 thaliana] >gi|6016696|gb|AAF01523.1|AC009991_19 unknown protein
KSSFKMVVLGQQRTTPPTGGLLPEKSVQEQNSVSSSSSTRQMIGGGIQWWSRSLWVKSRAWIRNPMNMALSVWILAVGVSGAILFMVMTGMLNRVLPSKPRRDTWFEVNNQILNALFTLMCLYQHPRRFYHLALVCRWKAGDMHQLRQAYCKDGACKPNERKHMTAVILLLHLNCFAQYALCGLNLGYRRPRRPVVGVALTVAVAICAPAVAGMYNNLSPLGRDYEAPAPAEGMIISEEESQLQRKTPDTERRYSLVPRQGQGEEPQWVGGLWEDLWDDMSLAYLSLFCSCCVFGWNASRLGLGNMYVHVATFVLLCLAPFFILDLAAINVDDEAVRDALGLAGIFLCVFGLLYGGFWRIQMRRRFGLPENRACCGKPDLTDCLLWLCCYPCSLAQEVRTADAYEVVVLLDTPMHRHPTLQEELATMQEPPDEEEGGGVIPPSTVSATRS

SEQ ID NO: 4888 - protein, 445 aa, Zea mays subsp. mays
  peptide (1)..(445): Ceres Seq. ID no. 12352329
  misc_feature (260)..(397): Pfam Name: Protein of unknown function, DUF614 Pfam Description: Protein of unknown function, DUF614
  misc_feature (26)..(402): Homolog of NCBI NO: 17064778 NR Description: Unknown protein [Arabidopsis thaliana]
  misc_feature (17)..(402): Homolog of NCBI NO: 15239077 NR Description: putative protein; protein id: At5g05350.1
  misc_feature (45)..(401): Homolog of NCBI NO: 34907898 NR Description: P0439E11.13 [Oryza sativa (japonica
  misc_feature (17)..(273): Homolog of NCBI NO: 10176747 NR Description: gb|AAF01523.1~gene_id:K18I23.15~strong similarity
  misc_feature (26)..(263): Homolog of NCBI NO: 15228414 NR Description: unknown protein; protein id: At3g10980.1 thaliana] >gi|6016696|gb|AAF01523.1|AC009991_19 unknown protein
MVVLGQQRTTPPTGGLLPEKSVQEQNSVSSSSSTRQMIGGGIQWWSRSLWVKSRAWIRNPMNMALSVWILAVGVSGAILFMVMTGMLNRVLPSKPRRDTWFEVNNQILNALFTLMCLYQHPRRFYHLALVCRWKAGDMHQLRQAYCKDGACKPNERKHMTAVILLLHLNCFAQYALCGLNLGYRRPRRPVVGVALTVAVAICAPAVAGMYNNLSPLGRDYEAPAPAEGMIISEEESQLQRKTPDTERRYSLVPRQGQGEEPQWVGGLWEDLWDDMSLAYLSLFCSCCVFGWNASRLGLGNMYVHVATFVLLCLAPFFILDLAAINVDDEAVRDALGLAGIFLCVFGLLYGGFWRIQMRRRFGLPENRACCGKPDLTDCLLWLCCYPCSLAQEVRTADAYEVVVLLDTPMHRHPTLQEELATMQEPPDEEEGGGVIPPSTVSATRS

SEQ ID NO: 4889 - protein, 409 aa, Zea mays subsp. mays
  peptide (1)..(409): Ceres Seq. ID no. 12352330
  misc_feature (224)..(361): Pfam Name: Protein of unknown function, DUF614 Pfam Description: Protein of unknown function, DUF614
  misc_feature (1)..(366): Homolog of NCBI NO: 17064778 NR Description: Unknown protein [Arabidopsis thaliana]
  misc_feature (1)..(366): Homolog of NCBI NO: 15239077 NR Description: putative protein; protein id: At5g05350.1
  misc_feature (9)..(365): Homolog of NCBI NO: 34907898 NR Description: P0439E11.13 [Oryza sativa (japonica
  misc_feature (1)..(237): Homolog of NCBI NO: 10176747 NR Description: gb|AAF01523.1~gene_id:K18I23.15~strong similarity
  misc_feature (1)..(227): Homolog of NCBI NO: 15228414 NR Description: unknown protein; protein id: At3g10980.1 thaliana] >gi|6016696|gb|AAF01523.1|AC009991_19 unknown protein
MIGGGIQWWSRSLWVKSRAWIRNPMNMALSVWILAVGVSGAILFMVMTGMLNRVLPSKPRRDTWFEVNNQILNALFTLMCLYQHPRRFYHLALVCRWKAGDMHQLRQAYCKDGACKPNERKHMTAVILLLHLNCFAQYALCGLNLGYRRPRRPVVGVALTVAVAICAPAVAGMYNNLSPLGRDYEAPAPAEGMIISEEESQLQRKTPDTERRYSLVPRQGQGEEPQWVGGLWEDLWDDMSLAYLSLFCSCCVFGWNASRLGLGNMYVHVATFVLLCLAPFFILDLAAINVDDEAVRDALGLAGIFLCVFGLLYGGFWRIQMRRRFGLPENRACCGKPDLTDCLLWLCCYPCSLAQEVRTADAYEVVVLLDTPMHRHPTLQEELATMQEPPDEEEGGGVIPPSTVSATRS

SEQ ID NO: 4890 - DNA, 1531 bp, Zea mays subsp. mays
  misc_feature (1)..(1531): Ceres Seq. ID no. 13498310
  misc_feature: MA Experiment ID: 108504 Result: Up-regulated in Transcription
  misc_feature: MA Experiment 108504 PARAMETER Experiment Name: Zm_Drought_P Parameter: Age (day) Value: 8
  misc_feature: MA Experiment 108504 PARAMETER Experiment Name: Zm_Drought_P Parameter: Organism Value: Zea mays
  misc_feature: MA Experiment 108504 PARAMETER Experiment Name: Zm_Drought_P Parameter: Plant Line Value: 35A19
  misc_feature: MA Experiment 108504 PARAMETER Experiment Name: Zm_Drought_P Parameter: Timepoint (hr) Value: 12
  misc_feature: MA Experiment 108504 PARAMETER Experiment Name: Zm_Drought_P Parameter: Tissue Value: Aerial
  misc_feature: MA Experiment 108504 PARAMETER Experiment Name: Zm_Drought_P Parameter: Treatment Value: Drought vs. No Drought
  misc_feature: MA Experiment ID: 108527 Result: Up-regulated in Transcription
  misc_feature: MA Experiment 108527 PARAMETER Experiment Name: Zm_5mM_NO_P Parameter: Age (day) Value: 8
  misc_feature: MA Experiment 108527 PARAMETER Experiment Name: Zm_5mM_NO_P Parameter: Organism Value: Zea mays
  misc_feature: MA Experiment 108527 PARAMETER Experiment Name: Zm_5mM_NO_P Parameter: Plant Line Value: 35A19
  misc_feature: MA Experiment 108527 PARAMETER Experiment Name: Zm_5mM_NO_P Parameter: Timepoint (hr) Value: 6
  misc_feature: MA Experiment 108527 PARAMETER Experiment Name: Zm_5mM_NO_P Parameter: Tissue Value: Aerial
  misc_feature: MA Experiment 108527 PARAMETER Experiment Name: Zm_5mM_NO_P Parameter: Treatment Value: 5mM NO vs. No Treatment
  misc_feature: MA Experiment ID: 108540 Result: Up-regulated in Transcription
  misc_feature: MA Experiment 108540 PARAMETER Experiment Name: Zm_20percent_PEG_P Parameter: Age (day) Value: 8
  misc_feature: MA Experiment 108540 PARAMETER Experiment Name: Zm_20percent_PEG_P Parameter: Organism Value: Zea mays
  misc_feature: MA Experiment 108540 PARAMETER Experiment Name: Zm_20percent_PEG_P Parameter: Plant Line Value: 35A19
  misc_feature: MA Experiment 108540 PARAMETER Experiment Name: Zm_20percent_PEG_P Parameter: Timepoint (hr) Value: 6
  misc_feature: MA Experiment 108540 PARAMETER Experiment Name: Zm_20percent_PEG_P Parameter: Tissue Value: Aerial
  misc_feature: MA Experiment 108540 PARAMETER Experiment Name: Zm_20percent_PEG_P Parameter: Treatment Value: 20percent PEG vs. No Treatment
  misc_feature: MA Experiment ID: 108543 Result: Down-regulated in Transcription
  misc_feature: MA Experiment ID: 108544 Result: Down-regulated in Transcription
  misc_feature: MA Experiment ID: 108548 Result: Down-regulated in Transcription
  misc_feature: MA Experiment 108548 PARAMETER Experiment Name: Zm_20uM_KNO3_H-to-L_P Parameter: Age (day) Value: 11
  misc_feature: MA Experiment 108548 PARAMETER Experiment Name: Zm_20uM_KNO3_H-to-L_P Parameter: Organism Value: Zea mays
  misc_feature: MA Experiment 108548 PARAMETER Experiment Name: Zm_20uM_KNO3_H-to-L_P Parameter: Plant Line Value: 35A19
  misc_feature: MA Experiment 108548 PARAMETER Experiment Name: Zm_20uM_KNO3_H-to-L_P Parameter: Timepoint (hr) Value: 4
  misc_feature: MA Experiment 108548 PARAMETER Experiment Name: Zm_20uM_KNO3_H-to-L_P Parameter: Tissue Value: Roots
  misc_feature: MA Experiment 108548 PARAMETER Experiment Name: Zm_20uM_KNO3_H-to-L_P Parameter: Treatment Value: 20uM KNO3 vs. 60mM KNO3
  misc_feature: MA Experiment ID: 108556 Result: Up-regulated in Transcription
  misc_feature: MA Experiment 108556 PARAMETER Experiment Name: Zm_Drought_P Parameter: Age (day) Value: 9
  misc_feature: MA Experiment 108556 PARAMETER Experiment Name: Zm_Drought_P Parameter: Organism Value: Zea mays
  misc_feature: MA Experiment 108556 PARAMETER Experiment Name: Zm_Drought_P Parameter: Plant Line Value: 35A19
  misc_feature: MA Experiment 108556 PARAMETER Experiment Name: Zm_Drought_P Parameter: Timepoint (hr) Value: 24
  misc_feature: MA Experiment 108556 PARAMETER Experiment Name: Zm_Drought_P Parameter: Tissue Value: Aerial
  misc_feature: MA Experiment 108556 PARAMETER Experiment Name: Zm_Drought_P Parameter: Treatment Value: Drought vs. No Drought
  misc_feature: MA Experiment ID: 108597 Result: Up-regulated in Transcription
  misc_feature: MA Experiment 108597 PARAMETER Experiment Name: Zm_100uM_ABA_P Parameter: Age (day) Value: 9
  misc_feature: MA Experiment 108597 PARAMETER Experiment Name: Zm_100uM_ABA_P Parameter: Organism Value: Zea mays
  misc_feature: MA Experiment 108597 PARAMETER Experiment Name: Zm_100uM_ABA_P Parameter: Plant Line Value: 35A19
  misc_feature: MA Experiment 108597 PARAMETER Experiment Name: Zm_100uM_ABA_P Parameter: Timepoint (hr) Value: 24
  misc_feature: MA Experiment 108597 PARAMETER Experiment Name: Zm_100uM_ABA_P Parameter: Tissue Value: Aerial
  misc_feature: MA Experiment 108597 PARAMETER Experiment Name: Zm_100uM_ABA_P Parameter: Treatment Value: 100uM ABA vs. No Treatment
  misc_feature: MA Experiment ID: 108687 Result: Up-regulated in Transcription
  misc_feature: MA Experiment 108687 PARAMETER Experiment Name: Zm_Embryos-Flowers__P Parameter: Tissue Value: Embryo vs. Aerial+
  misc_feature: MA Experiment ID: 108688 Result: Down-regulated in Transcription
  misc_feature: MA Experiment 108688 PARAMETER Experiment Name: Zm_Embryos-Flowers__P Parameter: Tissue Value: Immature Flowers vs. Aerial+
  misc_feature: MA Experiment ID: 108689 Result: Up-regulated in Transcription
  misc_feature: MA Experiment 108689 PARAMETER Experiment Name: Zm_Drought_Roots_P Parameter: Age (day) Value: 9
  misc_feature: MA Experiment 108689 PARAMETER Experiment Name: Zm_Drought_Roots_P Parameter: Organism Value: Zea mays
  misc_feature: MA Experiment 108689 PARAMETER Experiment Name: Zm_Drought_Roots_P Parameter: Plant Line Value: 35A19
  misc_feature: MA Experiment 108689 PARAMETER Experiment Name: Zm_Drought_Roots_P Parameter: Timepoint (hr) Value: 24
  misc_feature: MA Experiment 108689 PARAMETER Experiment Name: Zm_Drought_Roots_P Parameter: Tissue Value: Roots
  misc_feature: MA Experiment 108689 PARAMETER Experiment Name: Zm_Drought_Roots_P Parameter: Treatment Value: Drought vs. No Drought
  misc_feature: MA Experiment ID: 20000477 Result: Up-regulated in Transcription
  misc_feature: MA Experiment 20000477 PARAMETER Experiment Name: Zm_5mM_SA_P Parameter: Age (day) Value: 10
  misc_feature: MA Experiment 20000477 PARAMETER Experiment Name: Zm_5mM_SA_P Parameter: Organism Value: Zea mays
  misc_feature: MA Experiment 20000477 PARAMETER Experiment Name: Zm_5mM_SA_P Parameter: Plant Line Value: 35A19
  misc_feature: MA Experiment 20000477 PARAMETER Experiment Name: Zm_5mM_SA_P Parameter: Timepoint (hr) Value: 48
  misc_feature: MA Experiment 20000477 PARAMETER Experiment Name: Zm_5mM_SA_P Parameter: Tissue Value: Aerial
  misc_feature: MA Experiment 20000477 PARAMETER Experiment Name: Zm_5mM_SA_P Parameter: Treatment Value: 5mM SA vs. No Treatment
  misc_feature: MA Experiment ID: 20000478 Result: Up-regulated in Transcription
  misc_feature: MA Experiment 20000478 PARAMETER Experiment Name: Zm_5mM_SA_P Parameter: Age (day) Value: 11
  misc_feature: MA Experiment 20000478 PARAMETER Experiment Name: Zm_5mM_SA_P Parameter: Organism Value: Zea mays
  misc_feature: MA Experiment 20000478 PARAMETER Experiment Name: Zm_5mM_SA_P Parameter: Plant Line Value: 35A19
  misc_feature: MA Experiment 20000478 PARAMETER Experiment Name: Zm_5mM_SA_P Parameter: Timepoint (hr) Value: 72
  misc_feature: MA Experiment 20000478 PARAMETER Experiment Name: Zm_5mM_SA_P Parameter: Tissue Value: Aerial
  misc_feature: MA Experiment 20000478 PARAMETER Experiment Name: Zm_5mM_SA_P Parameter: Treatment Value: 5mM SA vs. No Treatment
  misc_feature: MA Experiment ID: 20000479 Result: Up-regulated in Transcription
  misc_feature: MA Experiment 20000479 PARAMETER Experiment Name: Zm_Drought_P Parameter: Age (day) Value: 10
  misc_feature: MA Experiment 20000479 PARAMETER Experiment Name: Zm_Drought_P Parameter: Organism Value: Zea mays
  misc_feature: MA Experiment 20000479 PARAMETER Experiment Name: Zm_Drought_P Parameter: Plant Line Value: 35A19
  misc_feature: MA Experiment 20000479 PARAMETER Experiment Name: Zm_Drought_P Parameter: Timepoint (hr) Value: 48
  misc_feature: MA Experiment 20000479 PARAMETER Experiment Name: Zm_Drought_P Parameter: Tissue Value: Aerial
  misc_feature: MA Experiment 20000479 PARAMETER Experiment Name: Zm_Drought_P Parameter: Treatment Value: Drought vs. No Drought
ctctcaactctcgtttcgccggagtatttagcttgcttcagggagcacgtggcggtggaagcttccctaggggtggcggaggcggtggtggtgcttggttgatgtcgatnnnncgcaggtctgctgtgactcggccgtagcggcgacggcggcaccggtggttggtgcggaggcggaggccagggccagggcgcgcgccgagaggcggagccgggccggagagtctggggcgtggaagcacgcggtggccgctggcacggccgatgctacgaggaagcggagtctcggggcaggggagctgctggtggcgcggaagcacggggcggcgtcggtggccggccgcaggagggagatggaggatgccgtgtccgtgcgcgacgcgttctgcgcggagggcacggccgacggcgggaggcgcgacttctacggagtgttcgacggccacggctgctcgcacgtggccgaggcgtgccgggaccggatgcacgagctggtcgccgaggagctcgccgccaccgccgccgacagctcagtctccgcggcggcggcctggaccgtggcgatggaacgcagcttcgcgcggatggacgccgaggtgacgtcngccggcgggcgcgccgnnnncnncagaagcagcacctgccgctgcgacgcgcacaggtgcgaccacgtgggctccacggccgtggtggccgtcnnggangagcacagcgtcattgtggccaactgcggcgacagccgcgccgtgctctgccgtggggacggcgcgccgccgctgccgctgtcgtcggaccacaagcccgaccgccccgacgagctggagcgcatcgagtccgccggcgggcgcgtcatcttctgggagggcgcgcgcgttctgggcgtcctcgccatgtcccgcgccgtcggggacggatacctgaagccgtacgtgtcgtccgttcccgaggtgacggtgaccgaccggtccgacggcgacgagtgcctcatcctgggcagcgacgggctctgggacgtggtgagcaacgaggccgcgtgcgaggtggcgcgcgcctgcctccgcaggggccgggccaagtggtgtgccgaggccgccgcgttgctcaccaagctggccctcgcgaggagaagctccgacaacgtctcggtggtcgtcatcgatctccggaggaggaatcactagttctgtgcagttgtcagctagtactagtactccctccgaaggatggctggtcgcacaagggatttcgcgggggtgcctaattgggttttttttcttccattttcattcaaaaagtttttttttttttttgctgtactctccctgaatcaaaaagttcagaggagcccttagattaattattgtggtagagccggaatttggtccggataccattcggagaggtggtcgcgtagaaaaaactcagaggagagacggtctcacaagaaaatcagtctgtgtattgtatcatctagacatctaatgaaatagcaaccgaaacaaacaccacctccggtgtctggatgttctcgc

SEQ ID NO: 4891 - protein, 275 aa, Zea mays subsp. mays
  peptide (1)..(275): Ceres Seq. ID no. 13498311
  misc_feature (1)..(234): Pfam Name: Protein phosphatase 2C Pfam Description: Protein phosphatase 2C
  misc_feature (1)..(239): Homolog of NCBI NO: 34902050 NR Description: putative Serine/threonine phosphatases [Oryza
  misc_feature (241)..(273): Homolog of NCBI NO: 34902050 NR Description: putative Serine/threonine phosphatases [Oryza
  misc_feature (1)..(234): Homolog of NCBI NO: 34908256 NR Description: putative protein phosphatase 2C [Oryza sativa
  misc_feature (224)..(272): Homolog of NCBI NO: 34908256 NR Description: putative protein phosphatase 2C [Oryza sativa
  misc_feature (1)..(272): Homolog of NCBI NO: 15227078 NR Description: protein phosphatase 2C (PP2C), putative
  misc_feature (1)..(241): Homolog of NCBI NO: 15222398 NR Description: protein phosphatase 2C (PP2C), putative
  misc_feature (236)..(273): Homolog of NCBI NO: 15222398 NR Description: protein phosphatase 2C (PP2C), putative
  misc_feature (1)..(236): Homolog of NCBI NO: 10432446 NR Description: protein phosphatase 2C [Nicotiana tabacum]
  misc_feature (243)..(272): Homolog of NCBI NO: 10432446 NR Description: protein phosphatase 2C [Nicotiana tabacum]
  misc_feature (1)..(236): Homolog of NCBI NO: 7768151 NR Description: protein phpsphatase 2C (PP2C) [Fagus sylvatica]
  misc_feature (84)..(84): Xaa is any aa, unknown or other
  misc_feature (90)..(90): Xaa is any aa, unknown or other
  misc_feature (91)..(91): Xaa is any aa, unknown or other
  misc_feature (92)..(92): Xaa is any aa, unknown or other
  misc_feature (116)..(116): Xaa is any aa, unknown or other
  misc_feature (117)..(117): Xaa is any aa, unknown or other
MEDAVSVRDAFCAEGTADGGRRDFYGVFDGHGCSHVAEACRDRMHELVAEELAATAADSSVSAAAAWTVAMERSFARMDAEVTXAGGRAXXXRSSTCRCDAHRCDHVGSTAVVAVXXEHSVIVANCGDSRAVLCRGDGAPPLPLSSDHKPDRPDELERIESAGGRVIFWEGARVLGVLAMSRAVGDGYLKPYVSSVPEVTVTDRSDGDECLILGSDGLWDVVSNEAACEVARACLRRGRAKWCAEAAALLTKLALARRSSDNVSVVVIDLRRRNH

SEQ ID NO: 4892 - protein, 232 aa, Zea mays subsp. mays
  peptide (1)..(232): Ceres Seq. ID no. 13498312
  misc_feature (1)..(191): Pfam Name: Protein phosphatase 2C Pfam Description: Protein phosphatase 2C
  misc_feature (1)..(196): Homolog of NCBI NO: 34902050 NR Description: putative Serine/threonine phosphatases [Oryza
  misc_feature (198)..(230): Homolog of NCBI NO: 34902050 NR Description: putative Serine/threonine phosphatases [Oryza
  misc_feature (1)..(191): Homolog of NCBI NO: 34908256 NR Description: putative protein phosphatase 2C [Oryza sativa
  misc_feature (181)..(229): Homolog of NCBI NO: 34908256 NR Description: putative protein phosphatase 2C [Oryza sativa
  misc_feature (1)..(229): Homolog of NCBI NO: 15227078 NR Description: protein phosphatase 2C (PP2C), putative
  misc_feature (1)..(198): Homolog of NCBI NO: 15222398 NR Description: protein phosphatase 2C (PP2C), putative
  misc_feature (193)..(230): Homolog of NCBI NO: 15222398 NR Description: protein phosphatase 2C (PP2C), putative
  misc_feature (1)..(193): Homolog of NCBI NO: 10432446 NR Description: protein phosphatase 2C [Nicotiana tabacum]
  misc_feature (200)..(229): Homolog of NCBI NO: 10432446 NR Description: protein phosphatase 2C [Nicotiana tabacum]
  misc_feature (1)..(193): Homolog of NCBI NO: 7768151 NR Description: protein phpsphatase 2C (PP2C) [Fagus sylvatica]
  misc_feature (41)..(41): Xaa is any aa, unknown or other
  misc_feature (47)..(47): Xaa is any aa, unknown or other
  misc_feature (48)..(48): Xaa is any aa, unknown or other
  misc_feature (49)..(49): Xaa is any aa, unknown or other
  misc_feature (73)..(73): Xaa is any aa, unknown or other
  misc_feature (74)..(74): Xaa is any aa, unknown or other
MHELVAEELAATAADSSVSAAAAWTVAMERSFARMDAEVTXAGGRAXXXRSSTCRCDAHRCDHVGSTAVVAVXXEHSVIVANCGDSRAVLCRGDGAPPLPLSSDHKPDRPDELERIESAGGRVIFWEGARVLGVLAMSRAVGDGYLKPYVSSVPEVTVTDRSDGDECLILGSDGLWDVVSNEAACEVARACLRRGRAKWCAEAAALLTKLALARRSSDNVSVVVIDLRRRNH

SEQ ID NO: 4893 - protein, 205 aa, Zea mays subsp. mays
  peptide (1)..(205): Ceres Seq. ID no. 13498313
  misc_feature (1)..(164): Pfam Name: Protein phosphatase 2C Pfam Description: Protein phosphatase 2C
  misc_feature (1)..(169): Homolog of NCBI NO: 34902050 NR Description: putative Serine/threonine phosphatases [Oryza
  misc_feature (171)..(203): Homolog of NCBI NO: 34902050 NR Description: putative Serine/threonine phosphatases [Oryza
  misc_feature (1)..(164): Homolog of NCBI NO: 34908256 NR Description: putative protein phosphatase 2C [Oryza sativa
  misc_feature (154)..(202): Homolog of NCBI NO: 34908256 NR Description: putative protein phosphatase 2C [Oryza sativa
  misc_feature (1)..(202): Homolog of NCBI NO: 15227078 NR Description: protein phosphatase 2C (PP2C), putative
  misc_feature (1)..(171): Homolog of NCBI NO: 15222398 NR Description: protein phosphatase 2C (PP2C), putative
  misc_feature (166)..(203): Homolog of NCBI NO: 15222398 NR Description: protein phosphatase 2C (PP2C), putative
  misc_feature (1)..(166): Homolog of NCBI NO: 10432446 NR Description: protein phosphatase 2C [Nicotiana tabacum]
  misc_feature (173)..(202): Homolog of NCBI NO: 10432446 NR Description: protein phosphatase 2C [Nicotiana tabacum]
  misc_feature (1)..(166): Homolog of NCBI NO: 7768151 NR Description: protein phpsphatase 2C (PP2C) [Fagus sylvatica]
  misc_feature (14)..(14): Xaa is any aa, unknown or other
  misc_feature (20)..(20): Xaa is any aa, unknown or other
  misc_feature (21)..(21): Xaa is any aa, unknown or other
  misc_feature (22)..(22): Xaa is any aa, unknown or other
  misc_feature (46)..(46): Xaa is any aa, unknown or other
  misc_feature (47)..(47): Xaa is any aa, unknown or other
MERSFARMDAEVTXAGGRAXXXRSSTCRCDAHRCDHVGSTAVVAVXXEHSVIVANCGDSRAVLCRGDGAPPLPLSSDHKPDRPDELERIESAGGRVIFWEGARVLGVLAMSRAVGDGYLKPYVSSVPEVTVTDRSDGDECLILGSDGLWDVVSNEAACEVARACLRRGRAKWCAEAAALLTKLALARRSSDNVSVVVIDLRRRNH

SEQ ID NO: 4894 - DNA, 1203 bp, Zea mays subsp. mays
  misc_feature (1)..(1203): Ceres Seq. ID no. 12409796
  misc_feature: MA Experiment ID: 108529 Result: Up-regulated in Transcription
  misc_feature: MA Experiment 108529 PARAMETER Experiment Name: Zm_Imbibed_Seeds_P Parameter: Age (day) Value: 5 vs. 2
  misc_feature: MA Experiment 108529 PARAMETER Experiment Name: Zm_Imbibed_Seeds_P Parameter: Organism Value: Zea mays
  misc_feature: MA Experiment 108529 PARAMETER Experiment Name: Zm_Imbibed_Seeds_P Parameter: Plant Line Value: 35A19
  misc_feature: MA Experiment 108529 PARAMETER Experiment Name: Zm_Imbibed_Seeds_P Parameter: Tissue Value: Roots vs. Embryo
  misc_feature: MA Experiment ID: 108535 Result: Down-regulated in Transcription
  misc_feature: MA Experiment 108535 PARAMETER Experiment Name: Zm_Meristem_P Parameter: Age (day) Value: 8
  misc_feature: MA Experiment 108535 PARAMETER Experiment Name: Zm_Meristem_P Parameter: Organism Value: Zea mays
  misc_feature: MA Experiment 108535 PARAMETER Experiment Name: Zm_Meristem_P Parameter: Plant Line Value: 35A19
  misc_feature: MA Experiment 108535 PARAMETER Experiment Name: Zm_Meristem_P Parameter: Tissue Value: Root Meristem vs. Above Root Meristem
agcttgattctctctggctggtacgcggtagcctcgctctctctcctacctacacggctacacttaaacggcagcaggcacctgcaggcagggagagctgctaacggaccgatcggggagctgctggccatggagcctggtccggatgcgcccgctggtggtggtggcggaggaggaaccagtattagtgagccagcagaggccgggccgtcgccgtcgtcgtcctcggccgccgcagcagcctcgtcgtcgagccggcagcaggcagagcaggaagcacagcagcaacaaggagcacagcagagggaacagccagcagtaagggcccaggcgcagccgcagccgcagccgcatcagcagcagcctccggcggggctcagccggtacgagtcgcagaagcgccgggactggaacacgttcctgcagtacctgcggaaccacaagccgccgctgacgctggcacgctgcagcggcgcacacgtcatcgagttcctccgctacctggaccagttcggcaagacgaaggtgcacgctgagggctgcgcctacttcgggcagccgaacccgccggcgccctgcacgtgcccgctgcgccaggcctggggtagcctcgacgcgctcatcggccgcctccgcgccgcgtacgaggagtccggcggccgccccgagtccaacccgttcgcggccaaggccgtgcgcatctacctccgcgacgtgcgggaggcgcaggccaaggcccgcggcatcccgtacgagaagaagaagcggaagcgcgggagcgccgccgcgcctccggtcgcgccgcctcctgttgtgactgcagaggccgccgggacgtcgtcaggggccggcggtggtgatgacgaggacgacgacgaaccaccgccatctgcagatgaaccacgacgacagcagaccgccgcgccgactcctcctcctcctgcaagtatgatttccagcactagtgcaagcagtagcagtgtcgccccagtcacgacgacgacgacgacaagcaaggagaaagaaggatccgcgccaagctcgtgataagtttgtagatcatctactagccttctgattcaattctatcatcgccggcctccaaattataatcccaaccgcctccatcttaaatttttagttgctcactattactatatattgttattgtttactggcatatataagagagaggtctaaggg

SEQ ID NO: 4895 - protein, 348 aa, Zea mays subsp. mays
  peptide (1)..(348): Ceres Seq. ID no. 12409797
  misc_feature (121)..(242): Pfam Name: Protein of unknown function (DUF640) Pfam Description: Protein of unknown function (DUF640)
  misc_feature (121)..(286): Homolog of NCBI NO: 34907938 NR Description: B1088C09.17 [Oryza sativa (japonica
  misc_feature (122)..(287): Homolog of NCBI NO: 18390725 NR Description: expressed protein; protein id: At1g07090.1, by cDNA: 28780. [Arabidopsis thaliana] >gi|25341953|pir||G86205
  misc_feature (127)..(267): Homolog of NCBI NO: 15237680 NR Description: putative protein; protein id: At5g58500.1 thaliana] >gi|10177027|dbj|BAB10265.1|
  misc_feature (124)..(296): Homolog of NCBI NO: 37535384 NR Description: hypothetical protein [Oryza sativa (japonica group)] >gi|10140752|gb|AAG13584.1| hypothetical protein [Oryza >gi|31432676|gb|AAP54281.1| hypothetical protein [Oryza sativa
  misc_feature (114)..(258): Homolog of NCBI NO: 18402578 NR Description: expressed protein; protein id: At2g31160.1, by cDNA: gi_15912210, supported by cDNA: gi_19547988 [Arabidopsis >gi|25408134|pir||C84717 hypothetical protein At2g31160
  misc_feature (112)..(269): Homolog of NCBI NO: 15241821 NR Description: putative protein; protein id: At5g28490.1
  misc_feature (123)..(258): Homolog of NCBI NO: 38344650 NR Description: OSJNBb0072M01.12 [Oryza sativa (japonica
  misc_feature (121)..(258): Homolog of NCBI NO: 18406012 NR Description: expressed protein; protein id: At2g42610.1, by cDNA: gi_6691164 [Arabidopsis thaliana]
  misc_feature (122)..(271): Homolog of NCBI NO: 15229310 NR Description: unknown protein; protein id: At3g04510.1 thaliana] >gi|7547110|gb|AAF63782.1| unknown protein [Arabidopsis
  misc_feature (110)..(258): Homolog of NCBI NO: 18412120 NR Description: Expressed protein; protein id: At1g78815.1, by cDNA: 230925. [Arabidopsis thaliana] >gi|25341951|pir||D96817
SLILSGWYAVASLSLLPTRLHLNGSRHLQAGRAANGPIGELLAMEPGPDAPAGGGGGGGTSISEPAEAGPSPSSSSAAAAASSSSRQQAEQEAQQQQGAQQREQPAVRAQAQPQPQPHQQQPPAGLSRYESQKRRDWNTFLQYLRNHKPPLTLARCSGAHVIEFLRYLDQFGKTKVHAEGCAYFGQPNPPAPCTCPLRQAWGSLDALIGRLRAAYEESGGRPESNPFAAKAVRIYLRDVREAQAKARGIPYEKKKRKRGSAAAPPVAPPPVVTAEAAGTSSGAGGGDDEDDDEPPPSADEPRRQQTAAPTPPPPASMISSTSASSSSVAPVTTTTTTSKEKEGSAPSS

SEQ ID NO: 4896 - protein, 305 aa, Zea mays subsp. mays
  peptide (1)..(305): Ceres Seq. ID no. 12409798
  misc_feature (78)..(199): Pfam Name: Protein of unknown function (DUF640) Pfam Description: Protein of unknown function (DUF640)
  misc_feature (78)..(243): Homolog of NCBI NO: 34907938 NR Description: B1088C09.17 [Oryza sativa (japonica
  misc_feature (79)..(244): Homolog of NCBI NO: 18390725 NR Description: expressed protein; protein id: At1g07090.1, by cDNA: 28780. [Arabidopsis thaliana] >gi|25341953|pir||G86205
  misc_feature (84)..(224): Homolog of NCBI NO: 15237680 NR Description: putative protein; protein id: At5g58500.1 thaliana] >gi|10177027|dbj|BAB10265.1|
  misc_feature (81)..(253): Homolog of NCBI NO: 37535384 NR Description: hypothetical protein [Oryza sativa (japonica group)] >gi|10140752|gb|AAG13584.1| hypothetical protein [Oryza >gi|31432676|gb|AAP54281.1| hypothetical protein [Oryza sativa
  misc_feature (71)..(215): Homolog of NCBI NO: 18402578 NR Description: expressed protein; protein id: At2g31160.1, by cDNA: gi_15912210, supported by cDNA: gi_19547988 [Arabidopsis >gi|25408134|pir||C84717 hypothetical protein At2g31160
  misc_feature (69)..(226): Homolog of NCBI NO: 15241821 NR Description: putative protein; protein id: At5g28490.1
  misc_feature (80)..(215): Homolog of NCBI NO: 38344650 NR Description: OSJNBb0072M01.12 [Oryza sativa (japonica
  misc_feature (78)..(215): Homolog of NCBI NO: 18406012 NR Description: expressed protein; protein id: At2g42610.1, by cDNA: gi_6691164 [Arabidopsis thaliana]
  misc_feature (79)..(228): Homolog of NCBI NO: 15229310 NR Description: unknown protein; protein id: At3g04510.1 thaliana] >gi|7547110|gb|AAF63782.1| unknown protein [Arabidopsis
  misc_feature (67)..(215): Homolog of NCBI NO: 18412120 NR Description: Expressed protein; protein id: At1g78815.1, by cDNA: 230925. [Arabidopsis thaliana] >gi|25341951|pir||D96817
MEPGPDAPAGGGGGGGTSISEPAEAGPSPSSSSAAAAASSSSRQQAEQEAQQQQGAQQREQPAVRAQAQPQPQPHQQQPPAGLSRYESQKRRDWNTFLQYLRNHKPPLTLARCSGAHVIEFLRYLDQFGKTKVHAEGCAYFGQPNPPAPCTCPLRQAWGSLDALIGRLRAAYEESGGRPESNPFAAKAVRIYLRDVREAQAKARGIPYEKKKRKRGSAAAPPVAPPPVVTAEAAGTSSGAGGGDDEDDDEPPPSADEPRRQQTAAPTPPPPASMISSTSASSSSVAPVTTTTTTSKEKEGSAPSS

SEQ ID NO: 4897 - DNA, 1508 bp, Zea mays subsp. mays
  misc_feature (1)..(1508): Ceres Seq. ID no. 12366608
  misc_feature: MA Experiment ID: 108687 Result: Down-regulated in Transcription
  misc_feature: MA Experiment 108687 PARAMETER Experiment Name: Zm_Embryos-Flowers__P Parameter: Tissue Value: Embryo vs. Aerial+
  misc_feature: MA Experiment ID: 20000492 Result: Down-regulated in Transcription
  misc_feature: MA Experiment 20000492 PARAMETER Experiment Name: Zm_Hybrid_Seed_Dev_P Parameter: DAP Value: 12
  misc_feature: MA Experiment 20000492 PARAMETER Experiment Name: Zm_Hybrid_Seed_Dev_P Parameter: Organism Value: Zea mays
  misc_feature: MA Experiment 20000492 PARAMETER Experiment Name: Zm_Hybrid_Seed_Dev_P Parameter: Plant Line Value: 35A19
  misc_feature: MA Experiment 20000492 PARAMETER Experiment Name: Zm_Hybrid_Seed_Dev_P Parameter: Tissue Value: Fert Kernel vs. Unfert Floret
  misc_feature: MA Experiment ID: 20000535 Result: Down-regulated in Transcription
  misc_feature: MA Experiment 20000535 PARAMETER Experiment Name: Zm_Hybrid_Seed_Dev_P Parameter: DAP Value: 30 vs. 12
  misc_feature: MA Experiment 20000535 PARAMETER Experiment Name: Zm_Hybrid_Seed_Dev_P Parameter: Organism Value: Zea mays
  misc_feature: MA Experiment 20000535 PARAMETER Experiment Name: Zm_Hybrid_Seed_Dev_P Parameter: Plant Line Value: 35A19
  misc_feature: MA Experiment 20000535 PARAMETER Experiment Name: Zm_Hybrid_Seed_Dev_P Parameter: Tissue Value: Embryo vs. Unfert Floret
  misc_feature: MA Experiment ID: 20000630 Result: Up-regulated in Transcription
  misc_feature: MA Experiment 20000630 PARAMETER Experiment Name: Zm_Herbicide-Treatments_P Parameter: Timepoint (hr) Value: 4
  misc_feature: MA Experiment 20000630 PARAMETER Experiment Name: Zm_Herbicide-Treatments_P Parameter: Tissue Value: Aerial
  misc_feature: MA Experiment 20000630 PARAMETER Experiment Name: Zm_Herbicide-Treatments_P Parameter: Treatment Value: Roundup vs. No Treatment
gtttttgcccctttggtccctctccctcccccgtccgccctgcactctccagctcaacaaggaagaagagggggccttcaccacaccactcgattcctctttagagcacgacttacgaagagtgcccaggccgtcgccgccgaccagcaaaagggctggaaagcccccctcttttgtgctgtgcgtgcaactcggctcctgccctgccatcttgctttccaagacccctgcgcccccagtcccataattagttaggattaggatcaccaccatttccaaatccttgcagagctgccgaagcgcggatcacagatgaagaggcaatccaagaggcccaccgccagccgcgaatccccagaaacaggggagaagcagaagctggcgttcgcggaggaagaggccccgccggcgcggaaggtggagcccgacgacgaggccgagatggacgaggacgaggacgagctgggcccgggcctgggcggcgggcgcgcggcgcggtcgccgtgcgggctcggggagaagaagcggcgcctggcgctggagcaggtgcgcgcgctggagcgctgcttcgagacggacaacaagctggacccggaccgcaaggcccgcatcgcgcgcgacctcgcgctgcagccccgccaggtcgccgtctggttccagaaccgccgcgcccgctggaagaccaagacgctcgagcgcgacttcgcggcgctgcgcgcgcgccacgacgcgctccgcgccgactgcgacgcgctccgccgcgacaaggacgccctcgccgccgagataagggagttgaggcagaagctgctgcccaagccggaagccacggtgaagctggaggcgacgacgggcaatgacacggcggaggagcgccgccaggcgacggccggcgcgccgcccgcgggggcctgcaaggacggctcctcggacagcgactccagcgtggtcttcagcgacgtcgaggcgtcgccgtactccggcggcgcggggttcgagccgccggccttggccgggctcggcgcgccgttcctggacacgtcggtggcgccgacgggctgctcgtctccccccgttttcgtcgagaccaagtggcagcacgggccgacacagtacccgttcccattcgactcgtacaaggcctgcgccggctatggcttcacggaggaatggcccgcgagctcggacctcatcggcagcgacggcggcgcggcggggttcttctccgaggatcacgcctccagcctcaacttcaactggtgcccgagtggcatccagggctgggagtgaagaggggtttttgatctgcacggctagtgtaaaaaaaccgatgttacggtggcatttgtacatgcatggaactggagtctagtgacctggcctggcgagtgtggtgtggccaaagctagaggacatccagcgcaaaaggcgggaacaggagcagtagtagcctgtaacaataacggaataacttgagccaggctagtaaaaaaagaggatgtaaatgc

SEQ ID NO: 4898 - protein, 325 aa, Zea mays subsp. mays
  peptide (1)..(325): Ceres Seq. ID no. 12366609
  misc_feature (70)..(124): Pfam Name: Homeobox domain Pfam Description: Homeobox domain
  misc_feature (22)..(216): Homolog of NCBI NO: 6723679 NR Description: homeodomain protein [Lycopersicon esculentum]
  misc_feature (46)..(166): Homolog of NCBI NO: 15238405 NR Description: homeobox-leucine zipper protein ATHB-5 (HD-zip ATHB- 5) (sp|P46667); protein id: At5g65310.1, supported by cDNA:
  misc_feature (36)..(325): Homolog of NCBI NO: 34902432 NR Description: Unknown protein [Oryza sativa (japonica
  misc_feature (41)..(324): Homolog of NCBI NO: 37533686 NR Description: putative homeodomain leucine zipper protein
  misc_feature (44)..(218): Homolog of NCBI NO: 11231065 NR Description: homeobox-leucine zipper protein [Zinnia elegans]
  misc_feature (69)..(317): Homolog of NCBI NO: 15148916 NR Description: homeodomain leucine zipper protein HDZ1
  misc_feature (41)..(239): Homolog of NCBI NO: 5006853 NR Description: homeodomain leucine zipper protein [Oryza sativa]
  misc_feature (41)..(324): Homolog of NCBI NO: 33943626 NR Description: homeodomain leucine-zipper protein Hox8 [Oryza
  misc_feature (62)..(166): Homolog of NCBI NO: 5305602 NR Description: homeobox protein ATHB6 [Arabidopsis thaliana]
  misc_feature (62)..(166): Homolog of NCBI NO: 18399966 NR Description: homeodomain transcription factor (ATHB-6); id: At2g22430.1, supported by cDNA: gi_16974586, supported by
MKRQSKRPTASRESPETGEKQKLAFAEEEAPPARKVEPDDEAEMDEDEDELGPGLGGGRAARSPCGLGEKKRRLALEQVRALERCFETDNKLDPDRKARIARDLALQPRQVAVWFQNRRARWKTKTLERDFAALRARHDALRADCDALRRDKDALAAEIRELRQKLLPKPEATVKLEATTGNDTAEERRQATAGAPPAGACKDGSSDSDSSVVFSDVEASPYSGGAGFEPPALAGLGAPFLDTSVAPTGCSSPPVFVETKWQHGPTQYPFPFDSYKACAGYGFTEEWPASSDLIGSDGGAAGFFSEDHASSLNFNWCPSGIQGWE

SEQ ID NO: 4899 - protein, 282 aa, Zea mays subsp. mays
  peptide (1)..(282): Ceres Seq. ID no. 12366610
  misc_feature (27)..(81): Pfam Name: Homeobox domain Pfam Description: Homeobox domain
  misc_feature (1)..(282): Homolog of NCBI NO: 34902432 NR Description: Unknown protein [Oryza sativa (japonica
  misc_feature (1)..(281): Homolog of NCBI NO: 33943626 NR Description: homeodomain leucine-zipper protein Hox8 [Oryza
  misc_feature (1)..(281): Homolog of NCBI NO: 37533686 NR Description: putative homeodomain leucine zipper protein
  misc_feature (1)..(196): Homolog of NCBI NO: 5006853 NR Description: homeodomain leucine zipper protein [Oryza sativa]
  misc_feature (1)..(175): Homolog of NCBI NO: 11231065 NR Description: homeobox-leucine zipper protein [Zinnia elegans]
  misc_feature (26)..(274): Homolog of NCBI NO: 15148916 NR Description: homeodomain leucine zipper protein HDZ1
  misc_feature (1)..(173): Homolog of NCBI NO: 6723679 NR Description: homeodomain protein [Lycopersicon esculentum]
  misc_feature (3)..(123): Homolog of NCBI NO: 15238405 NR Description: homeobox-leucine zipper protein ATHB-5 (HD-zip ATHB- 5) (sp|P46667); protein id: At5g65310.1, supported by cDNA:
  misc_feature (19)..(123): Homolog of NCBI NO: 5305602 NR Description: homeobox protein ATHB6 [Arabidopsis thaliana]
  misc_feature (19)..(123): Homolog of NCBI NO: 25386231 NR Description: homeodomain transcription factor (ATHB-6)
MDEDEDELGPGLGGGRAARSPCGLGEKKRRLALEQVRALERCFETDNKLDPDRKARIARDLALQPRQVAVWFQNRRARWKTKTLERDFAALRARHDALRADCDALRRDKDALAAEIRELRQKLLPKPEATVKLEATTGNDTAEERRQATAGAPPAGACKDGSSDSDSSVVFSDVEASPYSGGAGFEPPALAGLGAPFLDTSVAPTGCSSPPVFVETKWQHGPTQYPFPFDSYKACAGYGFTEEWPASSDLIGSDGGAAGFFSEDHASSLNFNWCPSGIQGWE

SEQ ID NO: 4900 - protein, 171 aa, Zea mays subsp. mays
  peptide (1)..(171): Ceres Seq. ID no. 12366611
  misc_feature (1)..(146): Homolog of NCBI NO: 5821145 NR Description: RNA binding protein [Homo sapiens]
  misc_feature (1)..(144): Homolog of NCBI NO: 30424862 NR Description: RIKEN cDNA 5033413A03 [Mus musculus]
  misc_feature (1)..(146): Homolog of NCBI NO: 5821143 NR Description: RNA binding protein [Homo sapiens]
  misc_feature (1)..(146): Homolog of NCBI NO: 30424862 NR Description: RIKEN cDNA 5033413A03 [Mus musculus]
  misc_feature (1)..(133): Homolog of NCBI NO: 34868816 NR Description: similar to splicing coactivator subunit SRm300;
  misc_feature (1)..(133): Homolog of NCBI NO: 30424862 NR Description: RIKEN cDNA 5033413A03 [Mus musculus]
  misc_feature (1)..(130): Homolog of NCBI NO: 34868816 NR Description: similar to splicing coactivator subunit SRm300;
  misc_feature (1)..(130): Homolog of NCBI NO: 30424862 NR Description: RIKEN cDNA 5033413A03 [Mus musculus]
  misc_feature (1)..(143): Homolog of NCBI NO: 30424862 NR Description: RIKEN cDNA 5033413A03 [Mus musculus]
  misc_feature (1)..(143): Homolog of NCBI NO: 34868816 NR Description: similar to splicing coactivator subunit SRm300;
MTRRRSAARRRPARRPRGPARTAPRTATPAWSSATSRRRRTPAARGSSRRPWPGSARRSWTRRWRRRAARLPPFSSRPSGSTGRHSTRSHSTRTRPAPAMASRRNGPRARTSSAATAARRGSSPRITPPASTSTGARVASRAGSEEGFLICTASVKKPMLRWHLYMHGTGV

SEQ ID NO: 4901 - DNA, 1715 bp, Zea mays subsp. mays
  misc_feature (1)..(1715): Ceres Seq. ID no. 12406967
  misc_feature: MA Experiment ID: 108527 Result: Up-regulated in Transcription
  misc_feature: MA Experiment 108527 PARAMETER Experiment Name: Zm_5mM_NO_P Parameter: Age (day) Value: 8
  misc_feature: MA Experiment 108527 PARAMETER Experiment Name: Zm_5mM_NO_P Parameter: Organism Value: Zea mays
  misc_feature: MA Experiment 108527 PARAMETER Experiment Name: Zm_5mM_NO_P Parameter: Plant Line Value: 35A19
  misc_feature: MA Experiment 108527 PARAMETER Experiment Name: Zm_5mM_NO_P Parameter: Timepoint (hr) Value: 6
  misc_feature: MA Experiment 108527 PARAMETER Experiment Name: Zm_5mM_NO_P Parameter: Tissue Value: Aerial
  misc_feature: MA Experiment 108527 PARAMETER Experiment Name: Zm_5mM_NO_P Parameter: Treatment Value: 5mM NO vs. No Treatment
accgaggagagagagaccgatacagagagagagaccaagaggacacgggagagaggacgttcatttccgcgtcgtctccgcccgcagccggcagccccaccacccaccacatggccgccatgccgggtggggcccacggcgccggcgccgcggacccgatgcaggtggaccagccgctcccccctgccgccgcaggcacagcacacgcccccgccgacgccaagcatgctggttctatgattgaagggagtgatccggtcacaggccatataatctcgacaaccattggagggaagaatggagagcctaaaaggactatcagctacatggcagagagagttgtgggaactggatcatttggaatcgtcttccaggcaaaatgtctggagactggtgagactgttgcgattaagaaggttttgcaggacaagcgctacaagaacagggagctacaaatcatgcgatccatggatcactgcaatgttgtttccttgaagcattgcttcttctctaccacaagcagagatgaacttttccttaacttagtgatggagtttgttcccgagtcattatatcgggtgttgaaacattacagcaatatgaaccagaggatgccactcatttatgtcaaattatatacctaccagatatttcgaggcttagcctatattcacacagtacctggagtttgccacagggatgtgaaaccacaaaatcttttggttgatccactgactcaccaagtgaagatatgtgattttgggagtgccaaaatgttggtcaaaggtgaagcaaacatatcatatatatgttcacgttattaccgtgctccagagctcatatttggggcaactgagtacacaacatcaattgatatttggtcagctggatgtgttcttgctgagctgcttcttggccagcctctcttccctggtgaaagtgctgtggatcagcttgttgagataataaaggttcttggtaccccaacgcgcgaggaaatccgatgtatgaatccaaactacaccgagtttagatttcctcagatcaaagctcacccatggcacaagattttccacaagcggatgcctccagaagctatagatctcgcttcacgcttgctccagtattcaccaaatctaagatgcactgctcttgaagcgtgtgcacatccattctttgacgatttgcgagaaccacatgcgaggttgccaaatggacggccatttcctccactgttcaactttaaacaggaactagcaaatgcctccccagagctcatcaacaggttgatcccagaccatgctaggcggcatcttgggctcacattattgcccgctactggaccataggcgaaggctctatggtggtgcttcgttgtgcggaaggcaacctgcattcaaggtgtagaatctgacaattattggaaggtcaaacatgagctggcgcgtaaggagaggtggtatgttctcgtgcagccagccttaatttgtcgcatgtcttaatgcaaaaatctgatttttgcccaagtagtgagaggagggaagggggtggtcggtgtattgttaagctattgaaggaattcgatccctgctattgtgttactttctccaacgtttaaacgttgtagtgcgcctgtaagtgttccatatatcccctgttgtcagtcagtgtaattctgtaaatgttattaatgggaaattatttcgtgcttttcc

SEQ ID NO: 4902 - protein, 448 aa, Zea mays subsp. mays
  peptide (1)..(448): Ceres Seq. ID no. 12406968
  misc_feature (108)..(392): Pfam Name: Protein kinase domain Pfam Description: Protein kinase domain
  misc_feature (37)..(439): Homolog of NCBI NO: 7434281 NR Description: probable shaggy-like protein kinase etha (EC
  misc_feature (72)..(447): Homolog of NCBI NO: 15233984 NR Description: shaggy-like protein kinase etha (EC 2.7.1.-); id: At4g18710.1, supported by cDNA: 256076., supported by cDNA:
  misc_feature (37)..(442): Homolog of NCBI NO: 15221476 NR Description: shaggy-like kinase, putative; protein id: supported by cDNA: gi_14334749, supported by cDNA: gi_15293238, by cDNA: gi_2444276 [Arabidopsis thaliana]
  misc_feature (72)..(447): Homolog of NCBI NO: 12643751 NR Description: Shaggy-related protein kinase eta (ASK-eta)
  misc_feature (72)..(447): Homolog of NCBI NO: 18700188 NR Description: AT4g18710/F28A21_120 [Arabidopsis thaliana]
  misc_feature (72)..(438): Homolog of NCBI NO: 15224593 NR Description: putative shaggy-like protein kinase dzeta; id: At2g30980.1, supported by cDNA: 36479., supported by cDNA: supported by cDNA: gi_20453107, supported by cDNA: gi_20465726
  misc_feature (72)..(438): Homolog of NCBI NO: 21593135 NR Description: putative shaggy-like protein kinase dzeta
  misc_feature (72)..(438): Homolog of NCBI NO: 12643750 NR Description: Shaggy-related protein kinase delta (ASK-delta)
  misc_feature (72)..(443): Homolog of NCBI NO: 22326813 NR Description: protein kinase MSK-3 - like; protein id: supported by cDNA: gi_18086449 [Arabidopsis thaliana]
  misc_feature (78)..(435): Homolog of NCBI NO: 15236918 NR Description: Shaggy related protein kinase tetha; protein id:
RGERDRYRERDQEDTGERTFISASSPPAAGSPTTHHMAAMPGGAHGAGAADPMQVDQPLPPAAAGTAHAPADAKHAGSMIEGSDPVTGHIISTTIGGKNGEPKRTISYMAERVVGTGSFGIVFQAKCLETGETVAIKKVLQDKRYKNRELQIMRSMDHCNVVSLKHCFFSTTSRDELFLNLVMEFVPESLYRVLKHYSNMNQRMPLIYVKLYTYQIFRGLAYIHTVPGVCHRDVKPQNLLVDPLTHQVKICDFGSAKMLVKGEANISYICSRYYRAPELIFGATEYTTSIDIWSAGCVLAELLLGQPLFPGESAVDQLVEIIKVLGTPTREEIRCMNPNYTEFRFPQIKAHPWHKIFHKRMPPEAIDLASRLLQYSPNLRCTALEACAHPFFDDLREPHARLPNGRPFPPLFNFKQELANASPELINRLIPDHARRHLGLTLLPATGP

SEQ ID NO: 4903 - protein, 412 aa, Zea mays subsp. mays
  peptide (1)..(412): Ceres Seq. ID no. 12406969
  misc_feature (72)..(356): Pfam Name: Protein kinase domain Pfam Description: Protein kinase domain
  misc_feature (1)..(403): Homolog of NCBI NO: 7434281 NR Description: probable shaggy-like protein kinase etha (EC
  misc_feature (36)..(411): Homolog of NCBI NO: 15233984 NR Description: shaggy-like protein kinase etha (EC 2.7.1.-); id: At4g18710.1, supported by cDNA: 256076., supported by cDNA:
  misc_feature (1)..(406): Homolog of NCBI NO: 15221476 NR Description: shaggy-like kinase, putative; protein id: supported by cDNA: gi_14334749, supported by cDNA: gi_15293238, by cDNA: gi_2444276 [Arabidopsis thaliana]
  misc_feature (36)..(411): Homolog of NCBI NO: 12643751 NR Description: Shaggy-related protein kinase eta (ASK-eta)
  misc_feature (36)..(411): Homolog of NCBI NO: 18700188 NR Description: AT4g18710/F28A21_120 [Arabidopsis thaliana]
  misc_feature (36)..(402): Homolog of NCBI NO: 15224593 NR Description: putative shaggy-like protein kinase dzeta; id: At2g30980.1, supported by cDNA: 36479., supported by cDNA: supported by cDNA: gi_20453107, supported by cDNA: gi_20465726
  misc_feature (36)..(402): Homolog of NCBI NO: 21593135 NR Description: putative shaggy-like protein kinase dzeta
  misc_feature (36)..(402): Homolog of NCBI NO: 12643750 NR Description: Shaggy-related protein kinase delta (ASK-delta)
  misc_feature (36)..(407): Homolog of NCBI NO: 22326813 NR Description: protein kinase MSK-3 - like; protein id: supported by cDNA: gi_18086449 [Arabidopsis thaliana]
  misc_feature (42)..(399): Homolog of NCBI NO: 15236918 NR Description: Shaggy related protein kinase tetha; protein id:
MAAMPGGAHGAGAADPMQVDQPLPPAAAGTAHAPADAKHAGSMIEGSDPVTGHIISTTIGGKNGEPKRTISYMAERVVGTGSFGIVFQAKCLETGETVAIKKVLQDKRYKNRELQIMRSMDHCNVVSLKHCFFSTTSRDELFLNLVMEFVPESLYRVLKHYSNMNQRMPLIYVKLYTYQIFRGLAYIHTVPGVCHRDVKPQNLLVDPLTHQVKICDFGSAKMLVKGEANISYICSRYYRAPELIFGATEYTTSIDIWSAGCVLAELLLGQPLFPGESAVDQLVEIIKVLGTPTREEIRCMNPNYTEFRFPQIKAHPWHKIFHKRMPPEAIDLASRLLQYSPNLRCTALEACAHPFFDDLREPHARLPNGRPFPPLFNFKQELANASPELINRLIPDHARRHLGLTLLPATGP

SEQ ID NO: 4904 - protein, 409 aa, Zea mays subsp. mays
  peptide (1)..(409): Ceres Seq. ID no. 12406970
  misc_feature (69)..(353): Pfam Name: Protein kinase domain Pfam Description: Protein kinase domain
  misc_feature (1)..(400): Homolog of NCBI NO: 7434281 NR Description: probable shaggy-like protein kinase etha (EC
  misc_feature (33)..(408): Homolog of NCBI NO: 15233984 NR Description: shaggy-like protein kinase etha (EC 2.7.1.-); id: At4g18710.1, supported by cDNA: 256076., supported by cDNA:
  misc_feature (1)..(403): Homolog of NCBI NO: 15221476 NR Description: shaggy-like kinase, putative; protein id: supported by cDNA: gi_14334749, supported by cDNA: gi_15293238, by cDNA: gi_2444276 [Arabidopsis thaliana]
  misc_feature (33)..(408): Homolog of NCBI NO: 12643751 NR Description: Shaggy-related protein kinase eta (ASK-eta)
  misc_feature (33)..(408): Homolog of NCBI NO: 18700188 NR Description: AT4g18710/F28A21_120 [Arabidopsis thaliana]
  misc_feature (33)..(399): Homolog of NCBI NO: 15224593 NR Description: putative shaggy-like protein kinase dzeta; id: At2g30980.1, supported by cDNA: 36479., supported by cDNA: supported by cDNA: gi_20453107, supported by cDNA: gi_20465726
  misc_feature (33)..(399): Homolog of NCBI NO: 21593135 NR Description: putative shaggy-like protein kinase dzeta
  misc_feature (33)..(399): Homolog of NCBI NO: 12643750 NR Description: Shaggy-related protein kinase delta (ASK-delta)
  misc_feature (33)..(404): Homolog of NCBI NO: 22326813 NR Description: protein kinase MSK-3 - like; protein id: supported by cDNA: gi_18086449 [Arabidopsis thaliana]
  misc_feature (39)..(396): Homolog of NCBI NO: 15236918 NR Description: Shaggy related protein kinase tetha; protein id:
MPGGAHGAGAADPMQVDQPLPPAAAGTAHAPADAKHAGSMIEGSDPVTGHIISTTIGGKNGEPKRTISYMAERVVGTGSFGIVFQAKCLETGETVAIKKVLQDKRYKNRELQIMRSMDHCNVVSLKHCFFSTTSRDELFLNLVMEFVPESLYRVLKHYSNMNQRMPLIYVKLYTYQIFRGLAYIHTVPGVCHRDVKPQNLLVDPLTHQVKICDFGSAKMLVKGEANISYICSRYYRAPELIFGATEYTTSIDIWSAGCVLAELLLGQPLFPGESAVDQLVEIIKVLGTPTREEIRCMNPNYTEFRFPQIKAHPWHKIFHKRMPPEAIDLASRLLQYSPNLRCTALEACAHPFFDDLREPHARLPNGRPFPPLFNFKQELANASPELINRLIPDHARRHLGLTLLPATGP

SEQ ID NO: 4905 - DNA, 1672 bp, Zea mays subsp. mays
  misc_feature (1)..(1672): Ceres Seq. ID no. 12349023
  misc_feature: MA Experiment ID: 108522 Result: Up-regulated in Transcription
  misc_feature: MA Experiment 108522 PARAMETER Experiment Name: Zm_42deg_Heat_P Parameter: Age (day) Value: 8
  misc_feature: MA Experiment 108522 PARAMETER Experiment Name: Zm_42deg_Heat_P Parameter: Organism Value: Zea mays
  misc_feature: MA Experiment 108522 PARAMETER Experiment Name: Zm_42deg_Heat_P Parameter: Plant Line Value: 35A19
  misc_feature: MA Experiment 108522 PARAMETER Experiment Name: Zm_42deg_Heat_P Parameter: Temperature (deg C) Value: 42 vs. 22
  misc_feature: MA Experiment 108522 PARAMETER Experiment Name: Zm_42deg_Heat_P Parameter: Timepoint (hr) Value: 1
  misc_feature: MA Experiment 108522 PARAMETER Experiment Name: Zm_42deg_Heat_P Parameter: Tissue Value: Aerial
  misc_feature: MA Experiment ID: 108523 Result: Up-regulated in Transcription
  misc_feature: MA Experiment 108523 PARAMETER Experiment Name: Zm_42deg_Heat_P Parameter: Age (day) Value: 8
  misc_feature: MA Experiment 108523 PARAMETER Experiment Name: Zm_42deg_Heat_P Parameter: Organism Value: Zea mays
  misc_feature: MA Experiment 108523 PARAMETER Experiment Name: Zm_42deg_Heat_P Parameter: Plant Line Value: 35A19
  misc_feature: MA Experiment 108523 PARAMETER Experiment Name: Zm_42deg_Heat_P Parameter: Temperature (deg C) Value: 42 vs. 22
  misc_feature: MA Experiment 108523 PARAMETER Experiment Name: Zm_42deg_Heat_P Parameter: Timepoint (hr) Value: 6
  misc_feature: MA Experiment 108523 PARAMETER Experiment Name: Zm_42deg_Heat_P Parameter: Tissue Value: Aerial
  misc_feature: MA Experiment ID: 108689 Result: Up-regulated in Transcription
  misc_feature: MA Experiment 108689 PARAMETER Experiment Name: Zm_Drought_Roots_P Parameter: Age (day) Value: 9
  misc_feature: MA Experiment 108689 PARAMETER Experiment Name: Zm_Drought_Roots_P Parameter: Organism Value: Zea mays
  misc_feature: MA Experiment 108689 PARAMETER Experiment Name: Zm_Drought_Roots_P Parameter: Plant Line Value: 35A19
  misc_feature: MA Experiment 108689 PARAMETER Experiment Name: Zm_Drought_Roots_P Parameter: Timepoint (hr) Value: 24
  misc_feature: MA Experiment 108689 PARAMETER Experiment Name: Zm_Drought_Roots_P Parameter: Tissue Value: Roots
  misc_feature: MA Experiment 108689 PARAMETER Experiment Name: Zm_Drought_Roots_P Parameter: Treatment Value: Drought vs. No Drought
ccgtccactcctttggtctcaaatcctcaatcatgcccggaattttgtaccagctcgtcgtcgccgccgccatctgcgccctctccagcggcagcatcgcggtcgcctcaggtttgaatgcgaccgactcgttcctcgtctgcctcatcggcgccggcgtcccgccgcgcctccttcagaccccggcgtccccgtcgtactccgcgacgctgctctcatccttacgcaacctccgctacgtcacgtcggacattcagcggccggtcgccatcgtggccgccaccgagccagcccacgcgcaggcggccgtacgctgcggccgccgccacggcgtccgcgtccgcgcccgaagcggcgggcacgactacgagggcctatcctacgcctccctcgacccccgcgagcgcttcgccgtgctcgacctcgccgctttccgtgacgtccgcgtcgactccgcgcgcgccgaggcgtgggctggatcgggggccacgctcggcgaggtctactatgccgtcgccgccgccagccgcgtgctcgcgttccccgcggggatctgccccactgtcggcgtaggaggacacctcagcggcggcggcttcggcacgctgatgcgcaggtacggcctcgccgcggacaacgtcattgacgccgtcctcgttgacgccgacgggaggctgctgaaccggaccaccatgggggaggatctgttctgggccatccgcggtggcggcggggagagcttcggtgtcatactgtcttggaagctccgcctcgtgcgcgtgccggagacagtcaccgtgttcaccgtgcgccggtcaataaaccagtccgcctcccaactcatcaccaaatggcaggcaatcgcgccggcgctgcccagtgacctcatcctccgagtcgccgtccggagccagcccgcgcggtttgaggcactgttcctcggccgctgcagccgcctccttgagcacatgagagctcacttcccggaccttggcgtcacccaatcggactgcgaggagataagctggatccagtccaccgtgtacttcgccttctactcgagctccaagccactggagctgctcctggacaggagcggcgagacgcccagatacgtcaaggccaagtccgactacgtgcaagaacccatcccacggcacgtgtgggagagaacatggtcatggctggagaagcccgaggccgggctgctcatcctggacccctacggcggccggatgggcagcatctctccgtcagcgacgccgttcccgcaccggaaggggaacctgtacaacctccagtactactcgtattggttcgagaatggcactgcggcattggagaagcggatgagctgggtcagggggctgtacgaggagatggagccgtatgtgtccaagaacccaagaactggatatgtcaactacagggacctggatcttgggacgaacgagttggaggacaatgtgactagctacgccagggcgaggatctggggggagaagtatttcaaaggcaattttgagaggctggcagctgtgaaggccatggcggatcctgatgacttcttcaggaatgagcagagcatccctcctcttcccgctgcaaaaggatggggcttcatttgagtggtcgtttgtttcgtagctttgtggtggtggatttcttggct

SEQ ID NO: 4906 - protein, 541 aa, Zea mays subsp. mays
  peptide (1)..(541): Ceres Seq. ID no. 12349024
  misc_feature (87)..(244): Pfam Name: FAD binding domain Pfam Description: FAD binding domain
  misc_feature (34)..(531): Homolog of NCBI NO: 15233411 NR Description: FAD-linked oxidoreductase family; protein id: [Arabidopsis thaliana] >gi|7488294|pir||T10624 reticuline oxidase
  misc_feature (36)..(532): Homolog of NCBI NO: 13161397 NR Description: CPRD2 [Vigna unguiculata]
  misc_feature (65)..(532): Homolog of NCBI NO: 15233424 NR Description: FAD-linked oxidoreductase family; protein id: supported by cDNA: gi_14194126 [Arabidopsis thaliana]
  misc_feature (26)..(530): Homolog of NCBI NO: 15241498 NR Description: FAD-linked oxidoreductase family; protein id:
  misc_feature (35)..(533): Homolog of NCBI NO: 15221473 NR Description: FAD-linked oxidoreductase family; protein id: supported by cDNA: gi_16930506 [Arabidopsis thaliana]
  misc_feature (65)..(532): Homolog of NCBI NO: 14194127 NR Description: AT4g20860/T13K14_20 [Arabidopsis thaliana]
  misc_feature (53)..(530): Homolog of NCBI NO: 28058799 NR Description: berberine bridge enzyme-like protein [Arabidopsis
  misc_feature (31)..(530): Homolog of NCBI NO: 15226830 NR Description: FAD-linked oxidoreductase family; protein id: [Arabidopsis thaliana] >gi|7485805|pir||T00461 probable berberine
  misc_feature (42)..(530): Homolog of NCBI NO: 15241495 NR Description: FAD-linked oxidoreductase family; protein id:
  misc_feature (35)..(532): Homolog of NCBI NO: 15241474 NR Description: FAD-linked oxidoreductase family; protein id: [Arabidopsis thaliana] >gi|10176891|dbj|BAB10121.1| berberine
VHSFGLKSSIMPGILYQLVVAAAICALSSGSIAVASGLNATDSFLVCLIGAGVPPRLLQTPASPSYSATLLSSLRNLRYVTSDIQRPVAIVAATEPAHAQAAVRCGRRHGVRVRARSGGHDYEGLSYASLDPRERFAVLDLAAFRDVRVDSARAEAWAGSGATLGEVYYAVAAASRVLAFPAGICPTVGVGGHLSGGGFGTLMRRYGLAADNVIDAVLVDADGRLLNRTTMGEDLFWAIRGGGGESFGVILSWKLRLVRVPETVTVFTVRRSINQSASQLITKWQAIAPALPSDLILRVAVRSQPARFEALFLGRCSRLLEHMRAHFPDLGVTQSDCEEISWIQSTVYFAFYSSSKPLELLLDRSGETPRYVKAKSDYVQEPIPRHVWERTWSWLEKPEAGLLILDPYGGRMGSISPSATPFPHRKGNLYNLQYYSYWFENGTAALEKRMSWVRGLYEEMEPYVSKNPRTGYVNYRDLDLGTNELEDNVTSYARARIWGEKYFKGNFERLAAVKAMADPDDFFRNEQSIPPLPAAKGWGFI

SEQ ID NO: 4907 - protein, 531 aa, Zea mays subsp. mays
  peptide (1)..(531): Ceres Seq. ID no. 12349025
  misc_feature (77)..(234): Pfam Name: FAD binding domain Pfam Description: FAD binding domain
  misc_feature (24)..(521): Homolog of NCBI NO: 15233411 NR Description: FAD-linked oxidoreductase family; protein id: [Arabidopsis thaliana] >gi|7488294|pir||T10624 reticuline oxidase
  misc_feature (26)..(522): Homolog of NCBI NO: 13161397 NR Description: CPRD2 [Vigna unguiculata]
  misc_feature (55)..(522): Homolog of NCBI NO: 15233424 NR Description: FAD-linked oxidoreductase family; protein id: supported by cDNA: gi_14194126 [Arabidopsis thaliana]
  misc_feature (16)..(520): Homolog of NCBI NO: 15241498 NR Description: FAD-linked oxidoreductase family; protein id:
  misc_feature (25)..(523): Homolog of NCBI NO: 15221473 NR Description: FAD-linked oxidoreductase family; protein id: supported by cDNA: gi_16930506 [Arabidopsis thaliana]
  misc_feature (55)..(522): Homolog of NCBI NO: 14194127 NR Description: AT4g20860/T13K14_20 [Arabidopsis thaliana]
  misc_feature (43)..(520): Homolog of NCBI NO: 28058799 NR Description: berberine bridge enzyme-like protein [Arabidopsis
  misc_feature (21)..(520): Homolog of NCBI NO: 15226830 NR Description: FAD-linked oxidoreductase family; protein id: [Arabidopsis thaliana] >gi|7485805|pir||T00461 probable berberine
  misc_feature (32)..(520): Homolog of NCBI NO: 15241495 NR Description: FAD-linked oxidoreductase family; protein id:
  misc_feature (25)..(522): Homolog of NCBI NO: 15241474 NR Description: FAD-linked oxidoreductase family; protein id: [Arabidopsis thaliana] >gi|10176891|dbj|BAB10121.1| berberine
MPGILYQLVVAAAICALSSGSIAVASGLNATDSFLVCLIGAGVPPRLLQTPASPSYSATLLSSLRNLRYVTSDIQRPVAIVAATEPAHAQAAVRCGRRHGVRVRARSGGHDYEGLSYASLDPRERFAVLDLAAFRDVRVDSARAEAWAGSGATLGEVYYAVAAASRVLAFPAGICPTVGVGGHLSGGGFGTLMRRYGLAADNVIDAVLVDADGRLLNRTTMGEDLFWAIRGGGGESFGVILSWKLRLVRVPETVTVFTVRRSINQSASQLITKWQAIAPALPSDLILRVAVRSQPARFEALFLGRCSRLLEHMRAHFPDLGVTQSDCEEISWIQSTVYFAFYSSSKPLELLLDRSGETPRYVKAKSDYVQEPIPRHVWERTWSWLEKPEAGLLILDPYGGRMGSISPSATPFPHRKGNLYNLQYYSYWFENGTAALEKRMSWVRGLYEEMEPYVSKNPRTGYVNYRDLDLGTNELEDNVTSYARARIWGEKYFKGNFERLAAVKAMADPDDFFRNEQSIPPLPAAKGWGFI

SEQ ID NO: 4908 - protein, 339 aa, Zea mays subsp. mays
  peptide (1)..(339): Ceres Seq. ID no. 12349026
  misc_feature (1)..(329): Homolog of NCBI NO: 15233411 NR Description: FAD-linked oxidoreductase family; protein id: [Arabidopsis thaliana] >gi|7488294|pir||T10624 reticuline oxidase
  misc_feature (1)..(330): Homolog of NCBI NO: 13161397 NR Description: CPRD2 [Vigna unguiculata]
  misc_feature (1)..(330): Homolog of NCBI NO: 15233424 NR Description: FAD-linked oxidoreductase family; protein id: supported by cDNA: gi_14194126 [Arabidopsis thaliana]
  misc_feature (1)..(328): Homolog of NCBI NO: 15241498 NR Description: FAD-linked oxidoreductase family; protein id:
  misc_feature (1)..(331): Homolog of NCBI NO: 15221473 NR Description: FAD-linked oxidoreductase family; protein id: supported by cDNA: gi_16930506 [Arabidopsis thaliana]
  misc_feature (1)..(330): Homolog of NCBI NO: 14194127 NR Description: AT4g20860/T13K14_20 [Arabidopsis thaliana]
  misc_feature (1)..(328): Homolog of NCBI NO: 28058799 NR Description: berberine bridge enzyme-like protein [Arabidopsis
  misc_feature (1)..(328): Homolog of NCBI NO: 15226830 NR Description: FAD-linked oxidoreductase family; protein id: [Arabidopsis thaliana] >gi|7485805|pir||T00461 probable berberine
  misc_feature (1)..(328): Homolog of NCBI NO: 15241495 NR Description: FAD-linked oxidoreductase family; protein id:
  misc_feature (1)..(330): Homolog of NCBI NO: 15241474 NR Description: FAD-linked oxidoreductase family; protein id: [Arabidopsis thaliana] >gi|10176891|dbj|BAB10121.1| berberine
MRRYGLAADNVIDAVLVDADGRLLNRTTMGEDLFWAIRGGGGESFGVILSWKLRLVRVPETVTVFTVRRSINQSASQLITKWQAIAPALPSDLILRVAVRSQPARFEALFLGRCSRLLEHMRAHFPDLGVTQSDCEEISWIQSTVYFAFYSSSKPLELLLDRSGETPRYVKAKSDYVQEPIPRHVWERTWSWLEKPEAGLLILDPYGGRMGSISPSATPFPHRKGNLYNLQYYSYWFENGTAALEKRMSWVRGLYEEMEPYVSKNPRTGYVNYRDLDLGTNELEDNVTSYARARIWGEKYFKGNFERLAAVKAMADPDDFFRNEQSIPPLPAAKGWGFI

SEQ ID NO: 4909 - DNA, 1599 bp, Zea mays subsp. mays
  misc_feature (1)..(1599): Ceres Seq. ID no. 13498780
  misc_feature: MA Experiment ID: 108529 Result: Down-regulated in Transcription
  misc_feature: MA Experiment 108529 PARAMETER Experiment Name: Zm_Imbibed_Seeds_P Parameter: Age (day) Value: 5 vs. 2
  misc_feature: MA Experiment 108529 PARAMETER Experiment Name: Zm_Imbibed_Seeds_P Parameter: Organism Value: Zea mays
  misc_feature: MA Experiment 108529 PARAMETER Experiment Name: Zm_Imbibed_Seeds_P Parameter: Plant Line Value: 35A19
  misc_feature: MA Experiment 108529 PARAMETER Experiment Name: Zm_Imbibed_Seeds_P Parameter: Tissue Value: Roots vs. Embryo
  misc_feature: MA Experiment ID: 108530 Result: Down-regulated in Transcription
  misc_feature: MA Experiment 108530 PARAMETER Experiment Name: Zm_Imbibed_Seeds_P Parameter: Age (day) Value: 6 vs. 2
  misc_feature: MA Experiment 108530 PARAMETER Experiment Name: Zm_Imbibed_Seeds_P Parameter: Organism Value: Zea mays
  misc_feature: MA Experiment 108530 PARAMETER Experiment Name: Zm_Imbibed_Seeds_P Parameter: Plant Line Value: 35A19
  misc_feature: MA Experiment 108530 PARAMETER Experiment Name: Zm_Imbibed_Seeds_P Parameter: Tissue Value: Aerial vs. Embryo
  misc_feature: MA Experiment ID: 108543 Result: Down-regulated in Transcription
  misc_feature: MA Experiment ID: 108544 Result: Up-regulated in Transcription
ttgctgtcgcacggagaagaaaaaaaaaacaggcactgagctgagatggcgaagcacttggctgccatgtgcaggtgcagcctcctagtgcttgtactgctctgcttgggctcccagctggcccaatcccaggtcctcttccagggtttcaactgggagtcgtggaagaagcaaggtgggtggtacaactacctcctggggcgggtggacgacatcgccgcgacgggggccacgcacgtctggctcccgccgccgtcgcactcggtggcgccgcaggggtacatgcccggccggctctacgacctggacgcgtccaagtacggcacccacgcggagctcaagtcgctcaccgcggcgttccacgccaagggcgtcaagtgcgtcgccgacgtcgtgatcaaccaccgctgcgccgactacaaggacggccgcggcatctactgcgtcttcgagggcggcacgcccgacagccgcctcgactggggccccgacatgatctgcagcgacgacacgcagtactccaacgggcgcgggcaccgcgacacgggggccgacttcgccgccgcgcccgacatcgaccacctcaacccgcgcgtgcagcaggagctctcggactggctcaactggctcaagtccgacctcggcttcgacggctggcgcctcgacttcgccaagggctactccgccgccgtcgccaaggtgtacgtcgacagcaccgcccccaccttcgtcgtcgccgagatatggagctccctccactacgacggcaacggcgagccgtccagcaaccaggacgccgacaggcaggagctggtcaactgggcgcaggcggtgggcggccccgccgcggcgttcgacttcaccaccaagggcgtgctgcaggcggccgtccagggcgagctgtggcgcatgaaggacggcaacggcaaggcgcccgggatgatcggctggctgccggagaaggccgtcacgttcgtcgacaaccacgacaccggctccacgcagaactcgtggccattcccctccgacaaggtcatgcagggctacgcctatatcctcacgcacccaggaactccatgcatcttctacgaccacgttttcgactggaacctgaagcaggagatcagcgcgctgtctgcggtgaggtcaagaaacgggatccacccggggagcgagctgaacatcctcgccgccgacggggatctctacgtcgccaagattgacgacaaggtcatcgtgaagatcgggtcacggtacgacgtcgggaacctgatcccctcagacttccacgccgttgcccatggcaacaactactgcgtttgggagaagcacggtctgagagttccagcggggcggcaccactagactagacccattccgcccagcaacccctacagataattctcttttcaggtccattttgaacctggaaaagaaatttaagagaggctaaataaccggaatacgattgtgtactgagcttctttcacgtaattattgaaagaagattataatgtttggatgcactattaattatgttggcatggggatttttgtaacctcttaaaacgaggaaataaagactgttcttattaagcc

SEQ ID NO: 4910 - protein, 439 aa, Zea mays subsp. mays
  peptide (1)..(439): Ceres Seq. ID no. 13498781
  misc_feature (1)..(439): Homolog of NCBI NO: 7435329 NR Description: alpha-amylase (EC 3.2.1.1) - maize
  misc_feature (1)..(439): Homolog of NCBI NO: 113680 NR Description: ALPHA-AMYLASE ISOZYME 3B PRECURSOR
  misc_feature (1)..(439): Homolog of NCBI NO: 113681 NR Description: ALPHA-AMYLASE ISOZYME 3C PRECURSOR
  misc_feature (1)..(439): Homolog of NCBI NO: 113683 NR Description: ALPHA-AMYLASE ISOZYME 3E PRECURSOR
  misc_feature (1)..(439): Homolog of NCBI NO: 11263719 NR Description: alpha-amylase (EC 3.2.1.1) isozyme III - rice
  misc_feature (3)..(438): Homolog of NCBI NO: 113682 NR Description: ALPHA-AMYLASE ISOZYME 3D PRECURSOR
  misc_feature (3)..(438): Homolog of NCBI NO: 11263717 NR Description: alpha-amylase (EC 3.2.1.1) isozyme I - rice
  misc_feature (3)..(438): Homolog of NCBI NO: 169755 NR Description: alpha-amylase (EC 3.2.1.1)
  misc_feature (1)..(434): Homolog of NCBI NO: 113679 NR Description: ALPHA-AMYLASE ISOZYME 3A PRECURSOR
  misc_feature (13)..(428): Homolog of NCBI NO: 22536012 NR Description: alpha-amylase precursor; 1,4-alpha-D-glucan
MAKHLAAMCRCSLLVLVLLCLGSQLAQSQVLFQGFNWESWKKQGGWYNYLLGRVDDIAATGATHVWLPPPSHSVAPQGYMPGRLYDLDASKYGTHAELKSLTAAFHAKGVKCVADVVINHRCADYKDGRGIYCVFEGGTPDSRLDWGPDMICSDDTQYSNGRGHRDTGADFAAAPDIDHLNPRVQQELSDWLNWLKSDLGFDGWRLDFAKGYSAAVAKVYVDSTAPTFVVAEIWSSLHYDGNGEPSSNQDADRQELVNWAQAVGGPAAAFDFTTKGVLQAAVQGELWRMKDGNGKAPGMIGWLPEKAVTFVDNHDTGSTQNSWPFPSDKVMQGYAYILTHPGTPCIFYDHVFDWNLKQEISALSAVRSRNGIHPGSELNILAADGDLYVAKIDDKVIVKIGSRYDVGNLIPSDFHAVAHGNNYCVWEKHGLRVPAGRHH

SEQ ID NO: 4911 - protein, 432 aa, Zea mays subsp. mays
  peptide (1)..(432): Ceres Seq. ID no. 13498782
  misc_feature (1)..(432): Homolog of NCBI NO: 7435329 NR Description: alpha-amylase (EC 3.2.1.1) - maize
  misc_feature (1)..(432): Homolog of NCBI NO: 113680 NR Description: ALPHA-AMYLASE ISOZYME 3B PRECURSOR
  misc_feature (1)..(432): Homolog of NCBI NO: 113681 NR Description: ALPHA-AMYLASE ISOZYME 3C PRECURSOR
  misc_feature (1)..(432): Homolog of NCBI NO: 113683 NR Description: ALPHA-AMYLASE ISOZYME 3E PRECURSOR
  misc_feature (1)..(432): Homolog of NCBI NO: 11263719 NR Description: alpha-amylase (EC 3.2.1.1) isozyme III - rice
  misc_feature (1)..(431): Homolog of NCBI NO: 113682 NR Description: ALPHA-AMYLASE ISOZYME 3D PRECURSOR
  misc_feature (1)..(431): Homolog of NCBI NO: 11263717 NR Description: alpha-amylase (EC 3.2.1.1) isozyme I - rice
  misc_feature (1)..(431): Homolog of NCBI NO: 169755 NR Description: alpha-amylase (EC 3.2.1.1)
  misc_feature (1)..(427): Homolog of NCBI NO: 113679 NR Description: ALPHA-AMYLASE ISOZYME 3A PRECURSOR
  misc_feature (6)..(421): Homolog of NCBI NO: 22536012 NR Description: alpha-amylase precursor; 1,4-alpha-D-glucan
MCRCSLLVLVLLCLGSQLAQSQVLFQGFNWESWKKQGGWYNYLLGRVDDIAATGATHVWLPPPSHSVAPQGYMPGRLYDLDASKYGTHAELKSLTAAFHAKGVKCVADVVINHRCADYKDGRGIYCVFEGGTPDSRLDWGPDMICSDDTQYSNGRGHRDTGADFAAAPDIDHLNPRVQQELSDWLNWLKSDLGFDGWRLDFAKGYSAAVAKVYVDSTAPTFVVAEIWSSLHYDGNGEPSSNQDADRQELVNWAQAVGGPAAAFDFTTKGVLQAAVQGELWRMKDGNGKAPGMIGWLPEKAVTFVDNHDTGSTQNSWPFPSDKVMQGYAYILTHPGTPCIFYDHVFDWNLKQEISALSAVRSRNGIHPGSELNILAADGDLYVAKIDDKVIVKIGSRYDVGNLIPSDFHAVAHGNNYCVWEKHGLRVPAGRHH

SEQ ID NO: 4912 - protein, 360 aa, Zea mays subsp. mays
  peptide (1)..(360): Ceres Seq. ID no. 13498783
  misc_feature (1)..(360): Homolog of NCBI NO: 7435329 NR Description: alpha-amylase (EC 3.2.1.1) - maize
  misc_feature (1)..(360): Homolog of NCBI NO: 113680 NR Description: ALPHA-AMYLASE ISOZYME 3B PRECURSOR
  misc_feature (1)..(360): Homolog of NCBI NO: 113681 NR Description: ALPHA-AMYLASE ISOZYME 3C PRECURSOR
  misc_feature (1)..(360): Homolog of NCBI NO: 113683 NR Description: ALPHA-AMYLASE ISOZYME 3E PRECURSOR
  misc_feature (1)..(360): Homolog of NCBI NO: 11263719 NR Description: alpha-amylase (EC 3.2.1.1) isozyme III - rice
  misc_feature (1)..(359): Homolog of NCBI NO: 113682 NR Description: ALPHA-AMYLASE ISOZYME 3D PRECURSOR
  misc_feature (1)..(359): Homolog of NCBI NO: 11263717 NR Description: alpha-amylase (EC 3.2.1.1) isozyme I - rice
  misc_feature (1)..(359): Homolog of NCBI NO: 169755 NR Description: alpha-amylase (EC 3.2.1.1)
  misc_feature (1)..(355): Homolog of NCBI NO: 113679 NR Description: ALPHA-AMYLASE ISOZYME 3A PRECURSOR
  misc_feature (1)..(349): Homolog of NCBI NO: 22536012 NR Description: alpha-amylase precursor; 1,4-alpha-D-glucan
MPGRLYDLDASKYGTHAELKSLTAAFHAKGVKCVADVVINHRCADYKDGRGIYCVFEGGTPDSRLDWGPDMICSDDTQYSNGRGHRDTGADFAAAPDIDHLNPRVQQELSDWLNWLKSDLGFDGWRLDFAKGYSAAVAKVYVDSTAPTFVVAEIWSSLHYDGNGEPSSNQDADRQELVNWAQAVGGPAAAFDFTTKGVLQAAVQGELWRMKDGNGKAPGMIGWLPEKAVTFVDNHDTGSTQNSWPFPSDKVMQGYAYILTHPGTPCIFYDHVFDWNLKQEISALSAVRSRNGIHPGSELNILAADGDLYVAKIDDKVIVKIGSRYDVGNLIPSDFHAVAHGNNYCVWEKHGLRVPAGRHH

SEQ ID NO: 4913 - DNA, 1212 bp, Zea mays subsp. mays
  misc_feature (1)..(1212): Ceres Seq. ID no. 12353792
  misc_feature: MA Experiment ID: 108529 Result: Up-regulated in Transcription
  misc_feature: MA Experiment 108529 PARAMETER Experiment Name: Zm_Imbibed_Seeds_P Parameter: Age (day) Value: 5 vs. 2
  misc_feature: MA Experiment 108529 PARAMETER Experiment Name: Zm_Imbibed_Seeds_P Parameter: Organism Value: Zea mays
  misc_feature: MA Experiment 108529 PARAMETER Experiment Name: Zm_Imbibed_Seeds_P Parameter: Plant Line Value: 35A19
  misc_feature: MA Experiment 108529 PARAMETER Experiment Name: Zm_Imbibed_Seeds_P Parameter: Tissue Value: Roots vs. Embryo
  misc_feature: MA Experiment ID: 108535 Result: Down-regulated in Transcription
  misc_feature: MA Experiment 108535 PARAMETER Experiment Name: Zm_Meristem_P Parameter: Age (day) Value: 8
  misc_feature: MA Experiment 108535 PARAMETER Experiment Name: Zm_Meristem_P Parameter: Organism Value: Zea mays
  misc_feature: MA Experiment 108535 PARAMETER Experiment Name: Zm_Meristem_P Parameter: Plant Line Value: 35A19
  misc_feature: MA Experiment 108535 PARAMETER Experiment Name: Zm_Meristem_P Parameter: Tissue Value: Root Meristem vs. Above Root Meristem
  misc_feature: MA Experiment ID: 20000108 Result: Down-regulated in Transcription
  misc_feature: MA Experiment 20000108 PARAMETER Experiment Name: Zm_Root-Tips_P Parameter: Age (day) Value: 12
  misc_feature: MA Experiment 20000108 PARAMETER Experiment Name: Zm_Root-Tips_P Parameter: Organism Value: Zea mays
  misc_feature: MA Experiment 20000108 PARAMETER Experiment Name: Zm_Root-Tips_P Parameter: Tissue Value: Root tips vs. Root mid region    35
  misc_feature: MA Experiment 20000108 PARAMETER Experiment Name: Zm_Root-Tips_P Parameter: Tissue Value: Root tips vs. Root mid region   Sequence Listing-Misc Features (4)
  misc_feature: MA Experiment ID: 20000480 Result: Down-regulated in Transcription
  misc_feature: MA Experiment 20000480 PARAMETER Experiment Name: Zm_Drought_P Parameter: Age (day) Value: 11
  misc_feature: MA Experiment 20000480 PARAMETER Experiment Name: Zm_Drought_P Parameter: Organism Value: Zea mays
  misc_feature: MA Experiment 20000480 PARAMETER Experiment Name: Zm_Drought_P Parameter: Plant Line Value: 35A19
  misc_feature: MA Experiment 20000480 PARAMETER Experiment Name: Zm_Drought_P Parameter: Timepoint (hr) Value: 72
  misc_feature: MA Experiment 20000480 PARAMETER Experiment Name: Zm_Drought_P Parameter: Tissue Value: Aerial
  misc_feature: MA Experiment 20000480 PARAMETER Experiment Name: Zm_Drought_P Parameter: Treatment Value: Drought vs. No Drought
  misc_feature: MA Experiment ID: 20000535 Result: Down-regulated in Transcription
  misc_feature: MA Experiment 20000535 PARAMETER Experiment Name: Zm_Hybrid_Seed_Dev_P Parameter: DAP Value: 30 vs. 12
  misc_feature: MA Experiment 20000535 PARAMETER Experiment Name: Zm_Hybrid_Seed_Dev_P Parameter: Organism Value: Zea mays
  misc_feature: MA Experiment 20000535 PARAMETER Experiment Name: Zm_Hybrid_Seed_Dev_P Parameter: Plant Line Value: 35A19
  misc_feature: MA Experiment 20000535 PARAMETER Experiment Name: Zm_Hybrid_Seed_Dev_P Parameter: Tissue Value: Embryo vs. Unfert Floret
attacgcaccttcacataacactgcaaaagcactcctctcttcgtcctccccctcccacctccatcccatcacataccataccattccataccaccagagaagaaccagtctcgctcgctcccaactcccaagccaagccggatcccaaatcggcacagcgcacccactccgctcggtcccttcgttcacccccatcatccatccatccatccagccatgggcggcaaggactgcggcaaccacggcgaggacgacctgcggcggtcgtgccggcgcctgctagcgatcctcctagtcctggccctgatcgtgggcgtgatcgcgctgatcatctacctggtggtccggcccacgcacccgcgcttctacctacaggacgcgtcgctccagcagctagacctgtccaactccaccaccgcctcctccccctccgcgtcctcgtccctcctctccacgacgctgcaggtgacgctggcctcgcgcaacccgaacgagcgcgtgggggtgtactacgaccggctggacgtgtacgcgtcgtacaagtaccagcaggtgacggtggccgcggcgctgccggccgtgtaccagggccacggcgacgtggacgtgtggtcgcccgtgctgtcgggcgggcccggcgtccccttcgcgccctacctcgccgacgcgctccgccaggactgccaggcgggctacctcgtcctccaggtcaaggtcgacggccgcgtgcggtggaaggtcggcagctggatctccggccactaccacctcttcgtcacctgccccgcgttcctcgtcaccgccggcggcaacggcgcccccggcgcttccgggttcaggttccagaccaccacctactgccacgtcgaagtttaatagattaggagcgagaggaggaggagggaggggaaggaagcanagagaccatggtccatggctctgctgctcctcctgctgccgttgcctggtgtggtaataactctctctatctctctctctgtccgctgctggcgttactgctgcagtgatgcgggatgtaaaggaggggtaaaaaagttcctttcgttttcgcctccctcttttttttttgttttttttttttttgcatcttctccttcacctttccatatactactagtatgctctgtcgactgttgttcaaaggaagcttccaattgtcaataaacattttggatcggaggatcaattgc

SEQ ID NO: 4914 - protein, 294 aa, Zea mays subsp. mays
  peptide (1)..(294): Ceres Seq. ID no. 12353793
ITHLHITLQKHSSLRPPPPTSIPSHTIPFHTTREEPVSLAPNSQAKPDPKSAQRTHSARSLRSPPSSIHPSSHGRQGLRQPRRGRPAAVVPAPASDPPSPGPDRGRDRADHLPGGPAHAPALLPTGRVAPAARPVQLHHRLLPLRVLVPPLHDAAGDAGLAQPERARGGVLRPAGRVRVVQVPAGDGGRGAAGRVPGPRRRGRVVARAVGRARRPLRALPRRRAPPGLPGGLPRPPGQGRRPRAVEGRQLDLRPLPPLRHLPRVPRHRRRQRRPRRFRVQVPDHHLLPRRSLID

SEQ ID NO: 4915 - protein, 219 aa, Zea mays subsp. mays
  peptide (1)..(219): Ceres Seq. ID no. 12353794
  misc_feature (1)..(219): Homolog of NCBI NO: 38637038 NR Description: harpin-induced protein 1 family (HIN1)-like
  misc_feature (1)..(219): Homolog of NCBI NO: 15229906 NR Description: hairpin-induced protein, putative (HIN1); protein At3g44220.1 [Arabidopsis thaliana] >gi|11282595|pir||T49138
  misc_feature (1)..(219): Homolog of NCBI NO: 22326984 NR Description: similar to hairpin-induced protein, putative
  misc_feature (1)..(219): Homolog of NCBI NO: 15240001 NR Description: hairpin-induced protein, putative (HIN1); protein
  misc_feature (4)..(219): Homolog of NCBI NO: 18399308 NR Description: VAMP protein SEC22; protein id: At3g11660.1, by cDNA: 8166., supported by cDNA: gi_9502171 [Arabidopsis
  misc_feature (4)..(219): Homolog of NCBI NO: 28392929 NR Description: putative VAMP protein SEC22 [Arabidopsis thaliana]
  misc_feature (1)..(219): Homolog of NCBI NO: 15227538 NR Description: hairpin-induced protein, putative (HIN1); protein
  misc_feature (4)..(219): Homolog of NCBI NO: 15231227 NR Description: hairpin-induced protein, putative (HIN1); protein At3g52470.1, supported by cDNA: 92178., supported by cDNA: supported by cDNA: gi_21281063 [Arabidopsis thaliana]
  misc_feature (1)..(193): Homolog of NCBI NO: 15233951 NR Description: hairpin-induced protein, putative (HIN1); protein At4g09590.1 [Arabidopsis thaliana] >gi|25354574|pir||A85098
  misc_feature (3)..(199): Homolog of NCBI NO: 38344036 NR Description: OJ991214_12.17 [Oryza sativa (japonica
MGGKDCGNHGEDDLRRSCRRLLAILLVLALIVGVIALIIYLVVRPTHPRFYLQDASLQQLDLSNSTTASSPSASSSLLSTTLQVTLASRNPNERVGVYYDRLDVYASYKYQQVTVAAALPAVYQGHGDVDVWSPVLSGGPGVPFAPYLADALRQDCQAGYLVLQVKVDGRVRWKVGSWISGHYHLFVTCPAFLVTAGGNGAPGASGFRFQTTTYCHVEV

SEQ ID NO: 4916 - DNA, 1301 bp, Zea mays subsp. mays
  misc_feature (1)..(1301): Ceres Seq. ID no. 12372750
  misc_feature: MA Experiment ID: 108522 Result: Up-regulated in Transcription
  misc_feature: MA Experiment 108522 PARAMETER Experiment Name: Zm_42deg_Heat_P Parameter: Age (day) Value: 8
  misc_feature: MA Experiment 108522 PARAMETER Experiment Name: Zm_42deg_Heat_P Parameter: Organism Value: Zea mays
  misc_feature: MA Experiment 108522 PARAMETER Experiment Name: Zm_42deg_Heat_P Parameter: Plant Line Value: 35A19
  misc_feature: MA Experiment 108522 PARAMETER Experiment Name: Zm_42deg_Heat_P Parameter: Temperature (deg C) Value: 42 vs. 22
  misc_feature: MA Experiment 108522 PARAMETER Experiment Name: Zm_42deg_Heat_P Parameter: Timepoint (hr) Value: 1
  misc_feature: MA Experiment 108522 PARAMETER Experiment Name: Zm_42deg_Heat_P Parameter: Tissue Value: Aerial
  misc_feature: MA Experiment ID: 108523 Result: Up-regulated in Transcription
  misc_feature: MA Experiment 108523 PARAMETER Experiment Name: Zm_42deg_Heat_P Parameter: Age (day) Value: 8
  misc_feature: MA Experiment 108523 PARAMETER Experiment Name: Zm_42deg_Heat_P Parameter: Organism Value: Zea mays
  misc_feature: MA Experiment 108523 PARAMETER Experiment Name: Zm_42deg_Heat_P Parameter: Plant Line Value: 35A19
  misc_feature: MA Experiment 108523 PARAMETER Experiment Name: Zm_42deg_Heat_P Parameter: Temperature (deg C) Value: 42 vs. 22
  misc_feature: MA Experiment 108523 PARAMETER Experiment Name: Zm_42deg_Heat_P Parameter: Timepoint (hr) Value: 6
  misc_feature: MA Experiment 108523 PARAMETER Experiment Name: Zm_42deg_Heat_P Parameter: Tissue Value: Aerial
  misc_feature: MA Experiment ID: 108556 Result: Up-regulated in Transcription
  misc_feature: MA Experiment 108556 PARAMETER Experiment Name: Zm_Drought_P Parameter: Age (day) Value: 9
  misc_feature: MA Experiment 108556 PARAMETER Experiment Name: Zm_Drought_P Parameter: Organism Value: Zea mays
  misc_feature: MA Experiment 108556 PARAMETER Experiment Name: Zm_Drought_P Parameter: Plant Line Value: 35A19
  misc_feature: MA Experiment 108556 PARAMETER Experiment Name: Zm_Drought_P Parameter: Timepoint (hr) Value: 24
  misc_feature: MA Experiment 108556 PARAMETER Experiment Name: Zm_Drought_P Parameter: Tissue Value: Aerial
  misc_feature: MA Experiment 108556 PARAMETER Experiment Name: Zm_Drought_P Parameter: Treatment Value: Drought vs. No Drought
  misc_feature: MA Experiment ID: 108597 Result: Up-regulated in Transcription
  misc_feature: MA Experiment 108597 PARAMETER Experiment Name: Zm_100uM_ABA_P Parameter: Age (day) Value: 9
  misc_feature: MA Experiment 108597 PARAMETER Experiment Name: Zm_100uM_ABA_P Parameter: Organism Value: Zea mays
  misc_feature: MA Experiment 108597 PARAMETER Experiment Name: Zm_100uM_ABA_P Parameter: Plant Line Value: 35A19
  misc_feature: MA Experiment 108597 PARAMETER Experiment Name: Zm_100uM_ABA_P Parameter: Timepoint (hr) Value: 24
  misc_feature: MA Experiment 108597 PARAMETER Experiment Name: Zm_100uM_ABA_P Parameter: Tissue Value: Aerial
  misc_feature: MA Experiment 108597 PARAMETER Experiment Name: Zm_100uM_ABA_P Parameter: Treatment Value: 100uM ABA vs. No Treatment
  misc_feature: MA Experiment ID: 20000480 Result: Up-regulated in Transcription
  misc_feature: MA Experiment 20000480 PARAMETER Experiment Name: Zm_Drought_P Parameter: Age (day) Value: 11
  misc_feature: MA Experiment 20000480 PARAMETER Experiment Name: Zm_Drought_P Parameter: Organism Value: Zea mays
  misc_feature: MA Experiment 20000480 PARAMETER Experiment Name: Zm_Drought_P Parameter: Plant Line Value: 35A19
  misc_feature: MA Experiment 20000480 PARAMETER Experiment Name: Zm_Drought_P Parameter: Timepoint (hr) Value: 72
  misc_feature: MA Experiment 20000480 PARAMETER Experiment Name: Zm_Drought_P Parameter: Tissue Value: Aerial
  misc_feature: MA Experiment 20000480 PARAMETER Experiment Name: Zm_Drought_P Parameter: Treatment Value: Drought vs. No Drought
  misc_feature: MA Experiment ID: 20000535 Result: Up-regulated in Transcription
  misc_feature: MA Experiment 20000535 PARAMETER Experiment Name: Zm_Hybrid_Seed_Dev_P Parameter: DAP Value: 30 vs. 12
  misc_feature: MA Experiment 20000535 PARAMETER Experiment Name: Zm_Hybrid_Seed_Dev_P Parameter: Organism Value: Zea mays
  misc_feature: MA Experiment 20000535 PARAMETER Experiment Name: Zm_Hybrid_Seed_Dev_P Parameter: Plant Line Value: 35A19
  misc_feature: MA Experiment 20000535 PARAMETER Experiment Name: Zm_Hybrid_Seed_Dev_P Parameter: Tissue Value: Embryo vs. Unfert Floret
gcacgagaccattacctagaacatcctaatcgaaaaatctttgcgcttggggcaatgacgcagcttatgaggtcataccgaggcgcgtcaattgctggttgaaaactatttccaaaccccctctttggcccactgggccactgagaatttctggaagggctccttttcctcggataagttcctattgagatcatcgcatcatttaggagaatgaagaaactcgttcaagacctctcagtaattgaagctgcactcaggacatcatcaaagctggttgtaagttcaaatgggaaacgggtcaggaggttacatccattgccacacaaagaattgaaagattcaaagaaaagcactgttttggtcgaaaatctacctccagatttctcaatggagagtattcaggaaaaattcgcaacagtgggcaaagttgtgaacataacaattaatgatccagaatcagtgaaagaattttcaactgctaagaagcctgacttcaatttaagttttaaggctcatgtacttgttgaatatgaagcagtggaggctgctgagaaggctgttactgccctaagtgatgagagcaactggagaactgggatgaaagtcaggcttctgtctaaacaaagtgtaatgggaccaggaaagtataaaaaaccttctaaagaaaatcaagatgcagtttccaaaatgattgatcagaatcaacattcaaaagaagaccagcttaaaaccttggaaaagatctccggtgctgatgcagtggggattaccaaggacagagataatttgaaacctgtttttatcactgagactgagcaccaagatcagaagccaaatgctagaggacgaaaaggatggtacaaaggtcaaggtcagatgcagcaaaatgcaaacaaacaaggcagttgtggttccgagtcattaaacaagcctatttctggaccgaggatgccagatggaacaaggggcttcacactgggacgtggtagatctcttccactacagaagtctgagaaggctgaagagtagagctaccaaaaaaggcctgttaagaaccttatccaaagaagctgggtaaaatctaacagaaaacctttgcttttttttttttgaaacttaagatcatcgaagccgttctttgcatggaatgggacacagaagaaagggaatcttggaatggctttctctctgcaagaaatggaacacaaaagggaatctgggaatgacttgtacagaaacacaattgtctgggggtagttccgagttcactcgtatggaacacagtagaacctttgcatgtc

SEQ ID NO: 4917 - protein, 272 aa, Zea mays subsp. mays
  peptide (1)..(272): Ceres Seq. ID no. 12372751
  misc_feature (49)..(134): Pfam Name: RNA recognition motif. (a.k.a. RRM, RBD, or RNP domain) Pfam Description: RNA recognition motif. (a.k.a. RRM, RBD, or RNP
  misc_feature (1)..(272): Homolog of NCBI NO: 34909652 NR Description: RNA-binding protein-like [Oryza sativa (japonica
  misc_feature (1)..(263): Homolog of NCBI NO: 30694926 NR Description: RNA recognition motif (RRM)-containing protein
  misc_feature (1)..(263): Homolog of NCBI NO: 10177706 NR Description: contains similarity to RNA-binding
  misc_feature (1)..(263): Homolog of NCBI NO: 30694922 NR Description: RNA recognition motif (RRM)-containing protein thaliana] >gi|15215748|gb|AAK91419.1| AT5g46250/MPL12_3 thaliana] >gi|23308375|gb|AAN18157.1| At5g46250/MPL12_3
  misc_feature (1)..(262): Homolog of NCBI NO: 34394175 NR Description: putative RNA-binding protein homolog [Oryza
  misc_feature (1)..(260): Homolog of NCBI NO: 15230287 NR Description: RNA-binding protein, putative; protein id:
  misc_feature (1)..(232): Homolog of NCBI NO: 15724224 NR Description: At2g43970/F6E13.10 [Arabidopsis thaliana]
  misc_feature (1)..(232): Homolog of NCBI NO: 18406414 NR Description: VirF-interacting protein FIP1; protein id: supported by cDNA: gi_12744918, supported by cDNA: gi_14030638,
  misc_feature (1)..(171): Homolog of NCBI NO: 34896588 NR Description: putative RNA-binding protein [Oryza sativa]
  misc_feature (1)..(148): Homolog of NCBI NO: 6449448 NR Description: RNA-binding protein homolog [Brassica napus]
MKKLVQDLSVIEAALRTSSKLVVSSNGKRVRRLHPLPHKELKDSKKSTVLVENLPPDFSMESIQEKFATVGKVVNITINDPESVKEFSTAKKPDFNLSFKAHVLVEYEAVEAAEKAVTALSDESNWRTGMKVRLLSKQSVMGPGKYKKPSKENQDAVSKMIDQNQHSKEDQLKTLEKISGADAVGITKDRDNLKPVFITETEHQDQKPNARGRKGWYKGQGQMQQNANKQGSCGSESLNKPISGPRMPDGTRGFTLGRGRSLPLQKSEKAEE

SEQ ID NO: 4918 - protein, 213 aa, Zea mays subsp. mays
  peptide (1)..(213): Ceres Seq. ID no. 12372752
  misc_feature (1)..(75): Pfam Name: RNA recognition motif. (a.k.a. RRM, RBD, or RNP domain) Pfam Description: RNA recognition motif. (a.k.a. RRM, RBD, or RNP
  misc_feature (1)..(213): Homolog of NCBI NO: 34909652 NR Description: RNA-binding protein-like [Oryza sativa (japonica
  misc_feature (1)..(204): Homolog of NCBI NO: 30694926 NR Description: RNA recognition motif (RRM)-containing protein
  misc_feature (1)..(204): Homolog of NCBI NO: 10177706 NR Description: contains similarity to RNA-binding
  misc_feature (1)..(204): Homolog of NCBI NO: 30694922 NR Description: RNA recognition motif (RRM)-containing protein thaliana] >gi|15215748|gb|AAK91419.1| AT5g46250/MPL12_3 thaliana] >gi|23308375|gb|AAN18157.1| At5g46250/MPL12_3
  misc_feature (1)..(203): Homolog of NCBI NO: 34394175 NR Description: putative RNA-binding protein homolog [Oryza
  misc_feature (1)..(201): Homolog of NCBI NO: 15230287 NR Description: RNA-binding protein, putative; protein id:
  misc_feature (1)..(173): Homolog of NCBI NO: 15724224 NR Description: At2g43970/F6E13.10 [Arabidopsis thaliana]
  misc_feature (1)..(173): Homolog of NCBI NO: 18406414 NR Description: VirF-interacting protein FIP1; protein id: supported by cDNA: gi_12744918, supported by cDNA: gi_14030638,
  misc_feature (1)..(112): Homolog of NCBI NO: 34896588 NR Description: putative RNA-binding protein [Oryza sativa]
  misc_feature (1)..(89): Homolog of NCBI NO: 6449448 NR Description: RNA-binding protein homolog [Brassica napus]
MESIQEKFATVGKVVNITINDPESVKEFSTAKKPDFNLSFKAHVLVEYEAVEAAEKAVTALSDESNWRTGMKVRLLSKQSVMGPGKYKKPSKENQDAVSKMIDQNQHSKEDQLKTLEKISGADAVGITKDRDNLKPVFITETEHQDQKPNARGRKGWYKGQGQMQQNANKQGSCGSESLNKPISGPRMPDGTRGFTLGRGRSLPLQKSEKAEE

SEQ ID NO: 4919 - protein, 143 aa, Zea mays subsp. mays
  peptide (1)..(143): Ceres Seq. ID no. 12372753
  misc_feature (1)..(143): Homolog of NCBI NO: 34909652 NR Description: RNA-binding protein-like [Oryza sativa (japonica
  misc_feature (1)..(134): Homolog of NCBI NO: 30694926 NR Description: RNA recognition motif (RRM)-containing protein
  misc_feature (1)..(134): Homolog of NCBI NO: 10177706 NR Description: contains similarity to RNA-binding
  misc_feature (1)..(134): Homolog of NCBI NO: 30694922 NR Description: RNA recognition motif (RRM)-containing protein thaliana] >gi|15215748|gb|AAK91419.1| AT5g46250/MPL12_3 thaliana] >gi|23308375|gb|AAN18157.1| At5g46250/MPL12_3
  misc_feature (1)..(133): Homolog of NCBI NO: 34394175 NR Description: putative RNA-binding protein homolog [Oryza
  misc_feature (1)..(131): Homolog of NCBI NO: 15230287 NR Description: RNA-binding protein, putative; protein id:
  misc_feature (1)..(103): Homolog of NCBI NO: 15724224 NR Description: At2g43970/F6E13.10 [Arabidopsis thaliana]
  misc_feature (1)..(103): Homolog of NCBI NO: 18406414 NR Description: VirF-interacting protein FIP1; protein id: supported by cDNA: gi_12744918, supported by cDNA: gi_14030638,
  misc_feature (1)..(42): Homolog of NCBI NO: 34896588 NR Description: putative RNA-binding protein [Oryza sativa]
  misc_feature (1)..(19): Homolog of NCBI NO: 6449448 NR Description: RNA-binding protein homolog [Brassica napus]
MKVRLLSKQSVMGPGKYKKPSKENQDAVSKMIDQNQHSKEDQLKTLEKISGADAVGITKDRDNLKPVFITETEHQDQKPNARGRKGWYKGQGQMQQNANKQGSCGSESLNKPISGPRMPDGTRGFTLGRGRSLPLQKSEKAEE

SEQ ID NO: 4920 - DNA, 1315 bp, Zea mays subsp. mays
  misc_feature (1)..(1315): Ceres Seq. ID no. 12434961
  misc_feature: MA Experiment ID: 108522 Result: Up-regulated in Transcription
  misc_feature: MA Experiment 108522 PARAMETER Experiment Name: Zm_42deg_Heat_P Parameter: Age (day) Value: 8
  misc_feature: MA Experiment 108522 PARAMETER Experiment Name: Zm_42deg_Heat_P Parameter: Organism Value: Zea mays
  misc_feature: MA Experiment 108522 PARAMETER Experiment Name: Zm_42deg_Heat_P Parameter: Plant Line Value: 35A19
  misc_feature: MA Experiment 108522 PARAMETER Experiment Name: Zm_42deg_Heat_P Parameter: Temperature (deg C) Value: 42 vs. 22
  misc_feature: MA Experiment 108522 PARAMETER Experiment Name: Zm_42deg_Heat_P Parameter: Timepoint (hr) Value: 1
  misc_feature: MA Experiment 108522 PARAMETER Experiment Name: Zm_42deg_Heat_P Parameter: Tissue Value: Aerial
aagcaggatcatcatcatcagaagcagcagcaaggcaacatgtctcagcacggcggcctcggcgacacggcccggcggtggcgcgagctccacggcgacggcggctgggcgggaacgctggacccgctggacctcgacctgcggcgcaccgtgctccgctacggcgagatggcgcaggcgacctacgacgccttcaacaacgagcgggcgtcgccgcacgcggggctgtcccgcttcgccagggcgcgcttcttcgaccgggtgcggctgccggcgcacgccgccgcgtaccgggtcaccaggttcctgtacgccacgtcgtcggtggccgtgccggacgccttcatcctcaggtccgtgtccaggtcgcgccggtgcagggagtccaactggatcggctacgtcgcggtggccaccgacgaagggaaggccgcgctcggccgccgcgacgtcgtggtcgcgtggcgcggcaccatgcgggcgctggagtgggccgacgacctcgagttccccatggtgccgacgggaggcctcctcggggacggcgacgccatggtgcaccgcggctggctgtccatgtacacctccagcgacccggcgtccagccacaaccaggacagcgcacggcatcaggcgctgggcgaggtgcggaggctggtggacgcgtacaggggcgaggagctgagcatcaccgtgacgggccacagcctcggcgcggcgctagccacgctcaacgcgttcgacatcgccgccaacggctacaacgtgacggccacgggcgcggccgcctgcccggtgacctcgttcgcgttcgccagcccgcgcgtcggcggcggcggcttcaagaagcggttcgacgccgtcccggggctgcggctcctccgcgtccgcaacgcccgcgacgtggttcccaagtacccggtcgtgttcctaccacgacgtaggcgcggagctcgcgatcgacacgggggagtcgccgtacctgagaagccccgggggcgagcagacctggcacaacctcgaggtgtacctgcacggcgtggcgggcacgcggggcgcgcgcggcgggttcgagctcgccgtggcgcgggacgtggcgctggtgaacaaggcgtacgacgccctgcgggaccaccacggggtgccgccagggtggtgggtgccgctgaacaggggaatggtggagggcgccgacgggcgctggagcttggtggattgcgaggaggacgaggatgatgagtagtagacagcagacggagtaaacacttggcatgctggcggcagacaacatctgtagctgcccttgtgcgtcgcc

SEQ ID NO: 4921 - protein, 411 aa, Zea mays subsp. mays
  peptide (1)..(411): Ceres Seq. ID no. 12434962
  misc_feature (14)..(307): Homolog of NCBI NO: 34911830 NR Description: lipase-like protein [Oryza sativa (japonica
  misc_feature (24)..(309): Homolog of NCBI NO: 34911832 NR Description: lipase-like protein [Oryza sativa (japonica
  misc_feature (24)..(309): Homolog of NCBI NO: 15233922 NR Description: lipase-like protein; protein id: At4g18550.1
  misc_feature (25)..(309): Homolog of NCBI NO: 21537306 NR Description: lipase-like protein [Arabidopsis thaliana]
  misc_feature (25)..(309): Homolog of NCBI NO: 15221426 NR Description: lipase-like protein; protein id: At1g06250.1, by cDNA: 12912. [Arabidopsis thaliana] >gi|25406908|pir||C86198
  misc_feature (24)..(277): Homolog of NCBI NO: 34911870 NR Description: lipase-like protein [Oryza sativa (japonica
  misc_feature (8)..(307): Homolog of NCBI NO: 34910484 NR Description: putative lipase [Oryza sativa (japonica
  misc_feature (19)..(168): Homolog of NCBI NO: 4103627 NR Description: lipase [Dianthus caryophyllus]
  misc_feature (181)..(308): Homolog of NCBI NO: 4103627 NR Description: lipase [Dianthus caryophyllus]
  misc_feature (8)..(314): Homolog of NCBI NO: 30679836 NR Description: lipase (class 3) family [Arabidopsis thaliana]
KQDHHHQKQQQGNMSQHGGLGDTARRWRELHGDGGWAGTLDPLDLDLRRTVLRYGEMAQATYDAFNNERASPHAGLSRFARARFFDRVRLPAHAAAYRVTRFLYATSSVAVPDAFILRSVSRSRRCRESNWIGYVAVATDEGKAALGRRDVVVAWRGTMRALEWADDLEFPMVPTGGLLGDGDAMVHRGWLSMYTSSDPASSHNQDSARHQALGEVRRLVDAYRGEELSITVTGHSLGAALATLNAFDIAANGYNVTATGAAACPVTSFAFASPRVGGGGFKKRFDAVPGLRLLRVRNARDVVPKYPVVFLPRRRRGARDRHGGVAVPEKPRGRADLAQPRGVPARRGGHAGRARRVRARRGAGRGAGEQGVRRPAGPPRGAARVVGAAEQGNGGGRRRALELGGLRGGRG

SEQ ID NO: 4922 - protein, 398 aa, Zea mays subsp. mays
  peptide (1)..(398): Ceres Seq. ID no. 12434963
  misc_feature (1)..(294): Homolog of NCBI NO: 34911830 NR Description: lipase-like protein [Oryza sativa (japonica
  misc_feature (11)..(296): Homolog of NCBI NO: 34911832 NR Description: lipase-like protein [Oryza sativa (japonica
  misc_feature (11)..(296): Homolog of NCBI NO: 15233922 NR Description: lipase-like protein; protein id: At4g18550.1
  misc_feature (12)..(296): Homolog of NCBI NO: 21537306 NR Description: lipase-like protein [Arabidopsis thaliana]
  misc_feature (12)..(296): Homolog of NCBI NO: 15221426 NR Description: lipase-like protein; protein id: At1g06250.1, by cDNA: 12912. [Arabidopsis thaliana] >gi|25406908|pir||C86198
  misc_feature (11)..(264): Homolog of NCBI NO: 34911870 NR Description: lipase-like protein [Oryza sativa (japonica
  misc_feature (1)..(294): Homolog of NCBI NO: 34910484 NR Description: putative lipase [Oryza sativa (japonica
  misc_feature (6)..(155): Homolog of NCBI NO: 4103627 NR Description: lipase [Dianthus caryophyllus]
  misc_feature (168)..(295): Homolog of NCBI NO: 4103627 NR Description: lipase [Dianthus caryophyllus]
  misc_feature (1)..(301): Homolog of NCBI NO: 30679836 NR Description: lipase (class 3) family [Arabidopsis thaliana]
MSQHGGLGDTARRWRELHGDGGWAGTLDPLDLDLRRTVLRYGEMAQATYDAFNNERASPHAGLSRFARARFFDRVRLPAHAAAYRVTRFLYATSSVAVPDAFILRSVSRSRRCRESNWIGYVAVATDEGKAALGRRDVVVAWRGTMRALEWADDLEFPMVPTGGLLGDGDAMVHRGWLSMYTSSDPASSHNQDSARHQALGEVRRLVDAYRGEELSITVTGHSLGAALATLNAFDIAANGYNVTATGAAACPVTSFAFASPRVGGGGFKKRFDAVPGLRLLRVRNARDVVPKYPVVFLPRRRRGARDRHGGVAVPEKPRGRADLAQPRGVPARRGGHAGRARRVRARRGAGRGAGEQGVRRPAGPPRGAARVVGAAEQGNGGGRRRALELGGLRGGRG

SEQ ID NO: 4923 - protein, 355 aa, Zea mays subsp. mays
  peptide (1)..(355): Ceres Seq. ID no. 12434964
  misc_feature (1)..(251): Homolog of NCBI NO: 34911830 NR Description: lipase-like protein [Oryza sativa (japonica
  misc_feature (1)..(253): Homolog of NCBI NO: 34911832 NR Description: lipase-like protein [Oryza sativa (japonica
  misc_feature (1)..(253): Homolog of NCBI NO: 15233922 NR Description: lipase-like protein; protein id: At4g18550.1
  misc_feature (1)..(253): Homolog of NCBI NO: 21537306 NR Description: lipase-like protein [Arabidopsis thaliana]
  misc_feature (1)..(253): Homolog of NCBI NO: 15221426 NR Description: lipase-like protein; protein id: At1g06250.1, by cDNA: 12912. [Arabidopsis thaliana] >gi|25406908|pir||C86198
  misc_feature (1)..(221): Homolog of NCBI NO: 34911870 NR Description: lipase-like protein [Oryza sativa (japonica
  misc_feature (1)..(251): Homolog of NCBI NO: 34910484 NR Description: putative lipase [Oryza sativa (japonica
  misc_feature (1)..(112): Homolog of NCBI NO: 4103627 NR Description: lipase [Dianthus caryophyllus]
  misc_feature (125)..(252): Homolog of NCBI NO: 4103627 NR Description: lipase [Dianthus caryophyllus]
  misc_feature (1)..(258): Homolog of NCBI NO: 30679836 NR Description: lipase (class 3) family [Arabidopsis thaliana]
MAQATYDAFNNERASPHAGLSRFARARFFDRVRLPAHAAAYRVTRFLYATSSVAVPDAFILRSVSRSRRCRESNWIGYVAVATDEGKAALGRRDVVVAWRGTMRALEWADDLEFPMVPTGGLLGDGDAMVHRGWLSMYTSSDPASSHNQDSARHQALGEVRRLVDAYRGEELSITVTGHSLGAALATLNAFDIAANGYNVTATGAAACPVTSFAFASPRVGGGGFKKRFDAVPGLRLLRVRNARDVVPKYPVVFLPRRRRGARDRHGGVAVPEKPRGRADLAQPRGVPARRGGHAGRARRVRARRGAGRGAGEQGVRRPAGPPRGAARVVGAAEQGNGGGRRRALELGGLRGGRG

SEQ ID NO: 4924 - DNA, 1013 bp, Zea mays subsp. mays
  misc_feature (1)..(1013): Ceres Seq. ID no. 13498777
  misc_feature: MA Experiment ID: 108504 Result: Up-regulated in Transcription
  misc_feature: MA Experiment 108504 PARAMETER Experiment Name: Zm_Drought_P Parameter: Age (day) Value: 8
  misc_feature: MA Experiment 108504 PARAMETER Experiment Name: Zm_Drought_P Parameter: Organism Value: Zea mays
  misc_feature: MA Experiment 108504 PARAMETER Experiment Name: Zm_Drought_P Parameter: Plant Line Value: 35A19
  misc_feature: MA Experiment 108504 PARAMETER Experiment Name: Zm_Drought_P Parameter: Timepoint (hr) Value: 12
  misc_feature: MA Experiment 108504 PARAMETER Experiment Name: Zm_Drought_P Parameter: Tissue Value: Aerial
  misc_feature: MA Experiment 108504 PARAMETER Experiment Name: Zm_Drought_P Parameter: Treatment Value: Drought vs. No Drought
  misc_feature: MA Experiment ID: 108513 Result: Up-regulated in Transcription
  misc_feature: MA Experiment 108513 PARAMETER Experiment Name: Zm_100uM_ABA_P Parameter: Age (day) Value: 8
  misc_feature: MA Experiment 108513 PARAMETER Experiment Name: Zm_100uM_ABA_P Parameter: Organism Value: Zea mays
  misc_feature: MA Experiment 108513 PARAMETER Experiment Name: Zm_100uM_ABA_P Parameter: Plant Line Value: 35A19
  misc_feature: MA Experiment 108513 PARAMETER Experiment Name: Zm_100uM_ABA_P Parameter: Timepoint (hr) Value: 6
  misc_feature: MA Experiment 108513 PARAMETER Experiment Name: Zm_100uM_ABA_P Parameter: Tissue Value: Aerial
  misc_feature: MA Experiment 108513 PARAMETER Experiment Name: Zm_100uM_ABA_P Parameter: Treatment Value: 100uM ABA vs. No Treatment
  misc_feature: MA Experiment ID: 108539 Result: Up-regulated in Transcription
  misc_feature: MA Experiment 108539 PARAMETER Experiment Name: Zm_20percent_PEG_P Parameter: Age (day) Value: 8
  misc_feature: MA Experiment 108539 PARAMETER Experiment Name: Zm_20percent_PEG_P Parameter: Organism Value: Zea mays
  misc_feature: MA Experiment 108539 PARAMETER Experiment Name: Zm_20percent_PEG_P Parameter: Plant Line Value: 35A19
  misc_feature: MA Experiment 108539 PARAMETER Experiment Name: Zm_20percent_PEG_P Parameter: Timepoint (hr) Value: 1
  misc_feature: MA Experiment 108539 PARAMETER Experiment Name: Zm_20percent_PEG_P Parameter: Tissue Value: Aerial
  misc_feature: MA Experiment 108539 PARAMETER Experiment Name: Zm_20percent_PEG_P Parameter: Treatment Value: 20percent PEG vs. No Treatment
  misc_feature: MA Experiment ID: 108542 Result: Up-regulated in Transcription
  misc_feature: MA Experiment 108542 PARAMETER Experiment Name: Zm_150mM_NaCl_P Parameter: Age (day) Value: 8
  misc_feature: MA Experiment 108542 PARAMETER Experiment Name: Zm_150mM_NaCl_P Parameter: Organism Value: Zea mays
  misc_feature: MA Experiment 108542 PARAMETER Experiment Name: Zm_150mM_NaCl_P Parameter: Plant Line Value: 35A19
  misc_feature: MA Experiment 108542 PARAMETER Experiment Name: Zm_150mM_NaCl_P Parameter: Timepoint (hr) Value: 6
  misc_feature: MA Experiment 108542 PARAMETER Experiment Name: Zm_150mM_NaCl_P Parameter: Tissue Value: Aerial
  misc_feature: MA Experiment 108542 PARAMETER Experiment Name: Zm_150mM_NaCl_P Parameter: Treatment Value: 150mM NaCl vs. No Treatment
  misc_feature: MA Experiment ID: 108556 Result: Up-regulated in Transcription
  misc_feature: MA Experiment 108556 PARAMETER Experiment Name: Zm_Drought_P Parameter: Age (day) Value: 9
  misc_feature: MA Experiment 108556 PARAMETER Experiment Name: Zm_Drought_P Parameter: Organism Value: Zea mays
  misc_feature: MA Experiment 108556 PARAMETER Experiment Name: Zm_Drought_P Parameter: Plant Line Value: 35A19
  misc_feature: MA Experiment 108556 PARAMETER Experiment Name: Zm_Drought_P Parameter: Timepoint (hr) Value: 24
  misc_feature: MA Experiment 108556 PARAMETER Experiment Name: Zm_Drought_P Parameter: Tissue Value: Aerial
  misc_feature: MA Experiment 108556 PARAMETER Experiment Name: Zm_Drought_P Parameter: Treatment Value: Drought vs. No Drought
  misc_feature: MA Experiment ID: 108597 Result: Up-regulated in Transcription
  misc_feature: MA Experiment 108597 PARAMETER Experiment Name: Zm_100uM_ABA_P Parameter: Age (day) Value: 9
  misc_feature: MA Experiment 108597 PARAMETER Experiment Name: Zm_100uM_ABA_P Parameter: Organism Value: Zea mays
  misc_feature: MA Experiment 108597 PARAMETER Experiment Name: Zm_100uM_ABA_P Parameter: Plant Line Value: 35A19
  misc_feature: MA Experiment 108597 PARAMETER Experiment Name: Zm_100uM_ABA_P Parameter: Timepoint (hr) Value: 24
  misc_feature: MA Experiment 108597 PARAMETER Experiment Name: Zm_100uM_ABA_P Parameter: Tissue Value: Aerial
  misc_feature: MA Experiment 108597 PARAMETER Experiment Name: Zm_100uM_ABA_P Parameter: Treatment Value: 100uM ABA vs. No Treatment
  misc_feature: MA Experiment ID: 20000478 Result: Up-regulated in Transcription
  misc_feature: MA Experiment 20000478 PARAMETER Experiment Name: Zm_5mM_SA_P Parameter: Age (day) Value: 11
  misc_feature: MA Experiment 20000478 PARAMETER Experiment Name: Zm_5mM_SA_P Parameter: Organism Value: Zea mays
  misc_feature: MA Experiment 20000478 PARAMETER Experiment Name: Zm_5mM_SA_P Parameter: Plant Line Value: 35A19
  misc_feature: MA Experiment 20000478 PARAMETER Experiment Name: Zm_5mM_SA_P Parameter: Timepoint (hr) Value: 72
  misc_feature: MA Experiment 20000478 PARAMETER Experiment Name: Zm_5mM_SA_P Parameter: Tissue Value: Aerial
  misc_feature: MA Experiment 20000478 PARAMETER Experiment Name: Zm_5mM_SA_P Parameter: Treatment Value: 5mM SA vs. No Treatment
  misc_feature: MA Experiment ID: 20000479 Result: Up-regulated in Transcription
  misc_feature: MA Experiment 20000479 PARAMETER Experiment Name: Zm_Drought_P Parameter: Age (day) Value: 10
  misc_feature: MA Experiment 20000479 PARAMETER Experiment Name: Zm_Drought_P Parameter: Organism Value: Zea mays
  misc_feature: MA Experiment 20000479 PARAMETER Experiment Name: Zm_Drought_P Parameter: Plant Line Value: 35A19
  misc_feature: MA Experiment 20000479 PARAMETER Experiment Name: Zm_Drought_P Parameter: Timepoint (hr) Value: 48
  misc_feature: MA Experiment 20000479 PARAMETER Experiment Name: Zm_Drought_P Parameter: Tissue Value: Aerial
  misc_feature: MA Experiment 20000479 PARAMETER Experiment Name: Zm_Drought_P Parameter: Treatment Value: Drought vs. No Drought
  misc_feature: MA Experiment ID: 20000480 Result: Up-regulated in Transcription
  misc_feature: MA Experiment 20000480 PARAMETER Experiment Name: Zm_Drought_P Parameter: Age (day) Value: 11
  misc_feature: MA Experiment 20000480 PARAMETER Experiment Name: Zm_Drought_P Parameter: Organism Value: Zea mays
  misc_feature: MA Experiment 20000480 PARAMETER Experiment Name: Zm_Drought_P Parameter: Plant Line Value: 35A19
  misc_feature: MA Experiment 20000480 PARAMETER Experiment Name: Zm_Drought_P Parameter: Timepoint (hr) Value: 72
  misc_feature: MA Experiment 20000480 PARAMETER Experiment Name: Zm_Drought_P Parameter: Tissue Value: Aerial
  misc_feature: MA Experiment 20000480 PARAMETER Experiment Name: Zm_Drought_P Parameter: Treatment Value: Drought vs. No Drought
  misc_feature: MA Experiment ID: 20000492 Result: Down-regulated in Transcription
  misc_feature: MA Experiment 20000492 PARAMETER Experiment Name: Zm_Hybrid_Seed_Dev_P Parameter: DAP Value: 12
  misc_feature: MA Experiment 20000492 PARAMETER Experiment Name: Zm_Hybrid_Seed_Dev_P Parameter: Organism Value: Zea mays
  misc_feature: MA Experiment 20000492 PARAMETER Experiment Name: Zm_Hybrid_Seed_Dev_P Parameter: Plant Line Value: 35A19
  misc_feature: MA Experiment 20000492 PARAMETER Experiment Name: Zm_Hybrid_Seed_Dev_P Parameter: Tissue Value: Fert Kernel vs. Unfert Floret
  misc_feature: MA Experiment ID: 20000535 Result: Up-regulated in Transcription
  misc_feature: MA Experiment 20000535 PARAMETER Experiment Name: Zm_Hybrid_Seed_Dev_P Parameter: DAP Value: 30 vs. 12
  misc_feature: MA Experiment 20000535 PARAMETER Experiment Name: Zm_Hybrid_Seed_Dev_P Parameter: Organism Value: Zea mays
  misc_feature: MA Experiment 20000535 PARAMETER Experiment Name: Zm_Hybrid_Seed_Dev_P Parameter: Plant Line Value: 35A19
  misc_feature: MA Experiment 20000535 PARAMETER Experiment Name: Zm_Hybrid_Seed_Dev_P Parameter: Tissue Value: Embryo vs. Unfert Floret
  misc_feature: MA Experiment ID: 20000626 Result: Down-regulated in Transcription
  misc_feature: MA Experiment 20000626 PARAMETER Experiment Name: Zm_Herbicide-Treatments_P Parameter: Timepoint (hr) Value: 12
  misc_feature: MA Experiment 20000626 PARAMETER Experiment Name: Zm_Herbicide-Treatments_P Parameter: Tissue Value: Aerial
  misc_feature: MA Experiment 20000626 PARAMETER Experiment Name: Zm_Herbicide-Treatments_P Parameter: Treatment Value: Roundup vs. No Treatment
gttcctgttcccctcggcgacgccagtacggcagtacgccacgccagtgcccagttgcattgactcctccccggtccccacatcttgccgccaatggatgtcgacgggcccgcccccgccgacgcctctgccaggcccgccaccaacggcgaggccccctccggcgcccgcgaggtcgacgtcggcgaggaggacacgctcgccggcgtcctccgcagcttcgtcgacggcgtctggtacccggacgagcctctgctccggcggctccgggcggcgtcctgcgacgccgcgccgcgcctgaggggggcgtcccggaactccgcgcgggacctgcttgagtggaccaggcggggcagcggcctccgcgccatcctcgtcatctcggtcgggacaatcacgcttatagcattgactggccttctgaccttcatgttcttcctattggttgccactgctaatgcgatcattgtctcagtcttgatgtcactggccgctgccggaggattcttggccatcttctttgcttgcttggttgcagtgtatattggagcagtatcagttgctatctttgtcatttctgcgactgttatctcagcagttgttggaattttggttgctaccggttgggttgggttcttctggattatctggttcaccgcaaggaagagcatggtcctgacgaagcactccttcggcatgacgagctcggcaatccaatcgtattccgcgtcccggcaagtgaagcagaagcctgtcgactgaggctagttggttgcgtcctgtatgaagcggatatatctatctatgtgaatcacggttttgctgtttgtttgtttgtaagagtgtagaagacagcttgcttgttgcggcagctctgtttctctcggtgactaggtgtataatgctagctctgaactttggcagcatgtacgttcggcatggcggtcaatgctgttatttaaaggatagtgagcagatgttaatgtttatagcaaataaaagcatgttaatgt

SEQ ID NO: 4925 - protein, 222 aa, Zea mays subsp. mays
  peptide (1)..(222): Ceres Seq. ID no. 13498778
  misc_feature (9)..(222): Homolog of NCBI NO: 34905012 NR Description: P0456B03.14 [Oryza sativa (japonica
  misc_feature (18)..(218): Homolog of NCBI NO: 14423560 NR Description: Unknown protein [Arabidopsis thaliana]
  misc_feature (18)..(218): Homolog of NCBI NO: 18418008 NR Description: expressed protein [Arabidopsis thaliana]
MDVDGPAPADASARPATNGEAPSGAREVDVGEEDTLAGVLRSFVDGVWYPDEPLLRRLRAASCDAAPRLRGASRNSARDLLEWTRRGSGLRAILVISVGTITLIALTGLLTFMFFLLVATANAIIVSVLMSLAAAGGFLAIFFACLVAVYIGAVSVAIFVISATVISAVVGILVATGWVGFFWIIWFTARKSMVLTKHSFGMTSSAIQSYSASRQVKQKPVD

SEQ ID NO: 4926 - protein, 111 aa, Zea mays subsp. mays
  peptide (1)..(111): Ceres Seq. ID no. 13498779
SCSPRRRQYGSTPRQCPVALTPPRSPHLAANGCRRARPRRRLCQARHQRRGPLRRPRGRRRRGGHARRRPPQLRRRRLVPGRASAPAAPGGVLRRRAAPEGGVPELRAGPA

SEQ ID NO: 4927 - DNA, 1536 bp, Zea mays subsp. mays
  misc_feature (1)..(1536): Ceres Seq. ID no. 12407772
  misc_feature: MA Experiment ID: 108528 Result: Down-regulated in Transcription
  misc_feature: MA Experiment 108528 PARAMETER Experiment Name: Zm_Imbibed_Seeds_P Parameter: Age (day) Value: 5 vs. 2
  misc_feature: MA Experiment 108528 PARAMETER Experiment Name: Zm_Imbibed_Seeds_P Parameter: Organism Value: Zea mays
  misc_feature: MA Experiment 108528 PARAMETER Experiment Name: Zm_Imbibed_Seeds_P Parameter: Plant Line Value: 35A19
  misc_feature: MA Experiment 108528 PARAMETER Experiment Name: Zm_Imbibed_Seeds_P Parameter: Tissue Value: Aerial vs. Embryo
  misc_feature: MA Experiment ID: 108535 Result: Down-regulated in Transcription
  misc_feature: MA Experiment 108535 PARAMETER Experiment Name: Zm_Meristem_P Parameter: Age (day) Value: 8
  misc_feature: MA Experiment 108535 PARAMETER Experiment Name: Zm_Meristem_P Parameter: Organism Value: Zea mays
  misc_feature: MA Experiment 108535 PARAMETER Experiment Name: Zm_Meristem_P Parameter: Plant Line Value: 35A19
  misc_feature: MA Experiment 108535 PARAMETER Experiment Name: Zm_Meristem_P Parameter: Tissue Value: Root Meristem vs. Above Root Meristem
  misc_feature: MA Experiment ID: 108556 Result: Up-regulated in Transcription
  misc_feature: MA Experiment 108556 PARAMETER Experiment Name: Zm_Drought_P Parameter: Age (day) Value: 9
  misc_feature: MA Experiment 108556 PARAMETER Experiment Name: Zm_Drought_P Parameter: Organism Value: Zea mays
  misc_feature: MA Experiment 108556 PARAMETER Experiment Name: Zm_Drought_P Parameter: Plant Line Value: 35A19
  misc_feature: MA Experiment 108556 PARAMETER Experiment Name: Zm_Drought_P Parameter: Timepoint (hr) Value: 24
  misc_feature: MA Experiment 108556 PARAMETER Experiment Name: Zm_Drought_P Parameter: Tissue Value: Aerial
  misc_feature: MA Experiment 108556 PARAMETER Experiment Name: Zm_Drought_P Parameter: Treatment Value: Drought vs. No Drought
  misc_feature: MA Experiment ID: 20000479 Result: Up-regulated in Transcription
  misc_feature: MA Experiment 20000479 PARAMETER Experiment Name: Zm_Drought_P Parameter: Age (day) Value: 10
  misc_feature: MA Experiment 20000479 PARAMETER Experiment Name: Zm_Drought_P Parameter: Organism Value: Zea mays
  misc_feature: MA Experiment 20000479 PARAMETER Experiment Name: Zm_Drought_P Parameter: Plant Line Value: 35A19
  misc_feature: MA Experiment 20000479 PARAMETER Experiment Name: Zm_Drought_P Parameter: Timepoint (hr) Value: 48
  misc_feature: MA Experiment 20000479 PARAMETER Experiment Name: Zm_Drought_P Parameter: Tissue Value: Aerial
  misc_feature: MA Experiment 20000479 PARAMETER Experiment Name: Zm_Drought_P Parameter: Treatment Value: Drought vs. No Drought
aaacctaacagaagcaaccgaatatcccctcgcctttcaactcgtcttcctcctcatgtcgtcgcctcctatccctctatatcttctattctaagccacctcgatcggaccctagatagatgcaagaaaagaaaagagaagagcctctgtggatagtggtgggtgctggatcactgggcggagcagcttctcatatcggatcgatcgattaattaatatatactataaacatacaatcaattacatacatatacgccaagagaagaggaacgccggcccgtttcacttgtctccttcctccgatccctcccggcggccggccgggctcgggcgtttttccccttttgtttcccatggaggacgccaagatggggaacggcgccaccatccgcgcggtgctcgccatcctccagtggtggggattcaacgtcaccgtcatcatcatcaacaagtggatcttccagaaactggagttcaagttccccctgacggtgtcgtgcgtccacttcatatgttcctccatcggagcctacatcgcgatcaaagtcctgagaacgaagccgctgatcgaggtggcctcggaggaccggtggaggaggatattccccatgtcgttggtgttctgcgtcaacatcgtgctggggaacgtgagcctgaggtacataccagtgtcattcatgcagacgatcaagtcgttcactccggcaacgacagtggttcttcagtggctggtttggaggaaatactttgagtggcgcatctgggcgtccttggtgcccatcgttggaggaatccttgtcacctccgtgacggagctgagcttcaacacggctggcttctgcgccgcgctggtggggtgcctggccacgtccaccaagaccatcctggcagagtcgctgctccacggctacaagttcgacagcatcaacacggtgtactacatggctccgctggccacgctgatcctgtcggtgccggccgtggcgctggagggcggcgccgtgctggggtggctgcggacgcacgagtccgtgggaccggcgctggcggtcgtcgtcacctccggggtgctggccttctgcctcaacttctccatcttctacgtcatccactccacgacggcagtcaccttcaacgtggccggcaacctcaaggtggccgtggcggtgctggcgtcctggatggtgttccggaaccccatctccgccatgaacgcactcggctgcggcgtcacgctcgtcggatgcaccttctacggctacgtcaggcaccgactctcgcagaaccaggcgcccagagcccgcttggagatgctgccgctcaccgccgtcgacaagcaaggcgacaagatataaaaagtcttttcgaataaaccatctgattctttctgatccacctagcctaaccgccgatcgagaatgcatccaccatcagagatgacaggaaattattttttgttggcagccagattttgataatgagtcagttcagttgttgcttaaagagaaatgtcatgaggtctataaagtcttttgg

SEQ ID NO: 4928 - protein, 333 aa, Zea mays subsp. mays
  peptide (1)..(333): Ceres Seq. ID no. 12407773
  misc_feature (28)..(152): Pfam Name: Integral membrane protein DUF6 Pfam Description: Integral membrane protein DUF6
  misc_feature (3)..(333): Homolog of NCBI NO: 38567832 NR Description: OSJNBb0020J19.10 [Oryza sativa (japonica
  misc_feature (6)..(333): Homolog of NCBI NO: 18411611 NR Description: expressed protein; protein id: At1g77610.1, by cDNA: gi_13430497, supported by cDNA: gi_21281057 [Arabidopsis
  misc_feature (1)..(333): Homolog of NCBI NO: 15219121 NR Description: glucose 6 phosphate/phosphate translocator, protein id: At1g21870.1 [Arabidopsis thaliana] T26F17.9 [Arabidopsis thaliana] >gi|29329825|emb|CAD83089.1|
  misc_feature (5)..(307): Homolog of NCBI NO: 30681126 NR Description: phosphate translocator-related [Arabidopsis
  misc_feature (18)..(307): Homolog of NCBI NO: 9759107 NR Description: phosphate/phosphoenolpyruvate translocator
  misc_feature (18)..(307): Homolog of NCBI NO: 27476065 NR Description: Putative phosphate/phosphoenolpyruvate
  misc_feature (18)..(307): Homolog of NCBI NO: 15237644 NR Description: phosphate/phosphoenolpyruvate translocator - like protein id: At5g04160.1, supported by cDNA: 100777., supported by
  misc_feature (18)..(307): Homolog of NCBI NO: 17064798 NR Description: phosphate/phosphoenolpyruvate translocator-like [Arabidopsis thaliana] >gi|20259810|gb|AAM13252.1|
  misc_feature (1)..(307): Homolog of NCBI NO: 15221371 NR Description: hypothetical protein; protein id: At1g12500.1 thaliana] >gi|8778643|gb|AAF79651.1|AC025416_25 F5O11.25 thaliana] >gi|9502394|gb|AAF88101.1|AC025417_29 T12C24.5
  misc_feature (18)..(307): Homolog of NCBI NO: 15228248 NR Description: unknown protein; protein id: At3g10290.1 thaliana] >gi|6056196|gb|AAF02813.1|AC009400_9 unknown protein
MEDAKMGNGATIRAVLAILQWWGFNVTVIIINKWIFQKLEFKFPLTVSCVHFICSSIGAYIAIKVLRTKPLIEVASEDRWRRIFPMSLVFCVNIVLGNVSLRYIPVSFMQTIKSFTPATTVVLQWLVWRKYFEWRIWASLVPIVGGILVTSVTELSFNTAGFCAALVGCLATSTKTILAESLLHGYKFDSINTVYYMAPLATLILSVPAVALEGGAVLGWLRTHESVGPALAVVVTSGVLAFCLNFSIFYVIHSTTAVTFNVAGNLKVAVAVLASWMVFRNPISAMNALGCGVTLVGCTFYGYVRHRLSQNQAPRARLEMLPLTAVDKQGDKI

SEQ ID NO: 4929 - protein, 328 aa, Zea mays subsp. mays
  peptide (1)..(328): Ceres Seq. ID no. 12407774
  misc_feature (23)..(147): Pfam Name: Integral membrane protein DUF6 Pfam Description: Integral membrane protein DUF6
  misc_feature (1)..(328): Homolog of NCBI NO: 38567832 NR Description: OSJNBb0020J19.10 [Oryza sativa (japonica
  misc_feature (1)..(328): Homolog of NCBI NO: 18411611 NR Description: expressed protein; protein id: At1g77610.1, by cDNA: gi_13430497, supported by cDNA: gi_21281057 [Arabidopsis
  misc_feature (1)..(328): Homolog of NCBI NO: 15219121 NR Description: glucose 6 phosphate/phosphate translocator, protein id: At1g21870.1 [Arabidopsis thaliana] T26F17.9 [Arabidopsis thaliana] >gi|29329825|emb|CAD83089.1|
  misc_feature (1)..(302): Homolog of NCBI NO: 30681126 NR Description: phosphate translocator-related [Arabidopsis
  misc_feature (13)..(302): Homolog of NCBI NO: 9759107 NR Description: phosphate/phosphoenolpyruvate translocator
  misc_feature (13)..(302): Homolog of NCBI NO: 27476065 NR Description: Putative phosphate/phosphoenolpyruvate
  misc_feature (13)..(302): Homolog of NCBI NO: 15237644 NR Description: phosphate/phosphoenolpyruvate translocator - like protein id: At5g04160.1, supported by cDNA: 100777., supported by
  misc_feature (13)..(302): Homolog of NCBI NO: 17064798 NR Description: phosphate/phosphoenolpyruvate translocator-like [Arabidopsis thaliana] >gi|20259810|gb|AAM13252.1|
  misc_feature (1)..(302): Homolog of NCBI NO: 15221371 NR Description: hypothetical protein; protein id: At1g12500.1 thaliana] >gi|8778643|gb|AAF79651.1|AC025416_25 F5O11.25 thaliana] >gi|9502394|gb|AAF88101.1|AC025417_29 T12C24.5
  misc_feature (13)..(302): Homolog of NCBI NO: 15228248 NR Description: unknown protein; protein id: At3g10290.1 thaliana] >gi|6056196|gb|AAF02813.1|AC009400_9 unknown protein
MGNGATIRAVLAILQWWGFNVTVIIINKWIFQKLEFKFPLTVSCVHFICSSIGAYIAIKVLRTKPLIEVASEDRWRRIFPMSLVFCVNIVLGNVSLRYIPVSFMQTIKSFTPATTVVLQWLVWRKYFEWRIWASLVPIVGGILVTSVTELSFNTAGFCAALVGCLATSTKTILAESLLHGYKFDSINTVYYMAPLATLILSVPAVALEGGAVLGWLRTHESVGPALAVVVTSGVLAFCLNFSIFYVIHSTTAVTFNVAGNLKVAVAVLASWMVFRNPISAMNALGCGVTLVGCTFYGYVRHRLSQNQAPRARLEMLPLTAVDKQGDKI

SEQ ID NO: 4930 - protein, 248 aa, Zea mays subsp. mays
  peptide (1)..(248): Ceres Seq. ID no. 12407775
  misc_feature (1)..(67): Pfam Name: Integral membrane protein DUF6 Pfam Description: Integral membrane protein DUF6
  misc_feature (1)..(248): Homolog of NCBI NO: 38567832 NR Description: OSJNBb0020J19.10 [Oryza sativa (japonica
  misc_feature (1)..(248): Homolog of NCBI NO: 18411611 NR Description: expressed protein; protein id: At1g77610.1, by cDNA: gi_13430497, supported by cDNA: gi_21281057 [Arabidopsis
  misc_feature (1)..(248): Homolog of NCBI NO: 15219121 NR Description: glucose 6 phosphate/phosphate translocator, protein id: At1g21870.1 [Arabidopsis thaliana] T26F17.9 [Arabidopsis thaliana] >gi|29329825|emb|CAD83089.1|
  misc_feature (1)..(222): Homolog of NCBI NO: 30681126 NR Description: phosphate translocator-related [Arabidopsis
  misc_feature (1)..(222): Homolog of NCBI NO: 9759107 NR Description: phosphate/phosphoenolpyruvate translocator
  misc_feature (1)..(222): Homolog of NCBI NO: 27476065 NR Description: Putative phosphate/phosphoenolpyruvate
  misc_feature (1)..(222): Homolog of NCBI NO: 15237644 NR Description: phosphate/phosphoenolpyruvate translocator - like protein id: At5g04160.1, supported by cDNA: 100777., supported by
  misc_feature (1)..(222): Homolog of NCBI NO: 17064798 NR Description: phosphate/phosphoenolpyruvate translocator-like [Arabidopsis thaliana] >gi|20259810|gb|AAM13252.1|
  misc_feature (1)..(222): Homolog of NCBI NO: 15221371 NR Description: hypothetical protein; protein id: At1g12500.1 thaliana] >gi|8778643|gb|AAF79651.1|AC025416_25 F5O11.25 thaliana] >gi|9502394|gb|AAF88101.1|AC025417_29 T12C24.5
  misc_feature (1)..(222): Homolog of NCBI NO: 15228248 NR Description: unknown protein; protein id: At3g10290.1 thaliana] >gi|6056196|gb|AAF02813.1|AC009400_9 unknown protein
MSLVFCVNIVLGNVSLRYIPVSFMQTIKSFTPATTVVLQWLVWRKYFEWRIWASLVPIVGGILVTSVTELSFNTAGFCAALVGCLATSTKTILAESLLHGYKFDSINTVYYMAPLATLILSVPAVALEGGAVLGWLRTHESVGPALAVVVTSGVLAFCLNFSIFYVIHSTTAVTFNVAGNLKVAVAVLASWMVFRNPISAMNALGCGVTLVGCTFYGYVRHRLSQNQAPRARLEMLPLTAVDKQGDKI

SEQ ID NO: 4931 - DNA, 1161 bp, Zea mays subsp. mays
  misc_feature (1)..(1161): Ceres Seq. ID no. 12435127
  misc_feature: MA Experiment ID: 108528 Result: Down-regulated in Transcription
  misc_feature: MA Experiment 108528 PARAMETER Experiment Name: Zm_Imbibed_Seeds_P Parameter: Age (day) Value: 5 vs. 2
  misc_feature: MA Experiment 108528 PARAMETER Experiment Name: Zm_Imbibed_Seeds_P Parameter: Organism Value: Zea mays
  misc_feature: MA Experiment 108528 PARAMETER Experiment Name: Zm_Imbibed_Seeds_P Parameter: Plant Line Value: 35A19
  misc_feature: MA Experiment 108528 PARAMETER Experiment Name: Zm_Imbibed_Seeds_P Parameter: Tissue Value: Aerial vs. Embryo
  misc_feature: MA Experiment ID: 108529 Result: Down-regulated in Transcription
  misc_feature: MA Experiment 108529 PARAMETER Experiment Name: Zm_Imbibed_Seeds_P Parameter: Age (day) Value: 5 vs. 2
  misc_feature: MA Experiment 108529 PARAMETER Experiment Name: Zm_Imbibed_Seeds_P Parameter: Organism Value: Zea mays
  misc_feature: MA Experiment 108529 PARAMETER Experiment Name: Zm_Imbibed_Seeds_P Parameter: Plant Line Value: 35A19
  misc_feature: MA Experiment 108529 PARAMETER Experiment Name: Zm_Imbibed_Seeds_P Parameter: Tissue Value: Roots vs. Embryo
  misc_feature: MA Experiment ID: 108530 Result: Down-regulated in Transcription
  misc_feature: MA Experiment 108530 PARAMETER Experiment Name: Zm_Imbibed_Seeds_P Parameter: Age (day) Value: 6 vs. 2
  misc_feature: MA Experiment 108530 PARAMETER Experiment Name: Zm_Imbibed_Seeds_P Parameter: Organism Value: Zea mays
  misc_feature: MA Experiment 108530 PARAMETER Experiment Name: Zm_Imbibed_Seeds_P Parameter: Plant Line Value: 35A19
  misc_feature: MA Experiment 108530 PARAMETER Experiment Name: Zm_Imbibed_Seeds_P Parameter: Tissue Value: Aerial vs. Embryo
  misc_feature: MA Experiment ID: 108556 Result: Down-regulated in Transcription
  misc_feature: MA Experiment 108556 PARAMETER Experiment Name: Zm_Drought_P Parameter: Age (day) Value: 9
  misc_feature: MA Experiment 108556 PARAMETER Experiment Name: Zm_Drought_P Parameter: Organism Value: Zea mays
  misc_feature: MA Experiment 108556 PARAMETER Experiment Name: Zm_Drought_P Parameter: Plant Line Value: 35A19
  misc_feature: MA Experiment 108556 PARAMETER Experiment Name: Zm_Drought_P Parameter: Timepoint (hr) Value: 24
  misc_feature: MA Experiment 108556 PARAMETER Experiment Name: Zm_Drought_P Parameter: Tissue Value: Aerial
  misc_feature: MA Experiment 108556 PARAMETER Experiment Name: Zm_Drought_P Parameter: Treatment Value: Drought vs. No Drought
  misc_feature: MA Experiment ID: 108689 Result: Down-regulated in Transcription
  misc_feature: MA Experiment 108689 PARAMETER Experiment Name: Zm_Drought_Roots_P Parameter: Age (day) Value: 9
  misc_feature: MA Experiment 108689 PARAMETER Experiment Name: Zm_Drought_Roots_P Parameter: Organism Value: Zea mays
  misc_feature: MA Experiment 108689 PARAMETER Experiment Name: Zm_Drought_Roots_P Parameter: Plant Line Value: 35A19
  misc_feature: MA Experiment 108689 PARAMETER Experiment Name: Zm_Drought_Roots_P Parameter: Timepoint (hr) Value: 24
  misc_feature: MA Experiment 108689 PARAMETER Experiment Name: Zm_Drought_Roots_P Parameter: Tissue Value: Roots
  misc_feature: MA Experiment 108689 PARAMETER Experiment Name: Zm_Drought_Roots_P Parameter: Treatment Value: Drought vs. No Drought
  misc_feature: MA Experiment ID: 20000535 Result: Down-regulated in Transcription
  misc_feature: MA Experiment 20000535 PARAMETER Experiment Name: Zm_Hybrid_Seed_Dev_P Parameter: DAP Value: 30 vs. 12
  misc_feature: MA Experiment 20000535 PARAMETER Experiment Name: Zm_Hybrid_Seed_Dev_P Parameter: Organism Value: Zea mays
  misc_feature: MA Experiment 20000535 PARAMETER Experiment Name: Zm_Hybrid_Seed_Dev_P Parameter: Plant Line Value: 35A19
  misc_feature: MA Experiment 20000535 PARAMETER Experiment Name: Zm_Hybrid_Seed_Dev_P Parameter: Tissue Value: Embryo vs. Unfert Floret
acctctaaaatcccccagcggcccaaccgaacccgcctagggattcctaccgagggaggccgcacgcagccatggatttcctgcaggagcaaagcgtcgagaccacagtggccgtcgccgtcgctgtcgccgccgtcgccgcaggcggcgccttcctcctccttcgatccaggaagcccaagggctgcttggatcctgagaacttcaggaagttcaaacttgttgaaaagaagcaaataagtcataatgttgccaggttcaagttcgctcttccaactccaacttctgtattgggccttccaatcggtcaacatatcagctgcagaggacaagacgctacaggtgaagaagtaatcaagccttatacccctactacattggattctgatcttggatattttgagcttgtcataaagatgtatccccaagggagaatgtcccatcatttccgcgagatgaaagttggtgattatttgtctgtgaagggacctaagggccgattcaagtaccacgttggccaagtgagggcatttggaatgctggctggtggatcaggcattactccaatgtttcaagttgccagagcaattcttgagaaccctaatgacaacaccaaggttcacttaatttatgctaatgtcacatatgaagacattcttctgaaggatgagctggacgacatggccaaaacctatcctggccgctttaagatctactatgtgttgaatcagcctcctgagaactggaacggtggtgttgggtttgtgtctaaggaaatgatccaatctcattgtccagcgcctgctgaggacattcagatcctgagatgtggtcctcctccgatgaacaaggccatggctgcacaccttgacgagctcaactacacaaaggagatgcagttccagttctaagcaatgttaagtttgcaaataataattagtgaccgacatggttcttcggtcacaggaatagtacctgactctgctcgttagctgatatcaggaggaattcaggatcacatgatgattagtagtgcgccagcattttttgcaatctctatttttgaggtcaaatgatatctacctccacataaatccacattggcagagacaacattttgttactatcattattgattttaaatgtggaccattggatgcg

SEQ ID NO: 4932 - protein, 279 aa, Zea mays subsp. mays
  peptide (1)..(279): Ceres Seq. ID no. 12435128
  misc_feature (151)..(265): Pfam Name: Oxidoreductase NAD-binding domain Pfam Description: Oxidoreductase NAD-binding domain
  misc_feature (120)..(279): Homolog of NCBI NO: 21312524 NR Description: RIKEN cDNA 1500005G05 [Mus musculus] unnamed protein product [Mus musculus]
  misc_feature (1)..(279): Homolog of NCBI NO: 4336205 NR Description: cytochrome b5 reductase [Zea mays]
  misc_feature (2)..(279): Homolog of NCBI NO: 15238025 NR Description: NADH-cytochrome b5 reductase; protein id: supported by cDNA: 17432., supported by cDNA: gi_4240115
  misc_feature (14)..(273): Homolog of NCBI NO: 6070342 NR Description: NADH-cytochrome b5 reductase [Mortierella alpina]
  misc_feature (120)..(279): Homolog of NCBI NO: 27712062 NR Description: similar to RIKEN cDNA 1500005G05 [Mus musculus]
  misc_feature (26)..(146): Homolog of NCBI NO: 27712062 NR Description: similar to RIKEN cDNA 1500005G05 [Mus musculus]
  misc_feature (13)..(273): Homolog of NCBI NO: 40739560 NR Description: hypothetical protein AN6366.2 [Aspergillus
  misc_feature (116)..(279): Homolog of NCBI NO: 16648905 NR Description: NADH-cytochrome b5 reductase [Arabidopsis
  misc_feature (1)..(279): Homolog of NCBI NO: 17221690 NR Description: cytochrome b5 reductase isoform II [Zea mays]
  misc_feature (26)..(146): Homolog of NCBI NO: 21312524 NR Description: RIKEN cDNA 1500005G05 [Mus musculus] unnamed protein product [Mus musculus]
MDFLQEQSVETTVAVAVAVAAVAAGGAFLLLRSRKPKGCLDPENFRKFKLVEKKQISHNVARFKFALPTPTSVLGLPIGQHISCRGQDATGEEVIKPYTPTTLDSDLGYFELVIKMYPQGRMSHHFREMKVGDYLSVKGPKGRFKYHVGQVRAFGMLAGGSGITPMFQVARAILENPNDNTKVHLIYANVTYEDILLKDELDDMAKTYPGRFKIYYVLNQPPENWNGGVGFVSKEMIQSHCPAPAEDIQILRCGPPPMNKAMAAHLDELNYTKEMQFQF

SEQ ID NO: 4933 - protein, 164 aa, Zea mays subsp. mays
  peptide (1)..(164): Ceres Seq. ID no. 12435129
  misc_feature (36)..(150): Pfam Name: Oxidoreductase NAD-binding domain Pfam Description: Oxidoreductase NAD-binding domain
  misc_feature (1)..(164): Homolog of NCBI NO: 4336205 NR Description: cytochrome b5 reductase [Zea mays]
  misc_feature (1)..(164): Homolog of NCBI NO: 17221690 NR Description: cytochrome b5 reductase isoform II [Zea mays]
  misc_feature (1)..(164): Homolog of NCBI NO: 15238025 NR Description: NADH-cytochrome b5 reductase; protein id: supported by cDNA: 17432., supported by cDNA: gi_4240115
  misc_feature (1)..(164): Homolog of NCBI NO: 16648905 NR Description: NADH-cytochrome b5 reductase [Arabidopsis
  misc_feature (1)..(158): Homolog of NCBI NO: 6070342 NR Description: NADH-cytochrome b5 reductase [Mortierella alpina]
  misc_feature (1)..(158): Homolog of NCBI NO: 40739560 NR Description: hypothetical protein AN6366.2 [Aspergillus
  misc_feature (5)..(164): Homolog of NCBI NO: 27712062 NR Description: similar to RIKEN cDNA 1500005G05 [Mus musculus]
  misc_feature (1)..(31): Homolog of NCBI NO: 27712062 NR Description: similar to RIKEN cDNA 1500005G05 [Mus musculus]
  misc_feature (5)..(164): Homolog of NCBI NO: 21312524 NR Description: RIKEN cDNA 1500005G05 [Mus musculus] unnamed protein product [Mus musculus]
  misc_feature (1)..(31): Homolog of NCBI NO: 21312524 NR Description: RIKEN cDNA 1500005G05 [Mus musculus] unnamed protein product [Mus musculus]
MYPQGRMSHHFREMKVGDYLSVKGPKGRFKYHVGQVRAFGMLAGGSGITPMFQVARAILENPNDNTKVHLIYANVTYEDILLKDELDDMAKTYPGRFKIYYVLNQPPENWNGGVGFVSKEMIQSHCPAPAEDIQILRCGPPPMNKAMAAHLDELNYTKEMQFQF

SEQ ID NO: 4934 - protein, 158 aa, Zea mays subsp. mays
  peptide (1)..(158): Ceres Seq. ID no. 12435130
  misc_feature (30)..(144): Pfam Name: Oxidoreductase NAD-binding domain Pfam Description: Oxidoreductase NAD-binding domain
  misc_feature (1)..(158): Homolog of NCBI NO: 4336205 NR Description: cytochrome b5 reductase [Zea mays]
  misc_feature (1)..(158): Homolog of NCBI NO: 17221690 NR Description: cytochrome b5 reductase isoform II [Zea mays]
  misc_feature (1)..(158): Homolog of NCBI NO: 15238025 NR Description: NADH-cytochrome b5 reductase; protein id: supported by cDNA: 17432., supported by cDNA: gi_4240115
  misc_feature (1)..(158): Homolog of NCBI NO: 16648905 NR Description: NADH-cytochrome b5 reductase [Arabidopsis
  misc_feature (1)..(152): Homolog of NCBI NO: 6070342 NR Description: NADH-cytochrome b5 reductase [Mortierella alpina]
  misc_feature (1)..(152): Homolog of NCBI NO: 40739560 NR Description: hypothetical protein AN6366.2 [Aspergillus
  misc_feature (1)..(158): Homolog of NCBI NO: 27712062 NR Description: similar to RIKEN cDNA 1500005G05 [Mus musculus]
  misc_feature (1)..(25): Homolog of NCBI NO: 27712062 NR Description: similar to RIKEN cDNA 1500005G05 [Mus musculus]
  misc_feature (1)..(158): Homolog of NCBI NO: 21312524 NR Description: RIKEN cDNA 1500005G05 [Mus musculus] unnamed protein product [Mus musculus]
  misc_feature (1)..(25): Homolog of NCBI NO: 21312524 NR Description: RIKEN cDNA 1500005G05 [Mus musculus] unnamed protein product [Mus musculus]
MSHHFREMKVGDYLSVKGPKGRFKYHVGQVRAFGMLAGGSGITPMFQVARAILENPNDNTKVHLIYANVTYEDILLKDELDDMAKTYPGRFKIYYVLNQPPENWNGGVGFVSKEMIQSHCPAPAEDIQILRCGPPPMNKAMAAHLDELNYTKEMQFQF

SEQ ID NO: 4935 - DNA, 1102 bp, Zea mays subsp. mays
  misc_feature (1)..(1102): Ceres Seq. ID no. 12349061
  misc_feature: MA Experiment ID: 108522 Result: Up-regulated in Transcription
  misc_feature: MA Experiment 108522 PARAMETER Experiment Name: Zm_42deg_Heat_P Parameter: Age (day) Value: 8
  misc_feature: MA Experiment 108522 PARAMETER Experiment Name: Zm_42deg_Heat_P Parameter: Organism Value: Zea mays
  misc_feature: MA Experiment 108522 PARAMETER Experiment Name: Zm_42deg_Heat_P Parameter: Plant Line Value: 35A19
  misc_feature: MA Experiment 108522 PARAMETER Experiment Name: Zm_42deg_Heat_P Parameter: Temperature (deg C) Value: 42 vs. 22
  misc_feature: MA Experiment 108522 PARAMETER Experiment Name: Zm_42deg_Heat_P Parameter: Timepoint (hr) Value: 1
  misc_feature: MA Experiment 108522 PARAMETER Experiment Name: Zm_42deg_Heat_P Parameter: Tissue Value: Aerial
  misc_feature: MA Experiment ID: 108523 Result: Up-regulated in Transcription
  misc_feature: MA Experiment 108523 PARAMETER Experiment Name: Zm_42deg_Heat_P Parameter: Age (day) Value: 8
  misc_feature: MA Experiment 108523 PARAMETER Experiment Name: Zm_42deg_Heat_P Parameter: Organism Value: Zea mays
  misc_feature: MA Experiment 108523 PARAMETER Experiment Name: Zm_42deg_Heat_P Parameter: Plant Line Value: 35A19
  misc_feature: MA Experiment 108523 PARAMETER Experiment Name: Zm_42deg_Heat_P Parameter: Temperature (deg C) Value: 42 vs. 22
  misc_feature: MA Experiment 108523 PARAMETER Experiment Name: Zm_42deg_Heat_P Parameter: Timepoint (hr) Value: 6
  misc_feature: MA Experiment 108523 PARAMETER Experiment Name: Zm_42deg_Heat_P Parameter: Tissue Value: Aerial
  misc_feature: MA Experiment ID: 20000479 Result: Up-regulated in Transcription
  misc_feature: MA Experiment 20000479 PARAMETER Experiment Name: Zm_Drought_P Parameter: Age (day) Value: 10
  misc_feature: MA Experiment 20000479 PARAMETER Experiment Name: Zm_Drought_P Parameter: Organism Value: Zea mays
  misc_feature: MA Experiment 20000479 PARAMETER Experiment Name: Zm_Drought_P Parameter: Plant Line Value: 35A19
  misc_feature: MA Experiment 20000479 PARAMETER Experiment Name: Zm_Drought_P Parameter: Timepoint (hr) Value: 48
  misc_feature: MA Experiment 20000479 PARAMETER Experiment Name: Zm_Drought_P Parameter: Tissue Value: Aerial
  misc_feature: MA Experiment 20000479 PARAMETER Experiment Name: Zm_Drought_P Parameter: Treatment Value: Drought vs. No Drought
  misc_feature: MA Experiment ID: 20000480 Result: Up-regulated in Transcription
  misc_feature: MA Experiment 20000480 PARAMETER Experiment Name: Zm_Drought_P Parameter: Age (day) Value: 11
  misc_feature: MA Experiment 20000480 PARAMETER Experiment Name: Zm_Drought_P Parameter: Organism Value: Zea mays
  misc_feature: MA Experiment 20000480 PARAMETER Experiment Name: Zm_Drought_P Parameter: Plant Line Value: 35A19
  misc_feature: MA Experiment 20000480 PARAMETER Experiment Name: Zm_Drought_P Parameter: Timepoint (hr) Value: 72
  misc_feature: MA Experiment 20000480 PARAMETER Experiment Name: Zm_Drought_P Parameter: Tissue Value: Aerial
  misc_feature: MA Experiment 20000480 PARAMETER Experiment Name: Zm_Drought_P Parameter: Treatment Value: Drought vs. No Drought
  misc_feature: MA Experiment ID: 20001606 Result: Down-regulated in Transcription
  misc_feature: MA Experiment 20001606 PARAMETER Experiment Name: Zm_50ppm_KNO3_L-to-H_P Parameter: Age (day) Value: 19
  misc_feature: MA Experiment 20001606 PARAMETER Experiment Name: Zm_50ppm_KNO3_L-to-H_P Parameter: Organism Value: Zea mays
  misc_feature: MA Experiment 20001606 PARAMETER Experiment Name: Zm_50ppm_KNO3_L-to-H_P Parameter: Plant Line Value: 35A19
  misc_feature: MA Experiment 20001606 PARAMETER Experiment Name: Zm_50ppm_KNO3_L-to-H_P Parameter: Timepoint (hr) Value: 8
  misc_feature: MA Experiment 20001606 PARAMETER Experiment Name: Zm_50ppm_KNO3_L-to-H_P Parameter: Tissue Value: Shoots
  misc_feature: MA Experiment 20001606 PARAMETER Experiment Name: Zm_50ppm_KNO3_L-to-H_P Parameter: Treatment Value: 50ppm KNO3 vs. 50ppm KCl
aaaggagtatcacgagcgtcgaggtcgagcgaacccaacgcatctccgcagttagcagcacgcacccagagcaagcccaagtgcccaatcaacaaacccagaccgccagacggcaaccgttgtcatccctcactccacggcgccggccatcgtcactcacacgcccagcaccgcagcacgacaccatcgcgccctggccatcctcccgttcacgtgcacctaccgcacgcaccaccgcggaaagtaaccccgagatccagcgccatcggcacgaccaggcctgtccagggatggggcggagaggggagccctactacgtcgaagcggcgccgccggtggacgtgaacaagaacacagagtggttcatgtacccgggcgtctggaccacctacatcctcctgctcttcttcgcttggctcctcgtcctctccgtctctggttgctcccccggagcagcctggaccgtcgtaaacctcgcgcacttcgccatcacttaccacttcttccattggaagaaaggaaccccttttgctgctgatgaccaaggcatctacagcagattgacatggtgggagcaaattgacaatggtcagcagcttactcggaacagaaagtttttgactgtggtacctgtggtgctgtatctgatcgcatcgcacttgactgactacaagcagccgatgtttttcctcaatacaatggcagtttttgtgctagttgtggcaaaattgccaaacatgcacaaggtccgcatatttggaatcaatggagacatctgaggaccactgcaggaagtacatggatgcaatgccatgatgtgatgaagagctaaacagaacaagcagtgtgtttctcaaacttgacacaactgtctgtaatatatgtacaggtttaggaagaactgtaaatgttactctaccatagaagctttgccagcggactggcctgtgttgttgccgttgctgctttcttttgagtttcactggaaggggaaacggtaactccggtaaacaaccaccagcatgtggataagaaataaggaagtgtgtagcagatgctatttggtatctggttcgattgaaccaagaaatcagttaagttc

SEQ ID NO: 4936 - protein, 258 aa, Zea mays subsp. mays
  peptide (1)..(258): Ceres Seq. ID no. 12349062
  misc_feature (114)..(257): Pfam Name: ORMDL family Pfam Description: ORMDL family
  misc_feature (97)..(258): Homolog of NCBI NO: 34394897 NR Description: putative ORMDL2 [Oryza sativa (japonica
  misc_feature (99)..(248): Homolog of NCBI NO: 34901370 NR Description: OSJNBb0062P14.15 [Oryza sativa (japonica
  misc_feature (105)..(257): Homolog of NCBI NO: 18378814 NR Description: expressed protein; protein id: At1g01230.1, by cDNA: 13874., supported by cDNA: gi_13430649 [Arabidopsis >gi|13430650|gb|AAK25947.1|AF360237_1 unknown protein
  misc_feature (105)..(255): Homolog of NCBI NO: 38344271 NR Description: OSJNBa0005N02.9 [Oryza sativa (japonica
  misc_feature (105)..(257): Homolog of NCBI NO: 15238262 NR Description: putative protein; protein id: At5g42000.1 thaliana] >gi|9757945|dbj|BAB08433.1|
  misc_feature (105)..(248): Homolog of NCBI NO: 25513580 NR Description: F6F3.4 protein - Arabidopsis thaliana
  misc_feature (156)..(258): Homolog of NCBI NO: 18419644 NR Description: unknown [Narcissus pseudonarcissus]
  misc_feature (113)..(255): Homolog of NCBI NO: 13385128 NR Description: ORM1-like 3; expressed sequence AI315223 [Mus >gi|12844527|dbj|BAB26397.1| unnamed protein product [Mus >gi|12849654|dbj|BAB28432.1| unnamed protein product [Mus
  misc_feature (113)..(255): Homolog of NCBI NO: 26352536 NR Description: unnamed protein product [Mus musculus]
  misc_feature (113)..(255): Homolog of NCBI NO: 21165606 NR Description: ORMDL2 [Homo sapiens]
RSITSVEVERTQRISAVSSTHPEQAQVPNQQTQTARRQPLSSLTPRRRPSSLTRPAPQHDTIAPWPSSRSRAPTARTTAESNPEIQRHRHDQACPGMGRRGEPYYVEAAPPVDVNKNTEWFMYPGVWTTYILLLFFAWLLVLSVSGCSPGAAWTVVNLAHFAITYHFFHWKKGTPFAADDQGIYSRLTWWEQIDNGQQLTRNRKFLTVVPVVLYLIASHLTDYKQPMFFLNTMAVFVLVVAKLPNMHKVRIFGINGDI

SEQ ID NO: 4937 - protein, 162 aa, Zea mays subsp. mays
  peptide (1)..(162): Ceres Seq. ID no. 12349063
  misc_feature (18)..(161): Pfam Name: ORMDL family Pfam Description: ORMDL family
  misc_feature (1)..(162): Homolog of NCBI NO: 34394897 NR Description: putative ORMDL2 [Oryza sativa (japonica
  misc_feature (3)..(152): Homolog of NCBI NO: 34901370 NR Description: OSJNBb0062P14.15 [Oryza sativa (japonica
  misc_feature (9)..(161): Homolog of NCBI NO: 18378814 NR Description: expressed protein; protein id: At1g01230.1, by cDNA: 13874., supported by cDNA: gi_13430649 [Arabidopsis >gi|13430650|gb|AAK25947.1|AF360237_1 unknown protein
  misc_feature (9)..(159): Homolog of NCBI NO: 38344271 NR Description: OSJNBa0005N02.9 [Oryza sativa (japonica
  misc_feature (9)..(161): Homolog of NCBI NO: 15238262 NR Description: putative protein; protein id: At5g42000.1 thaliana] >gi|9757945|dbj|BAB08433.1|
  misc_feature (9)..(152): Homolog of NCBI NO: 25513580 NR Description: F6F3.4 protein - Arabidopsis thaliana
  misc_feature (60)..(162): Homolog of NCBI NO: 18419644 NR Description: unknown [Narcissus pseudonarcissus]
  misc_feature (17)..(159): Homolog of NCBI NO: 13385128 NR Description: ORM1-like 3; expressed sequence AI315223 [Mus >gi|12844527|dbj|BAB26397.1| unnamed protein product [Mus >gi|12849654|dbj|BAB28432.1| unnamed protein product [Mus
  misc_feature (17)..(159): Homolog of NCBI NO: 26352536 NR Description: unnamed protein product [Mus musculus]
  misc_feature (17)..(159): Homolog of NCBI NO: 21165606 NR Description: ORMDL2 [Homo sapiens]
MGRRGEPYYVEAAPPVDVNKNTEWFMYPGVWTTYILLLFFAWLLVLSVSGCSPGAAWTVVNLAHFAITYHFFHWKKGTPFAADDQGIYSRLTWWEQIDNGQQLTRNRKFLTVVPVVLYLIASHLTDYKQPMFFLNTMAVFVLVVAKLPNMHKVRIFGINGDI

SEQ ID NO: 4938 - protein, 137 aa, Zea mays subsp. mays
  peptide (1)..(137): Ceres Seq. ID no. 12349064
  misc_feature (1)..(136): Pfam Name: ORMDL family Pfam Description: ORMDL family
  misc_feature (1)..(137): Homolog of NCBI NO: 34394897 NR Description: putative ORMDL2 [Oryza sativa (japonica
  misc_feature (1)..(127): Homolog of NCBI NO: 34901370 NR Description: OSJNBb0062P14.15 [Oryza sativa (japonica
  misc_feature (1)..(136): Homolog of NCBI NO: 18378814 NR Description: expressed protein; protein id: At1g01230.1, by cDNA: 13874., supported by cDNA: gi_13430649 [Arabidopsis >gi|13430650|gb|AAK25947.1|AF360237_1 unknown protein
  misc_feature (1)..(134): Homolog of NCBI NO: 38344271 NR Description: OSJNBa0005N02.9 [Oryza sativa (japonica
  misc_feature (1)..(136): Homolog of NCBI NO: 15238262 NR Description: putative protein; protein id: At5g42000.1 thaliana] >gi|9757945|dbj|BAB08433.1|
  misc_feature (1)..(127): Homolog of NCBI NO: 25513580 NR Description: F6F3.4 protein - Arabidopsis thaliana
  misc_feature (35)..(137): Homolog of NCBI NO: 18419644 NR Description: unknown [Narcissus pseudonarcissus]
  misc_feature (1)..(134): Homolog of NCBI NO: 13385128 NR Description: ORM1-like 3; expressed sequence AI315223 [Mus >gi|12844527|dbj|BAB26397.1| unnamed protein product [Mus >gi|12849654|dbj|BAB28432.1| unnamed protein product [Mus
  misc_feature (1)..(134): Homolog of NCBI NO: 26352536 NR Description: unnamed protein product [Mus musculus]
  misc_feature (1)..(134): Homolog of NCBI NO: 21165606 NR Description: ORMDL2 [Homo sapiens]
MYPGVWTTYILLLFFAWLLVLSVSGCSPGAAWTVVNLAHFAITYHFFHWKKGTPFAADDQGIYSRLTWWEQIDNGQQLTRNRKFLTVVPVVLYLIASHLTDYKQPMFFLNTMAVFVLVVAKLPNMHKVRIFGINGDI

SEQ ID NO: 4939 - DNA, 1794 bp, Zea mays subsp. mays
  misc_feature (1)..(1794): Ceres Seq. ID no. 12413946
  misc_feature: MA Experiment ID: 108529 Result: Down-regulated in Transcription
  misc_feature: MA Experiment 108529 PARAMETER Experiment Name: Zm_Imbibed_Seeds_P Parameter: Age (day) Value: 5 vs. 2
  misc_feature: MA Experiment 108529 PARAMETER Experiment Name: Zm_Imbibed_Seeds_P Parameter: Organism Value: Zea mays
  misc_feature: MA Experiment 108529 PARAMETER Experiment Name: Zm_Imbibed_Seeds_P Parameter: Plant Line Value: 35A19
  misc_feature: MA Experiment 108529 PARAMETER Experiment Name: Zm_Imbibed_Seeds_P Parameter: Tissue Value: Roots vs. Embryo
  misc_feature: MA Experiment ID: 108535 Result: Up-regulated in Transcription
  misc_feature: MA Experiment 108535 PARAMETER Experiment Name: Zm_Meristem_P Parameter: Age (day) Value: 8
  misc_feature: MA Experiment 108535 PARAMETER Experiment Name: Zm_Meristem_P Parameter: Organism Value: Zea mays
  misc_feature: MA Experiment 108535 PARAMETER Experiment Name: Zm_Meristem_P Parameter: Plant Line Value: 35A19
  misc_feature: MA Experiment 108535 PARAMETER Experiment Name: Zm_Meristem_P Parameter: Tissue Value: Root Meristem vs. Above Root Meristem
  misc_feature: MA Experiment ID: 108544 Result: Down-regulated in Transcription
  misc_feature: MA Experiment ID: 20000535 Result: Up-regulated in Transcription
  misc_feature: MA Experiment 20000535 PARAMETER Experiment Name: Zm_Hybrid_Seed_Dev_P Parameter: DAP Value: 30 vs. 12
  misc_feature: MA Experiment 20000535 PARAMETER Experiment Name: Zm_Hybrid_Seed_Dev_P Parameter: Organism Value: Zea mays
  misc_feature: MA Experiment 20000535 PARAMETER Experiment Name: Zm_Hybrid_Seed_Dev_P Parameter: Plant Line Value: 35A19
  misc_feature: MA Experiment 20000535 PARAMETER Experiment Name: Zm_Hybrid_Seed_Dev_P Parameter: Tissue Value: Embryo vs. Unfert Floret
agagctgccagcctgccactgagtgaggaaccctaagcggcgcactgtgcaggcgacggccgacgggggatacggcgacatcgtccccctcgacccctcctccatccccgacgcggcggcgccagcctgcagccctgcaggtgctggactagagtcgaatgctaggcggatgctagctgctaggtgttgaatgctgatttgttgtggcctgttacgtcttcaccagttcatatattaaacttgaagaaccacgtggttgaagaaaagcccactgaaaatgagtaatacatcatcttcgtcaagtgggatgtgatatatgctgatattccaaagctcattccatttattgatctgttgggctgttccctccctaaaccccagcgtcgcctccgacaagtcaccgctccgtcggctgcttgctgcagtccaggccacgcgctacgccgtcacggtcgctcctcccgtgacgcagccgtcgctaggcgccgcctatttctcggacaaagtcgctcgccaccatggtggcagcgtccgctgccgcagaagccagcggcgagagtaaaaacgaattcctcatacgcgacgacgcgccggggctactcgccgctctcaaggagatgaaggatggactggacctcgtcaggggcaaggttgaggccatcacgcggaaggtcaaggcgaaccagttgccggcggccaacgggatcgggtacctagaagcgaagaaccacctgctccttggctattgccaggacatcgtctactacctgctccgcaaggccaaggggctctcggtggatggccaccccgtcgtacggagccttgtcgagattaggctgtttctggagaagattcgtccgattgacaagaaggcagagtaccaaatccagaagctcaccgatgccgctgacaatgccactgttcgagagaaatcaggaaatgcagaggcgaaggggaaggacgggcattcggatgaggaagacctcctgaagtataggccaaacccagatatgatggacacaaagcctggtcctgatgggcaggatactgatggtgtttaccgccctccgaaatttatgcctactagcatggatgatgaagagaaacgtcgtaaaaaagattcaaggagagataaagcgatagcccgagtggcaatagaaaacccttatattaaagagataatcgatgatgctgcggacagacctgaagagtggaaggaaacagtgggcgatgaaagcagagaatttgggaggtacatgcgacagagagaagagcaagagaagcaggaagaggagttgttcactcgggctcctgtaaccaaacgtgataagcagatcgagaagcgcataaggagacaacttcatgggctaggaggcttaactgatggtttcgaccttgggatgaacatgctgttgggaggagacaaggaagatgatggcggttcaagcaagtcgcatggcaagagcggaaaccgaaagaagcacctgaagagcagcaagaagaggaagaggcattagctctggacccacactgctgtagcacttcaacataccgatacagcctagagacggttcaagcaatccacacggaaagttgaagctggagaaaataccaagaaaccaagtagagaaaaaaactttggttcctgtaggaaagttgaagctggagaaaataccaagaaaccaagtagagaaaaaaagctttggttcctgtaggcgtattatttctgaaacagaaaacttgatctgaacgactgatcctgagccaatggaacagtatgaattatatggcttg

SEQ ID NO: 4940 - protein, 332 aa, Zea mays subsp. mays
  peptide (1)..(332): Ceres Seq. ID no. 12413947
  misc_feature (24)..(132): Pfam Name: Sas10/Utp3 family Pfam Description: Sas10/Utp3 family
  misc_feature (19)..(332): Homolog of NCBI NO: 18390818 NR Description: expressed protein; protein id: At1g07840.1, by cDNA: gi_15810572, supported by cDNA: gi_20259572 [Arabidopsis >gi|15810573|gb|AAL07174.1| unknown protein [Arabidopsis
  misc_feature (19)..(278): Homolog of NCBI NO: 25372823 NR Description: protein F24B9.6 [imported] - Arabidopsis thaliana
  misc_feature (1)..(138): Homolog of NCBI NO: 34906856 NR Description: P0470A12.5 [Oryza sativa (japonica
  misc_feature (1)..(330): Homolog of NCBI NO: 37545892 NR Description: similar to hypothetical protein [Homo sapiens]
  misc_feature (19)..(332): Homolog of NCBI NO: 40675680 NR Description: Unknown (protein for IMAGE:5336691) [Silurana
  misc_feature (19)..(330): Homolog of NCBI NO: 23272205 NR Description: Unknown (protein for IMAGE:5345281) [Mus musculus]
  misc_feature (19)..(330): Homolog of NCBI NO: 21410066 NR Description: DKFZP564O092 protein [Homo sapiens]
  misc_feature (19)..(330): Homolog of NCBI NO: 20876056 NR Description: RIKEN cDNA 1500001L15 [Mus musculus]
  misc_feature (19)..(321): Homolog of NCBI NO: 7512783 NR Description: hypothetical protein DKFZp564O092.1 - human
  misc_feature (19)..(330): Homolog of NCBI NO: 34874139 NR Description: similar to CG11030-PA [Rattus norvegicus]
MVAASAAAEASGESKNEFLIRDDAPGLLAALKEMKDGLDLVRGKVEAITRKVKANQLPAANGIGYLEAKNHLLLGYCQDIVYYLLRKAKGLSVDGHPVVRSLVEIRLFLEKIRPIDKKAEYQIQKLTDAADNATVREKSGNAEAKGKDGHSDEEDLLKYRPNPDMMDTKPGPDGQDTDGVYRPPKFMPTSMDDEEKRRKKDSRRDKAIARVAIENPYIKEIIDDAADRPEEWKETVGDESREFGRYMRQREEQEKQEEELFTRAPVTKRDKQIEKRIRRQLHGLGGLTDGFDLGMNMLLGGDKEDDGGSSKSHGKSGNRKKHLKSSKKRKRH

SEQ ID NO: 4941 - protein, 299 aa, Zea mays subsp. mays
  peptide (1)..(299): Ceres Seq. ID no. 12413948
  misc_feature (1)..(99): Pfam Name: Sas10/Utp3 family Pfam Description: Sas10/Utp3 family
  misc_feature (1)..(299): Homolog of NCBI NO: 18390818 NR Description: expressed protein; protein id: At1g07840.1, by cDNA: gi_15810572, supported by cDNA: gi_20259572 [Arabidopsis >gi|15810573|gb|AAL07174.1| unknown protein [Arabidopsis
  misc_feature (1)..(245): Homolog of NCBI NO: 25372823 NR Description: protein F24B9.6 [imported] - Arabidopsis thaliana
  misc_feature (1)..(105): Homolog of NCBI NO: 34906856 NR Description: P0470A12.5 [Oryza sativa (japonica
  misc_feature (1)..(297): Homolog of NCBI NO: 37545892 NR Description: similar to hypothetical protein [Homo sapiens]
  misc_feature (1)..(299): Homolog of NCBI NO: 40675680 NR Description: Unknown (protein for IMAGE:5336691) [Silurana
  misc_feature (1)..(297): Homolog of NCBI NO: 23272205 NR Description: Unknown (protein for IMAGE:5345281) [Mus musculus]
  misc_feature (1)..(297): Homolog of NCBI NO: 21410066 NR Description: DKFZP564O092 protein [Homo sapiens]
  misc_feature (1)..(297): Homolog of NCBI NO: 20876056 NR Description: RIKEN cDNA 1500001L15 [Mus musculus]
  misc_feature (1)..(288): Homolog of NCBI NO: 7512783 NR Description: hypothetical protein DKFZp564O092.1 - human
  misc_feature (1)..(297): Homolog of NCBI NO: 34874139 NR Description: similar to CG11030-PA [Rattus norvegicus]
MKDGLDLVRGKVEAITRKVKANQLPAANGIGYLEAKNHLLLGYCQDIVYYLLRKAKGLSVDGHPVVRSLVEIRLFLEKIRPIDKKAEYQIQKLTDAADNATVREKSGNAEAKGKDGHSDEEDLLKYRPNPDMMDTKPGPDGQDTDGVYRPPKFMPTSMDDEEKRRKKDSRRDKAIARVAIENPYIKEIIDDAADRPEEWKETVGDESREFGRYMRQREEQEKQEEELFTRAPVTKRDKQIEKRIRRQLHGLGGLTDGFDLGMNMLLGGDKEDDGGSSKSHGKSGNRKKHLKSSKKRKRH

SEQ ID NO: 4942 - protein, 168 aa, Zea mays subsp. mays
  peptide (1)..(168): Ceres Seq. ID no. 12413949
  misc_feature (1)..(168): Homolog of NCBI NO: 18390818 NR Description: expressed protein; protein id: At1g07840.1, by cDNA: gi_15810572, supported by cDNA: gi_20259572 [Arabidopsis >gi|15810573|gb|AAL07174.1| unknown protein [Arabidopsis
  misc_feature (1)..(114): Homolog of NCBI NO: 25372823 NR Description: protein F24B9.6 [imported] - Arabidopsis thaliana
  misc_feature (1)..(166): Homolog of NCBI NO: 37545892 NR Description: similar to hypothetical protein [Homo sapiens]
  misc_feature (1)..(168): Homolog of NCBI NO: 40675680 NR Description: Unknown (protein for IMAGE:5336691) [Silurana
  misc_feature (1)..(166): Homolog of NCBI NO: 23272205 NR Description: Unknown (protein for IMAGE:5345281) [Mus musculus]
  misc_feature (1)..(166): Homolog of NCBI NO: 21410066 NR Description: DKFZP564O092 protein [Homo sapiens]
  misc_feature (1)..(166): Homolog of NCBI NO: 20876056 NR Description: RIKEN cDNA 1500001L15 [Mus musculus]
  misc_feature (1)..(157): Homolog of NCBI NO: 7512783 NR Description: hypothetical protein DKFZp564O092.1 - human
  misc_feature (1)..(166): Homolog of NCBI NO: 34874139 NR Description: similar to CG11030-PA [Rattus norvegicus]
  misc_feature (1)..(168): Homolog of NCBI NO: 25012339 NR Description: RE04093p [Drosophila melanogaster]
MMDTKPGPDGQDTDGVYRPPKFMPTSMDDEEKRRKKDSRRDKAIARVAIENPYIKEIIDDAADRPEEWKETVGDESREFGRYMRQREEQEKQEEELFTRAPVTKRDKQIEKRIRRQLHGLGGLTDGFDLGMNMLLGGDKEDDGGSSKSHGKSGNRKKHLKSSKKRKRH

SEQ ID NO: 4943 - DNA, 1718 bp, Zea mays subsp. mays
  misc_feature (1)..(1718): Ceres Seq. ID no. 12391349
  misc_feature: MA Experiment ID: 108522 Result: Down-regulated in Transcription
  misc_feature: MA Experiment 108522 PARAMETER Experiment Name: Zm_42deg_Heat_P Parameter: Age (day) Value: 8
  misc_feature: MA Experiment 108522 PARAMETER Experiment Name: Zm_42deg_Heat_P Parameter: Organism Value: Zea mays
  misc_feature: MA Experiment 108522 PARAMETER Experiment Name: Zm_42deg_Heat_P Parameter: Plant Line Value: 35A19
  misc_feature: MA Experiment 108522 PARAMETER Experiment Name: Zm_42deg_Heat_P Parameter: Temperature (deg C) Value: 42 vs. 22
  misc_feature: MA Experiment 108522 PARAMETER Experiment Name: Zm_42deg_Heat_P Parameter: Timepoint (hr) Value: 1
  misc_feature: MA Experiment 108522 PARAMETER Experiment Name: Zm_42deg_Heat_P Parameter: Tissue Value: Aerial
  misc_feature: MA Experiment ID: 108527 Result: Down-regulated in Transcription
  misc_feature: MA Experiment 108527 PARAMETER Experiment Name: Zm_5mM_NO_P Parameter: Age (day) Value: 8
  misc_feature: MA Experiment 108527 PARAMETER Experiment Name: Zm_5mM_NO_P Parameter: Organism Value: Zea mays
  misc_feature: MA Experiment 108527 PARAMETER Experiment Name: Zm_5mM_NO_P Parameter: Plant Line Value: 35A19
  misc_feature: MA Experiment 108527 PARAMETER Experiment Name: Zm_5mM_NO_P Parameter: Timepoint (hr) Value: 6
  misc_feature: MA Experiment 108527 PARAMETER Experiment Name: Zm_5mM_NO_P Parameter: Tissue Value: Aerial
  misc_feature: MA Experiment 108527 PARAMETER Experiment Name: Zm_5mM_NO_P Parameter: Treatment Value: 5mM NO vs. No Treatment
  misc_feature: MA Experiment ID: 108535 Result: Up-regulated in Transcription
  misc_feature: MA Experiment 108535 PARAMETER Experiment Name: Zm_Meristem_P Parameter: Age (day) Value: 8
  misc_feature: MA Experiment 108535 PARAMETER Experiment Name: Zm_Meristem_P Parameter: Organism Value: Zea mays
  misc_feature: MA Experiment 108535 PARAMETER Experiment Name: Zm_Meristem_P Parameter: Plant Line Value: 35A19
  misc_feature: MA Experiment 108535 PARAMETER Experiment Name: Zm_Meristem_P Parameter: Tissue Value: Root Meristem vs. Above Root Meristem
  misc_feature: MA Experiment ID: 20000492 Result: Up-regulated in Transcription
  misc_feature: MA Experiment 20000492 PARAMETER Experiment Name: Zm_Hybrid_Seed_Dev_P Parameter: DAP Value: 12
  misc_feature: MA Experiment 20000492 PARAMETER Experiment Name: Zm_Hybrid_Seed_Dev_P Parameter: Organism Value: Zea mays
  misc_feature: MA Experiment 20000492 PARAMETER Experiment Name: Zm_Hybrid_Seed_Dev_P Parameter: Plant Line Value: 35A19
  misc_feature: MA Experiment 20000492 PARAMETER Experiment Name: Zm_Hybrid_Seed_Dev_P Parameter: Tissue Value: Fert Kernel vs. Unfert Floret
  misc_feature: MA Experiment ID: 20000535 Result: Up-regulated in Transcription
  misc_feature: MA Experiment 20000535 PARAMETER Experiment Name: Zm_Hybrid_Seed_Dev_P Parameter: DAP Value: 30 vs. 12
  misc_feature: MA Experiment 20000535 PARAMETER Experiment Name: Zm_Hybrid_Seed_Dev_P Parameter: Organism Value: Zea mays
  misc_feature: MA Experiment 20000535 PARAMETER Experiment Name: Zm_Hybrid_Seed_Dev_P Parameter: Plant Line Value: 35A19
  misc_feature: MA Experiment 20000535 PARAMETER Experiment Name: Zm_Hybrid_Seed_Dev_P Parameter: Tissue Value: Embryo vs. Unfert Floret
aaaaaaactcacatcgttccctacaccctactccctccgtcagccagcgaagttccttcagtcactcaacaccttacgtccctagccatcctccgccgcctccgtctctgcttccctagagccgtcgcgatggcagcagcccctgccggtgcccctgcaatcaccgcatcctcctcctttgtttcttcgtctccgttctgtctcaaggcatcgatgaccagccagcgccgacccgcggggagagtctccatcgtcatccgctgcgtcagtagcccgccggccgtcgacacatctttcaagactaatgtcccgcgcaatgctaatatggccaaactccaagcaggatatttgtttcctgagattgccaggagaagagccgctcatttgctgaagtttccagatgccaaaattataagccttggaataggcgacactaccgagcccattccaaatgtcataacaaatgccatggcagagagagcacatgccttgtcaacaattgatggctacagcggttatggagctgagcaaggtgaaaagaaactcagagcagcaattgctgcaacctactatgcggaccttggtattgaagattcagacatatttgtctctgatggtgccaaatgtgacatatctcgcttgcaggtcctttttggatctaatgtgacaattgcggtccaagatccatcataccctgcatatgttgattcaagtgttatcatggggcaaactgatttatatcagcaagacgttcagaagtatggaaacattgagtacatgagatgcggtccagaaaatggattttttcctgatctgtcaactgtccctaggacagatattattttcttttgttcacccaacaatcctactggtgctgctgcatctcgggaccaactaaccaaattagtaaaatttgcaaaggacaacgggtccatcatagtctatgattctgcttatgcaatgtacatatcagatgacagcccaaagtctatctttgaaattcctggagcaaaggaggttgctattgagacagcctcattctcgaaatacgctgggttcacaggtgtccgtntaggttggactgttgtccccaaggagctccttttctcggatggacatccagttgctaaagatttcaatcgcatagtttgcacttgcttcaatggtgcatcaaacattgcgcaagctggtggtttagcctgcctctctccagacggtctaaaggctatgcaagatgttgttggcttctacaaggagaacactgaaataatcgttgagacatttacatcactcggattcaacgtgtatggcgccaagaacgctccatacgtatgggtgcacttccctggccgcaattcgtgggatgtgttcgctgagatcctggagaaggccaatgtggtcactactcctggcactggatttggaccgggtggcgaaggctttgtgagggtcagcgcgttcgggcacagagagaacatcattgaagccgcaaggaggttaaagcagctgtataagtgagcaccgatgcagcttctgtgccctcctagacagatgtatcaataagaacacatcagggcaccaaaaatcgcttggtgaagctgccagaagatgttagattttgaacttttttttttaattctcgtgcggtgtctacattcaaaccatttcgaactctagacaatgcttgttgtaatcctgagacccttcattcactggtg

SEQ ID NO: 4944 - protein, 505 aa, Zea mays subsp. mays
  peptide (1)..(505): Ceres Seq. ID no. 12391350
  misc_feature (194)..(504): Pfam Name: Aminotransferase class I and II Pfam Description: Aminotransferase class I and II
  misc_feature (44)..(505): Homolog of NCBI NO: 37703720 NR Description: putative aminotransferase AGD2 [Oryza sativa
  misc_feature (55)..(505): Homolog of NCBI NO: 18418270 NR Description: putative protein; protein id: At4g33680.1, by cDNA: gi_15912290, supported by cDNA: gi_17529043 [Arabidopsis >gi|15912291|gb|AAL08279.1| AT4g33680/T16L1_170 [Arabidopsis
  misc_feature (79)..(505): Homolog of NCBI NO: 7447845 NR Description: probable transaminase (EC 2.6.1.-) T16L1.170 - Arabidopsis thaliana >gi|3549670|emb|CAA20581.1| putative [Arabidopsis thaliana] >gi|7270317|emb|CAB80085.1| putative
  misc_feature (89)..(501): Homolog of NCBI NO: 37703722 NR Description: putative aminotransferase ALD1 [Oryza sativa
  misc_feature (89)..(501): Homolog of NCBI NO: 24414269 NR Description: Putative transaminase [Oryza sativa (japonica
  misc_feature (101)..(504): Homolog of NCBI NO: 18397344 NR Description: putative aspartate aminotransferase; protein id: supported by cDNA: gi_15982837 [Arabidopsis thaliana] At2g13810/F13J11.16 [Arabidopsis thaliana]
  misc_feature (101)..(504): Homolog of NCBI NO: 25315768 NR Description: probable aspartate aminotransferase [imported] -
  misc_feature (106)..(503): Homolog of NCBI NO: 24213476 NR Description: aminotransferase [Leptospira interrogans serovar str. 56601] >gi|24194250|gb|AAN47975.1|AE011264_3
  misc_feature (106)..(505): Homolog of NCBI NO: 23055537 NR Description: hypothetical protein [Geobacter metallireducens]
  misc_feature (106)..(505): Homolog of NCBI NO: 23124300 NR Description: hypothetical protein [Nostoc punctiforme]
  misc_feature (358)..(358): Xaa is any aa, unknown or other
KKTHIVPYTLLPPSASEVPSVTQHLTSLAILRRLRLCFPRAVAMAAAPAGAPAITASSSFVSSSPFCLKASMTSQRRPAGRVSIVIRCVSSPPAVDTSFKTNVPRNANMAKLQAGYLFPEIARRRAAHLLKFPDAKIISLGIGDTTEPIPNVITNAMAERAHALSTIDGYSGYGAEQGEKKLRAAIAATYYADLGIEDSDIFVSDGAKCDISRLQVLFGSNVTIAVQDPSYPAYVDSSVIMGQTDLYQQDVQKYGNIEYMRCGPENGFFPDLSTVPRTDIIFFCSPNNPTGAAASRDQLTKLVKFAKDNGSIIVYDSAYAMYISDDSPKSIFEIPGAKEVAIETASFSKYAGFTGVRXGWTVVPKELLFSDGHPVAKDFNRIVCTCFNGASNIAQAGGLACLSPDGLKAMQDVVGFYKENTEIIVETFTSLGFNVYGAKNAPYVWVHFPGRNSWDVFAEILEKANVVTTPGTGFGPGGEGFVRVSAFGHRENIIEAARRLKQLYK

SEQ ID NO: 4945 - protein, 462 aa, Zea mays subsp. mays
  peptide (1)..(462): Ceres Seq. ID no. 12391351
  misc_feature (151)..(461): Pfam Name: Aminotransferase class I and II Pfam Description: Aminotransferase class I and II
  misc_feature (1)..(462): Homolog of NCBI NO: 37703720 NR Description: putative aminotransferase AGD2 [Oryza sativa
  misc_feature (12)..(462): Homolog of NCBI NO: 18418270 NR Description: putative protein; protein id: At4g33680.1, by cDNA: gi_15912290, supported by cDNA: gi_17529043 [Arabidopsis >gi|15912291|gb|AAL08279.1| AT4g33680/T16L1_170 [Arabidopsis
  misc_feature (36)..(462): Homolog of NCBI NO: 7447845 NR Description: probable transaminase (EC 2.6.1.-) T16L1.170 - Arabidopsis thaliana >gi|3549670|emb|CAA20581.1| putative [Arabidopsis thaliana] >gi|7270317|emb|CAB80085.1| putative
  misc_feature (46)..(458): Homolog of NCBI NO: 37703722 NR Description: putative aminotransferase ALD1 [Oryza sativa
  misc_feature (46)..(458): Homolog of NCBI NO: 24414269 NR Description: Putative transaminase [Oryza sativa (japonica
  misc_feature (58)..(461): Homolog of NCBI NO: 18397344 NR Description: putative aspartate aminotransferase; protein id: supported by cDNA: gi_15982837 [Arabidopsis thaliana] At2g13810/F13J11.16 [Arabidopsis thaliana]
  misc_feature (58)..(461): Homolog of NCBI NO: 25315768 NR Description: probable aspartate aminotransferase [imported] -
  misc_feature (63)..(460): Homolog of NCBI NO: 24213476 NR Description: aminotransferase [Leptospira interrogans serovar str. 56601] >gi|24194250|gb|AAN47975.1|AE011264_3
  misc_feature (63)..(462): Homolog of NCBI NO: 23055537 NR Description: hypothetical protein [Geobacter metallireducens]
  misc_feature (63)..(462): Homolog of NCBI NO: 23124300 NR Description: hypothetical protein [Nostoc punctiforme]
  misc_feature (315)..(315): Xaa is any aa, unknown or other
MAAAPAGAPAITASSSFVSSSPFCLKASMTSQRRPAGRVSIVIRCVSSPPAVDTSFKTNVPRNANMAKLQAGYLFPEIARRRAAHLLKFPDAKIISLGIGDTTEPIPNVITNAMAERAHALSTIDGYSGYGAEQGEKKLRAAIAATYYADLGIEDSDIFVSDGAKCDISRLQVLFGSNVTIAVQDPSYPAYVDSSVIMGQTDLYQQDVQKYGNIEYMRCGPENGFFPDLSTVPRTDIIFFCSPNNPTGAAASRDQLTKLVKFAKDNGSIIVYDSAYAMYISDDSPKSIFEIPGAKEVAIETASFSKYAGFTGVRXGWTVVPKELLFSDGHPVAKDFNRIVCTCFNGASNIAQAGGLACLSPDGLKAMQDVVGFYKENTEIIVETFTSLGFNVYGAKNAPYVWVHFPGRNSWDVFAEILEKANVVTTPGTGFGPGGEGFVRVSAFGHRENIIEAARRLKQLYK

SEQ ID NO: 4946 - protein, 434 aa, Zea mays subsp. mays
  peptide (1)..(434): Ceres Seq. ID no. 12391352
  misc_feature (123)..(433): Pfam Name: Aminotransferase class I and II Pfam Description: Aminotransferase class I and II
  misc_feature (1)..(434): Homolog of NCBI NO: 18418270 NR Description: putative protein; protein id: At4g33680.1, by cDNA: gi_15912290, supported by cDNA: gi_17529043 [Arabidopsis >gi|15912291|gb|AAL08279.1| AT4g33680/T16L1_170 [Arabidopsis
  misc_feature (8)..(434): Homolog of NCBI NO: 7447845 NR Description: probable transaminase (EC 2.6.1.-) T16L1.170 - Arabidopsis thaliana >gi|3549670|emb|CAA20581.1| putative [Arabidopsis thaliana] >gi|7270317|emb|CAB80085.1| putative
  misc_feature (18)..(430): Homolog of NCBI NO: 37703722 NR Description: putative aminotransferase ALD1 [Oryza sativa
  misc_feature (18)..(430): Homolog of NCBI NO: 24414269 NR Description: Putative transaminase [Oryza sativa (japonica
  misc_feature (30)..(433): Homolog of NCBI NO: 18397344 NR Description: putative aspartate aminotransferase; protein id: supported by cDNA: gi_15982837 [Arabidopsis thaliana] At2g13810/F13J11.16 [Arabidopsis thaliana]
  misc_feature (1)..(434): Homolog of NCBI NO: 37703720 NR Description: putative aminotransferase AGD2 [Oryza sativa
  misc_feature (30)..(433): Homolog of NCBI NO: 25315768 NR Description: probable aspartate aminotransferase [imported] -
  misc_feature (35)..(432): Homolog of NCBI NO: 24213476 NR Description: aminotransferase [Leptospira interrogans serovar str. 56601] >gi|24194250|gb|AAN47975.1|AE011264_3
  misc_feature (35)..(434): Homolog of NCBI NO: 23055537 NR Description: hypothetical protein [Geobacter metallireducens]
  misc_feature (35)..(434): Homolog of NCBI NO: 23124300 NR Description: hypothetical protein [Nostoc punctiforme]
  misc_feature (287)..(287): Xaa is any aa, unknown or other
MTSQRRPAGRVSIVIRCVSSPPAVDTSFKTNVPRNANMAKLQAGYLFPEIARRRAAHLLKFPDAKIISLGIGDTTEPIPNVITNAMAERAHALSTIDGYSGYGAEQGEKKLRAAIAATYYADLGIEDSDIFVSDGAKCDISRLQVLFGSNVTIAVQDPSYPAYVDSSVIMGQTDLYQQDVQKYGNIEYMRCGPENGFFPDLSTVPRTDIIFFCSPNNPTGAAASRDQLTKLVKFAKDNGSIIVYDSAYAMYISDDSPKSIFEIPGAKEVAIETASFSKYAGFTGVRXGWTVVPKELLFSDGHPVAKDFNRIVCTCFNGASNIAQAGGLACLSPDGLKAMQDVVGFYKENTEIIVETFTSLGFNVYGAKNAPYVWVHFPGRNSWDVFAEILEKANVVTTPGTGFGPGGEGFVRVSAFGHRENIIEAARRLKQLYK

SEQ ID NO: 4947 - DNA, 1447 bp, Zea mays subsp. mays
  misc_feature (1)..(1447): Ceres Seq. ID no. 12344064
  misc_feature: MA Experiment ID: 108522 Result: Down-regulated in Transcription
  misc_feature: MA Experiment 108522 PARAMETER Experiment Name: Zm_42deg_Heat_P Parameter: Age (day) Value: 8
  misc_feature: MA Experiment 108522 PARAMETER Experiment Name: Zm_42deg_Heat_P Parameter: Organism Value: Zea mays
  misc_feature: MA Experiment 108522 PARAMETER Experiment Name: Zm_42deg_Heat_P Parameter: Plant Line Value: 35A19
  misc_feature: MA Experiment 108522 PARAMETER Experiment Name: Zm_42deg_Heat_P Parameter: Temperature (deg C) Value: 42 vs. 22
  misc_feature: MA Experiment 108522 PARAMETER Experiment Name: Zm_42deg_Heat_P Parameter: Timepoint (hr) Value: 1
  misc_feature: MA Experiment 108522 PARAMETER Experiment Name: Zm_42deg_Heat_P Parameter: Tissue Value: Aerial
  misc_feature: MA Experiment ID: 108528 Result: Down-regulated in Transcription
  misc_feature: MA Experiment 108528 PARAMETER Experiment Name: Zm_Imbibed_Seeds_P Parameter: Age (day) Value: 5 vs. 2
  misc_feature: MA Experiment 108528 PARAMETER Experiment Name: Zm_Imbibed_Seeds_P Parameter: Organism Value: Zea mays
  misc_feature: MA Experiment 108528 PARAMETER Experiment Name: Zm_Imbibed_Seeds_P Parameter: Plant Line Value: 35A19
  misc_feature: MA Experiment 108528 PARAMETER Experiment Name: Zm_Imbibed_Seeds_P Parameter: Tissue Value: Aerial vs. Embryo
  misc_feature: MA Experiment ID: 108535 Result: Up-regulated in Transcription
  misc_feature: MA Experiment 108535 PARAMETER Experiment Name: Zm_Meristem_P Parameter: Age (day) Value: 8
  misc_feature: MA Experiment 108535 PARAMETER Experiment Name: Zm_Meristem_P Parameter: Organism Value: Zea mays
  misc_feature: MA Experiment 108535 PARAMETER Experiment Name: Zm_Meristem_P Parameter: Plant Line Value: 35A19
  misc_feature: MA Experiment 108535 PARAMETER Experiment Name: Zm_Meristem_P Parameter: Tissue Value: Root Meristem vs. Above Root Meristem
  misc_feature: MA Experiment ID: 108544 Result: Down-regulated in Transcription
  misc_feature: MA Experiment ID: 108556 Result: Down-regulated in Transcription
  misc_feature: MA Experiment 108556 PARAMETER Experiment Name: Zm_Drought_P Parameter: Age (day) Value: 9
  misc_feature: MA Experiment 108556 PARAMETER Experiment Name: Zm_Drought_P Parameter: Organism Value: Zea mays
  misc_feature: MA Experiment 108556 PARAMETER Experiment Name: Zm_Drought_P Parameter: Plant Line Value: 35A19
  misc_feature: MA Experiment 108556 PARAMETER Experiment Name: Zm_Drought_P Parameter: Timepoint (hr) Value: 24
  misc_feature: MA Experiment 108556 PARAMETER Experiment Name: Zm_Drought_P Parameter: Tissue Value: Aerial
  misc_feature: MA Experiment 108556 PARAMETER Experiment Name: Zm_Drought_P Parameter: Treatment Value: Drought vs. No Drought
  misc_feature: MA Experiment ID: 108687 Result: Down-regulated in Transcription
  misc_feature: MA Experiment 108687 PARAMETER Experiment Name: Zm_Embryos-Flowers__P Parameter: Tissue Value: Embryo vs. Aerial+
  misc_feature: MA Experiment ID: 20000108 Result: Up-regulated in Transcription
  misc_feature: MA Experiment 20000108 PARAMETER Experiment Name: Zm_Root-Tips_P Parameter: Age (day) Value: 12
  misc_feature: MA Experiment 20000108 PARAMETER Experiment Name: Zm_Root-Tips_P Parameter: Organism Value: Zea mays
  misc_feature: MA Experiment 20000108 PARAMETER Experiment Name: Zm_Root-Tips_P Parameter: Tissue Value: Root tips vs. Root mid region    35
  misc_feature: MA Experiment 20000108 PARAMETER Experiment Name: Zm_Root-Tips_P Parameter: Tissue Value: Root tips vs. Root mid region   Sequence Listing-Misc Features (4)
  misc_feature: MA Experiment ID: 20000626 Result: Up-regulated in Transcription
  misc_feature: MA Experiment 20000626 PARAMETER Experiment Name: Zm_Herbicide-Treatments_P Parameter: Timepoint (hr) Value: 12
  misc_feature: MA Experiment 20000626 PARAMETER Experiment Name: Zm_Herbicide-Treatments_P Parameter: Tissue Value: Aerial
  misc_feature: MA Experiment 20000626 PARAMETER Experiment Name: Zm_Herbicide-Treatments_P Parameter: Treatment Value: Roundup vs. No Treatment
  misc_feature: MA Experiment ID: 20000632 Result: Down-regulated in Transcription
  misc_feature: MA Experiment 20000632 PARAMETER Experiment Name: Zm_Herbicide-Treatments_P Parameter: Timepoint (hr) Value: 4
  misc_feature: MA Experiment 20000632 PARAMETER Experiment Name: Zm_Herbicide-Treatments_P Parameter: Tissue Value: Aerial
  misc_feature: MA Experiment 20000632 PARAMETER Experiment Name: Zm_Herbicide-Treatments_P Parameter: Treatment Value: Glean vs. No Treatment
  misc_feature: MA Experiment ID: 20001606 Result: Up-regulated in Transcription
  misc_feature: MA Experiment 20001606 PARAMETER Experiment Name: Zm_50ppm_KNO3_L-to-H_P Parameter: Age (day) Value: 19
  misc_feature: MA Experiment 20001606 PARAMETER Experiment Name: Zm_50ppm_KNO3_L-to-H_P Parameter: Organism Value: Zea mays
  misc_feature: MA Experiment 20001606 PARAMETER Experiment Name: Zm_50ppm_KNO3_L-to-H_P Parameter: Plant Line Value: 35A19
  misc_feature: MA Experiment 20001606 PARAMETER Experiment Name: Zm_50ppm_KNO3_L-to-H_P Parameter: Timepoint (hr) Value: 8
  misc_feature: MA Experiment 20001606 PARAMETER Experiment Name: Zm_50ppm_KNO3_L-to-H_P Parameter: Tissue Value: Shoots
  misc_feature: MA Experiment 20001606 PARAMETER Experiment Name: Zm_50ppm_KNO3_L-to-H_P Parameter: Treatment Value: 50ppm KNO3 vs. 50ppm KCl
gaccaaacccttctccctctcacaaaaccctagctttccctcctcccctgttttgcggcgcgccacgaactcgcgacgctctcgagagatccatggatcgggcgcaagggcggcaaccgcgacgccaacggcagcctggtcgaggccacggcgtcgcggctgagggtcgaatccgacgaggaggcggaagaggtggggatggaggtggaagagagcttcgacgcgggggtggaagacgagcaggcggcggcggaggtgattggaagcgaaaagaccagcgccgactactacttcgactcctactcccacttcggtattcatgaagaaatgctaaaagatgtcgttcggacaaaaacatatcaaaatgttatcacccagagtagctttcttatcaagaacaaagtagtccttgatgttggtgctggaactggaattctttctcttttctgtgcaaaagcaggagctaaacatgtctatgcgattgaatgttcccagatggcagacatggcacaggaaattgtaaaatcaaatggatattcagatgtcataactgtaataaaagggaaagtggaagaaatagaacttccagtcccaaaagtagatgtcatcatctcagagtggatgggctatttcctcctgttcgagaatatgttgaacactgtcctatatgcacgtgataaatggcttgctgatggtggtgtggtcctgccagacaggacttctttgcgtcttactgcgattgaagacgcagaatataaggaagacaaaattgaattttggaataatgtatatggatttgatatgagctgcataaagaaacaggcgatgatggagccactggtagatacagtggatgcaaatcagattgtcactaactgccagttactgaagacaatggatatctccaaaatgaccccaggtgacgcgtcctttactgtaccattcaagctggtagcagagcggaatgattacattcatgctcttgtcgcatactttgacgtgtcgttcaccaaatgccataagctgatgggcttctcaacaggcccgagatcgaaagccactcactggaagcaaactgttctctacctggaggatgttataactatctgtcagggggaaagcctgagtggttccatgacagtcacacccaataagagtaaccctcgagatatcgacattaagctcaagtactccataaatgggcataggtgtcaggtatcaagaacacagttctacaagatgcggtgacaatggaacaaacaagagttgcttcaaatctcattaaattttgtttaacgagtatcttgtttgacagaaattgtgctatttttattgttcatgtactatgcatcaaatattagattctttggaatctagcaaaagtagggagtagattaaactggtctgctgatatgagattgatgtagtgcaaaactgtcatattgcc

SEQ ID NO: 4948 - protein, 349 aa, Zea mays subsp. mays
  peptide (1)..(349): Ceres Seq. ID no. 12344065
  misc_feature (66)..(139): Pfam Name: Met-10+ like-protein Pfam Description: Met-10+ like-protein
  misc_feature (1)..(349): Homolog of NCBI NO: 15233606 NR Description: arginine methyltransferase (pam1); protein id: supported by cDNA: 38601., supported by cDNA: gi_17381027
  misc_feature (1)..(349): Homolog of NCBI NO: 17381028 NR Description: putative arginine methyltransferase pam1
  misc_feature (1)..(335): Homolog of NCBI NO: 25456391 NR Description: protein-arginine N-methyltransferase (EC 2.1.1.23)
  misc_feature (1)..(349): Homolog of NCBI NO: 15224820 NR Description: putative arginine N-methyltransferase; protein id:
  misc_feature (16)..(349): Homolog of NCBI NO: 28207757 NR Description: CR061 protein [Chlamydomonas reinhardtii]
  misc_feature (1)..(349): Homolog of NCBI NO: 32425330 NR Description: Unknown (protein for IMAGE:2823702) [Homo sapiens]
  misc_feature (24)..(349): Homolog of NCBI NO: 21314692 NR Description: HMT1 hnRNP methyltransferase-like 3 [Homo sapiens]
  misc_feature (1)..(349): Homolog of NCBI NO: 27882547 NR Description: Similar to heterogeneous nuclear
  misc_feature (24)..(349): Homolog of NCBI NO: 7453575 NR Description: protein arginine N-methyltransferase 1-variant 2
  misc_feature (24)..(349): Homolog of NCBI NO: 7453576 NR Description: protein arginine N-methyltransferase 1-variant 3
MEVEESFDAGVEDEQAAAEVIGSEKTSADYYFDSYSHFGIHEEMLKDVVRTKTYQNVITQSSFLIKNKVVLDVGAGTGILSLFCAKAGAKHVYAIECSQMADMAQEIVKSNGYSDVITVIKGKVEEIELPVPKVDVIISEWMGYFLLFENMLNTVLYARDKWLADGGVVLPDRTSLRLTAIEDAEYKEDKIEFWNNVYGFDMSCIKKQAMMEPLVDTVDANQIVTNCQLLKTMDISKMTPGDASFTVPFKLVAERNDYIHALVAYFDVSFTKCHKLMGFSTGPRSKATHWKQTVLYLEDVITICQGESLSGSMTVTPNKSNPRDIDIKLKYSINGHRCQVSRTQFYKMR

SEQ ID NO: 4949 - protein, 306 aa, Zea mays subsp. mays
  peptide (1)..(306): Ceres Seq. ID no. 12344066
  misc_feature (23)..(96): Pfam Name: Met-10+ like-protein Pfam Description: Met-10+ like-protein
  misc_feature (1)..(306): Homolog of NCBI NO: 15233606 NR Description: arginine methyltransferase (pam1); protein id: supported by cDNA: 38601., supported by cDNA: gi_17381027
  misc_feature (1)..(306): Homolog of NCBI NO: 17381028 NR Description: putative arginine methyltransferase pam1
  misc_feature (1)..(292): Homolog of NCBI NO: 25456391 NR Description: protein-arginine N-methyltransferase (EC 2.1.1.23)
  misc_feature (1)..(306): Homolog of NCBI NO: 15224820 NR Description: putative arginine N-methyltransferase; protein id:
  misc_feature (1)..(306): Homolog of NCBI NO: 28207757 NR Description: CR061 protein [Chlamydomonas reinhardtii]
  misc_feature (1)..(306): Homolog of NCBI NO: 32425330 NR Description: Unknown (protein for IMAGE:2823702) [Homo sapiens]
  misc_feature (1)..(306): Homolog of NCBI NO: 21314692 NR Description: HMT1 hnRNP methyltransferase-like 3 [Homo sapiens]
  misc_feature (1)..(306): Homolog of NCBI NO: 27882547 NR Description: Similar to heterogeneous nuclear
  misc_feature (1)..(306): Homolog of NCBI NO: 7453575 NR Description: protein arginine N-methyltransferase 1-variant 2
  misc_feature (1)..(306): Homolog of NCBI NO: 7453576 NR Description: protein arginine N-methyltransferase 1-variant 3
MLKDVVRTKTYQNVITQSSFLIKNKVVLDVGAGTGILSLFCAKAGAKHVYAIECSQMADMAQEIVKSNGYSDVITVIKGKVEEIELPVPKVDVIISEWMGYFLLFENMLNTVLYARDKWLADGGVVLPDRTSLRLTAIEDAEYKEDKIEFWNNVYGFDMSCIKKQAMMEPLVDTVDANQIVTNCQLLKTMDISKMTPGDASFTVPFKLVAERNDYIHALVAYFDVSFTKCHKLMGFSTGPRSKATHWKQTVLYLEDVITICQGESLSGSMTVTPNKSNPRDIDIKLKYSINGHRCQVSRTQFYKMR

SEQ ID NO: 4950 - protein, 250 aa, Zea mays subsp. mays
  peptide (1)..(250): Ceres Seq. ID no. 12344067
  misc_feature (1)..(250): Homolog of NCBI NO: 15233606 NR Description: arginine methyltransferase (pam1); protein id: supported by cDNA: 38601., supported by cDNA: gi_17381027
  misc_feature (1)..(250): Homolog of NCBI NO: 17381028 NR Description: putative arginine methyltransferase pam1
  misc_feature (1)..(236): Homolog of NCBI NO: 25456391 NR Description: protein-arginine N-methyltransferase (EC 2.1.1.23)
  misc_feature (1)..(250): Homolog of NCBI NO: 15224820 NR Description: putative arginine N-methyltransferase; protein id:
  misc_feature (1)..(250): Homolog of NCBI NO: 28207757 NR Description: CR061 protein [Chlamydomonas reinhardtii]
  misc_feature (1)..(250): Homolog of NCBI NO: 32425330 NR Description: Unknown (protein for IMAGE:2823702) [Homo sapiens]
  misc_feature (1)..(250): Homolog of NCBI NO: 21314692 NR Description: HMT1 hnRNP methyltransferase-like 3 [Homo sapiens]
  misc_feature (1)..(250): Homolog of NCBI NO: 27882547 NR Description: Similar to heterogeneous nuclear
  misc_feature (1)..(250): Homolog of NCBI NO: 7453575 NR Description: protein arginine N-methyltransferase 1-variant 2
  misc_feature (1)..(250): Homolog of NCBI NO: 7453576 NR Description: protein arginine N-methyltransferase 1-variant 3
MADMAQEIVKSNGYSDVITVIKGKVEEIELPVPKVDVIISEWMGYFLLFENMLNTVLYARDKWLADGGVVLPDRTSLRLTAIEDAEYKEDKIEFWNNVYGFDMSCIKKQAMMEPLVDTVDANQIVTNCQLLKTMDISKMTPGDASFTVPFKLVAERNDYIHALVAYFDVSFTKCHKLMGFSTGPRSKATHWKQTVLYLEDVITICQGESLSGSMTVTPNKSNPRDIDIKLKYSINGHRCQVSRTQFYKMR

SEQ ID NO: 4951 - DNA, 1545 bp, Zea mays subsp. mays
  misc_feature (1)..(1545): Ceres Seq. ID no. 12364513
  misc_feature: MA Experiment ID: 108535 Result: Up-regulated in Transcription
  misc_feature: MA Experiment 108535 PARAMETER Experiment Name: Zm_Meristem_P Parameter: Age (day) Value: 8
  misc_feature: MA Experiment 108535 PARAMETER Experiment Name: Zm_Meristem_P Parameter: Organism Value: Zea mays
  misc_feature: MA Experiment 108535 PARAMETER Experiment Name: Zm_Meristem_P Parameter: Plant Line Value: 35A19
  misc_feature: MA Experiment 108535 PARAMETER Experiment Name: Zm_Meristem_P Parameter: Tissue Value: Root Meristem vs. Above Root Meristem
gcacgagaccattacctagaacatcctaatcgaaaaactgaatctggttgtgaaccaaacacacctcagctgctctgtccaaacgcaccctgacttccgagttccgacccccactgctttgcttgctctgcactccgctaattccttccgcggcgatcccgagcaagaaacccagcagcgcggcggatctcgccgggcggcggccgccactatgatgagcggtagctcgcctccgccgccctcgcttcctgccgggagtggaggcttcttcaggggatacacaaagctgtgcaagggcctcgccgtcatattgctcattgtgcaccttgtagtccagttgtttccgtccgccgtcacctatctcgcgcttatccctggaagaacgatcccttttgcttggaacctgataactgcaggctatgtcgagcaaacaattccagggatggttgtcagcatcattggccttcttttatttgggaagttgttagaacctctatggggttcaaaagagttatcaaagttcatttttattgtcaacctttcaacttctgcttgtgttttcatgactgctattgtgctgtactatataactcagcaagagatctacctctatactcctttttctggattttatggggttctatcaggattgttggtgggcattaaacagcttttacctgatcaagagcttaatctttttgtgctaaaaattaaggcaaagtggattccatctcttgttgcattgatatccattcttggaagcatcttcatatacgactttatgtcttacctcccagttctgttgtttggcatgtatatgagttggatctacctccgttactttcaaaagagacttgagaccagcctgaaaggggatccaagtgaggagttctctttctcaagcttcttccctgaatttgtaagaccatttctcgacccaatagcatctgtattccataggttactttgtggaagatctgatgccaggggagaaacattagacacctcaccattacctggttcagattcgtttgaggcaaacaggaggagagagaggggtcaacgggcactggagcaaagattagctgagaagctggctgcagtcaggagttcagagggcggcacatcactggatgccgctgacaaagtttgagtcttctatgcaacgaacaacgagctgtgcggtgcagtttgtgatttcctggcaatttgtttctatgtgatttcctgaaggattgaacggacgcgaatgtttcatgtaccttcaccagccccagcctcaccgccgagtgcttcattttttttatggtttctcatcctaatcatcatcgggaaccaactaatgaagcactgcgccccattttccccatggtttttctgtaatcaactagaagtgatcaagtaccaagcagtgtacaatgcgatgctccgtaggacaagaactcatctatgttcggtttcctgtttttttccttccaaatggtgaggttgatacttgatagtagttgacacttgacaggaacaaaattatttttgtaacctttt

SEQ ID NO: 4952 - protein, 313 aa, Zea mays subsp. mays
  peptide (1)..(313): Ceres Seq. ID no. 12364514
  misc_feature (1)..(313): Homolog of NCBI NO: 34395257 NR Description: putative placental protein 6 [Oryza sativa
  misc_feature (20)..(313): Homolog of NCBI NO: 6648207 NR Description: unknown protein [Arabidopsis thaliana]
  misc_feature (20)..(313): Homolog of NCBI NO: 18398108 NR Description: expressed protein; protein id: At3g07950.1, by cDNA: 13017. [Arabidopsis thaliana] unknown [Arabidopsis thaliana] >gi|25083369|gb|AAN72066.1|
  misc_feature (9)..(297): Homolog of NCBI NO: 21741573 NR Description: OSJNBa0094O15.3 [Oryza sativa (japonica
  misc_feature (17)..(291): Homolog of NCBI NO: 9790165 NR Description: PL6 protein; PL-6; placental protein 6 [Mus >gi|24638131|sp|Q9WUH1|PL6_MOUSE PL6 protein (Placental protein
  misc_feature (17)..(291): Homolog of NCBI NO: 34865897 NR Description: similar to PL6 protein [Rattus norvegicus]
  misc_feature (17)..(291): Homolog of NCBI NO: 5902022 NR Description: PL6 protein [Homo sapiens]
  misc_feature (46)..(291): Homolog of NCBI NO: 19920824 NR Description: CG9536-PA [Drosophila melanogaster]
  misc_feature (63)..(157): Homolog of NCBI NO: 2340093 NR Description: PL6 protein, unknown function but deleted in
  misc_feature (220)..(291): Homolog of NCBI NO: 2340093 NR Description: PL6 protein, unknown function but deleted in
MMSGSSPPPPSLPAGSGGFFRGYTKLCKGLAVILLIVHLVVQLFPSAVTYLALIPGRTIPFAWNLITAGYVEQTIPGMVVSIIGLLLFGKLLEPLWGSKELSKFIFIVNLSTSACVFMTAIVLYYITQQEIYLYTPFSGFYGVLSGLLVGIKQLLPDQELNLFVLKIKAKWIPSLVALISILGSIFIYDFMSYLPVLLFGMYMSWIYLRYFQKRLETSLKGDPSEEFSFSSFFPEFVRPFLDPIASVFHRLLCGRSDARGETLDTSPLPGSDSFEANRRRERGQRALEQRLAEKLAAVRSSEGGTSLDAADKV

SEQ ID NO: 4953 - protein, 312 aa, Zea mays subsp. mays
  peptide (1)..(312): Ceres Seq. ID no. 12364515
  misc_feature (1)..(312): Homolog of NCBI NO: 34395257 NR Description: putative placental protein 6 [Oryza sativa
  misc_feature (19)..(312): Homolog of NCBI NO: 6648207 NR Description: unknown protein [Arabidopsis thaliana]
  misc_feature (19)..(312): Homolog of NCBI NO: 18398108 NR Description: expressed protein; protein id: At3g07950.1, by cDNA: 13017. [Arabidopsis thaliana] unknown [Arabidopsis thaliana] >gi|25083369|gb|AAN72066.1|
  misc_feature (8)..(296): Homolog of NCBI NO: 21741573 NR Description: OSJNBa0094O15.3 [Oryza sativa (japonica
  misc_feature (16)..(290): Homolog of NCBI NO: 9790165 NR Description: PL6 protein; PL-6; placental protein 6 [Mus >gi|24638131|sp|Q9WUH1|PL6_MOUSE PL6 protein (Placental protein
  misc_feature (16)..(290): Homolog of NCBI NO: 34865897 NR Description: similar to PL6 protein [Rattus norvegicus]
  misc_feature (16)..(290): Homolog of NCBI NO: 5902022 NR Description: PL6 protein [Homo sapiens]
  misc_feature (45)..(290): Homolog of NCBI NO: 19920824 NR Description: CG9536-PA [Drosophila melanogaster]
  misc_feature (62)..(156): Homolog of NCBI NO: 2340093 NR Description: PL6 protein, unknown function but deleted in
  misc_feature (219)..(290): Homolog of NCBI NO: 2340093 NR Description: PL6 protein, unknown function but deleted in
MSGSSPPPPSLPAGSGGFFRGYTKLCKGLAVILLIVHLVVQLFPSAVTYLALIPGRTIPFAWNLITAGYVEQTIPGMVVSIIGLLLFGKLLEPLWGSKELSKFIFIVNLSTSACVFMTAIVLYYITQQEIYLYTPFSGFYGVLSGLLVGIKQLLPDQELNLFVLKIKAKWIPSLVALISILGSIFIYDFMSYLPVLLFGMYMSWIYLRYFQKRLETSLKGDPSEEFSFSSFFPEFVRPFLDPIASVFHRLLCGRSDARGETLDTSPLPGSDSFEANRRRERGQRALEQRLAEKLAAVRSSEGGTSLDAADKV

SEQ ID NO: 4954 - protein, 236 aa, Zea mays subsp. mays
  peptide (1)..(236): Ceres Seq. ID no. 12364516
  misc_feature (1)..(236): Homolog of NCBI NO: 34395257 NR Description: putative placental protein 6 [Oryza sativa
  misc_feature (1)..(236): Homolog of NCBI NO: 6648207 NR Description: unknown protein [Arabidopsis thaliana]
  misc_feature (1)..(236): Homolog of NCBI NO: 18398108 NR Description: expressed protein; protein id: At3g07950.1, by cDNA: 13017. [Arabidopsis thaliana] unknown [Arabidopsis thaliana] >gi|25083369|gb|AAN72066.1|
  misc_feature (1)..(220): Homolog of NCBI NO: 21741573 NR Description: OSJNBa0094O15.3 [Oryza sativa (japonica
  misc_feature (1)..(214): Homolog of NCBI NO: 9790165 NR Description: PL6 protein; PL-6; placental protein 6 [Mus >gi|24638131|sp|Q9WUH1|PL6_MOUSE PL6 protein (Placental protein
  misc_feature (1)..(214): Homolog of NCBI NO: 34865897 NR Description: similar to PL6 protein [Rattus norvegicus]
  misc_feature (1)..(214): Homolog of NCBI NO: 5902022 NR Description: PL6 protein [Homo sapiens]
  misc_feature (1)..(214): Homolog of NCBI NO: 19920824 NR Description: CG9536-PA [Drosophila melanogaster]
  misc_feature (1)..(80): Homolog of NCBI NO: 2340093 NR Description: PL6 protein, unknown function but deleted in
  misc_feature (143)..(214): Homolog of NCBI NO: 2340093 NR Description: PL6 protein, unknown function but deleted in
MVVSIIGLLLFGKLLEPLWGSKELSKFIFIVNLSTSACVFMTAIVLYYITQQEIYLYTPFSGFYGVLSGLLVGIKQLLPDQELNLFVLKIKAKWIPSLVALISILGSIFIYDFMSYLPVLLFGMYMSWIYLRYFQKRLETSLKGDPSEEFSFSSFFPEFVRPFLDPIASVFHRLLCGRSDARGETLDTSPLPGSDSFEANRRRERGQRALEQRLAEKLAAVRSSEGGTSLDAADKV

SEQ ID NO: 4955 - DNA, 1332 bp, Zea mays subsp. mays
  misc_feature (1)..(1332): Ceres Seq. ID no. 12362166
  misc_feature: MA Experiment ID: 108522 Result: Down-regulated in Transcription
  misc_feature: MA Experiment 108522 PARAMETER Experiment Name: Zm_42deg_Heat_P Parameter: Age (day) Value: 8
  misc_feature: MA Experiment 108522 PARAMETER Experiment Name: Zm_42deg_Heat_P Parameter: Organism Value: Zea mays
  misc_feature: MA Experiment 108522 PARAMETER Experiment Name: Zm_42deg_Heat_P Parameter: Plant Line Value: 35A19
  misc_feature: MA Experiment 108522 PARAMETER Experiment Name: Zm_42deg_Heat_P Parameter: Temperature (deg C) Value: 42 vs. 22
  misc_feature: MA Experiment 108522 PARAMETER Experiment Name: Zm_42deg_Heat_P Parameter: Timepoint (hr) Value: 1
  misc_feature: MA Experiment 108522 PARAMETER Experiment Name: Zm_42deg_Heat_P Parameter: Tissue Value: Aerial
atcctcctctcgctctcaggcgcatcattcttctcgcctcgtgtcgctgacttccccaagctttgctgggttgccttcgagcaggagacaggctgtgtagtgtagtctagtgctaccaggatcggatcagcggctgctgcgcttcagttgccgccggcggcatgagggtggtggtgacgggcgcgacggggtacctgggaggccgcctgtgcgcggcgctggccggcgcgggccacgccgtgcgcgcgctcgtccgccactccagcgacgtctccggcctgccccgcgacatcgagatgacctacggcgacgtcaccgacgccgagtccctcgccgtggccttcgacggctgcgacgtcgtgttccacgtcgccgcggccgttgagccgtggttgcccgacccctccgttttcttcaaagttaatgtaggtggacttgagaatgtgttgaaggctgtcaagagaacaccaactgtgaagaagataatctacacatcttctttctttgcaattggtccaactgatggttatgttgcagatgagacacagatgcatcgagggaaggaattttgtactgaatatgagaaatcgaagtttcttgcagatagaatcgcactgcaggcagcagcagataaggtgccaatcaccattgtctacccaggtgttctctacggccctggaaaacttacgactggaaatcttgtctcacgcattctaatagagaggtttaatgggcgcttgcctggttacataggagatgggtatgatagagaatcgttctgccatgttgatgatgttgttaacgggcacatagcagctatggagaagggcagagtgggccaacggtatctcctcactggtgaaaacatgtcgttcgtgctgatttttaacatggttgctaatatcacaaacacaagggctcccatgttccacgtacctctctggttgattgaagcgtatgggtggatttcagtttttgtttctcgcatcactggaaaactcccacttatcagttaccctactgtgcgtgttctgagacatcagtgggcatactcgtgtgacaaagcaaagatggagctgggctataccccaagaaacttgaccgaaggtttgtcggagatgctcctgtggctcaaggaagaaaaactaatcaagttttagcgttctctactacacaccacatcacatatttaatgtacaccgatacattggggatgtgctggggattttgaagtgtatatgcttcggcattgcatcacgtcgtattatgctagaggaaatctaagatgttgacgtgtgatactgatgttggcaacaaagagagaaattatgc

SEQ ID NO: 4956 - protein, 332 aa, Zea mays subsp. mays
  peptide (1)..(332): Ceres Seq. ID no. 12362167
  misc_feature (2)..(328): Pfam Name: 3-beta hydroxysteroid dehydrogenase/isomerase family Pfam Description: 3-beta hydroxysteroid dehydrogenase/isomerase
  misc_feature (1)..(332): Homolog of NCBI NO: 15217277 NR Description: Putative dihydroflavonal-4-reductase [Oryza
  misc_feature (1)..(332): Homolog of NCBI NO: 15234163 NR Description: putative protein; protein id: At4g33360.1, by cDNA: gi_13926212 [Arabidopsis thaliana]
  misc_feature (1)..(332): Homolog of NCBI NO: 21450875 NR Description: unknown protein [Arabidopsis thaliana]
  misc_feature (1)..(328): Homolog of NCBI NO: 23103397 NR Description: hypothetical protein [Azotobacter vinelandii]
  misc_feature (3)..(331): Homolog of NCBI NO: 22981628 NR Description: hypothetical protein [Ralstonia metallidurans]
  misc_feature (1)..(325): Homolog of NCBI NO: 22965470 NR Description: hypothetical protein [Rhodospirillum rubrum]
  misc_feature (1)..(331): Homolog of NCBI NO: 40063226 NR Description: conserved hypothetical protein [uncultured
  misc_feature (3)..(331): Homolog of NCBI NO: 22985846 NR Description: hypothetical protein [Burkholderia fungorum]
  misc_feature (1)..(331): Homolog of NCBI NO: 23056056 NR Description: hypothetical protein [Geobacter metallireducens]
  misc_feature (1)..(331): Homolog of NCBI NO: 17231760 NR Description: putative dihydroflavonol 4-reductase [Nostoc sp.
MRVVVTGATGYLGGRLCAALAGAGHAVRALVRHSSDVSGLPRDIEMTYGDVTDAESLAVAFDGCDVVFHVAAAVEPWLPDPSVFFKVNVGGLENVLKAVKRTPTVKKIIYTSSFFAIGPTDGYVADETQMHRGKEFCTEYEKSKFLADRIALQAAADKVPITIVYPGVLYGPGKLTTGNLVSRILIERFNGRLPGYIGDGYDRESFCHVDDVVNGHIAAMEKGRVGQRYLLTGENMSFVLIFNMVANITNTRAPMFHVPLWLIEAYGWISVFVSRITGKLPLISYPTVRVLRHQWAYSCDKAKMELGYTPRNLTEGLSEMLLWLKEEKLIKF

SEQ ID NO: 4957 - protein, 287 aa, Zea mays subsp. mays
  peptide (1)..(287): Ceres Seq. ID no. 12362168
  misc_feature (1)..(283): Pfam Name: 3-beta hydroxysteroid dehydrogenase/isomerase family Pfam Description: 3-beta hydroxysteroid dehydrogenase/isomerase
  misc_feature (1)..(287): Homolog of NCBI NO: 15217277 NR Description: Putative dihydroflavonal-4-reductase [Oryza
  misc_feature (1)..(287): Homolog of NCBI NO: 15234163 NR Description: putative protein; protein id: At4g33360.1, by cDNA: gi_13926212 [Arabidopsis thaliana]
  misc_feature (1)..(287): Homolog of NCBI NO: 21450875 NR Description: unknown protein [Arabidopsis thaliana]
  misc_feature (1)..(283): Homolog of NCBI NO: 23103397 NR Description: hypothetical protein [Azotobacter vinelandii]
  misc_feature (1)..(286): Homolog of NCBI NO: 22981628 NR Description: hypothetical protein [Ralstonia metallidurans]
  misc_feature (1)..(280): Homolog of NCBI NO: 22965470 NR Description: hypothetical protein [Rhodospirillum rubrum]
  misc_feature (1)..(286): Homolog of NCBI NO: 40063226 NR Description: conserved hypothetical protein [uncultured
  misc_feature (1)..(286): Homolog of NCBI NO: 22985846 NR Description: hypothetical protein [Burkholderia fungorum]
  misc_feature (1)..(286): Homolog of NCBI NO: 23056056 NR Description: hypothetical protein [Geobacter metallireducens]
  misc_feature (1)..(286): Homolog of NCBI NO: 17231760 NR Description: putative dihydroflavonol 4-reductase [Nostoc sp.
MTYGDVTDAESLAVAFDGCDVVFHVAAAVEPWLPDPSVFFKVNVGGLENVLKAVKRTPTVKKIIYTSSFFAIGPTDGYVADETQMHRGKEFCTEYEKSKFLADRIALQAAADKVPITIVYPGVLYGPGKLTTGNLVSRILIERFNGRLPGYIGDGYDRESFCHVDDVVNGHIAAMEKGRVGQRYLLTGENMSFVLIFNMVANITNTRAPMFHVPLWLIEAYGWISVFVSRITGKLPLISYPTVRVLRHQWAYSCDKAKMELGYTPRNLTEGLSEMLLWLKEEKLIKF

SEQ ID NO: 4958 - protein, 203 aa, Zea mays subsp. mays
  peptide (1)..(203): Ceres Seq. ID no. 12362169
  misc_feature (1)..(199): Pfam Name: 3-beta hydroxysteroid dehydrogenase/isomerase family Pfam Description: 3-beta hydroxysteroid dehydrogenase/isomerase
  misc_feature (1)..(203): Homolog of NCBI NO: 15217277 NR Description: Putative dihydroflavonal-4-reductase [Oryza
  misc_feature (1)..(203): Homolog of NCBI NO: 15234163 NR Description: putative protein; protein id: At4g33360.1, by cDNA: gi_13926212 [Arabidopsis thaliana]
  misc_feature (1)..(203): Homolog of NCBI NO: 21450875 NR Description: unknown protein [Arabidopsis thaliana]
  misc_feature (1)..(199): Homolog of NCBI NO: 23103397 NR Description: hypothetical protein [Azotobacter vinelandii]
  misc_feature (1)..(202): Homolog of NCBI NO: 22981628 NR Description: hypothetical protein [Ralstonia metallidurans]
  misc_feature (1)..(196): Homolog of NCBI NO: 22965470 NR Description: hypothetical protein [Rhodospirillum rubrum]
  misc_feature (1)..(202): Homolog of NCBI NO: 40063226 NR Description: conserved hypothetical protein [uncultured
  misc_feature (1)..(202): Homolog of NCBI NO: 22985846 NR Description: hypothetical protein [Burkholderia fungorum]
  misc_feature (1)..(202): Homolog of NCBI NO: 23056056 NR Description: hypothetical protein [Geobacter metallireducens]
  misc_feature (1)..(202): Homolog of NCBI NO: 17231760 NR Description: putative dihydroflavonol 4-reductase [Nostoc sp.
MHRGKEFCTEYEKSKFLADRIALQAAADKVPITIVYPGVLYGPGKLTTGNLVSRILIERFNGRLPGYIGDGYDRESFCHVDDVVNGHIAAMEKGRVGQRYLLTGENMSFVLIFNMVANITNTRAPMFHVPLWLIEAYGWISVFVSRITGKLPLISYPTVRVLRHQWAYSCDKAKMELGYTPRNLTEGLSEMLLWLKEEKLIKF

SEQ ID NO: 4959 - DNA, 1001 bp, Zea mays subsp. mays
  misc_feature (1)..(1001): Ceres Seq. ID no. 12405116
  misc_feature: MA Experiment ID: 108529 Result: Up-regulated in Transcription
  misc_feature: MA Experiment 108529 PARAMETER Experiment Name: Zm_Imbibed_Seeds_P Parameter: Age (day) Value: 5 vs. 2
  misc_feature: MA Experiment 108529 PARAMETER Experiment Name: Zm_Imbibed_Seeds_P Parameter: Organism Value: Zea mays
  misc_feature: MA Experiment 108529 PARAMETER Experiment Name: Zm_Imbibed_Seeds_P Parameter: Plant Line Value: 35A19
  misc_feature: MA Experiment 108529 PARAMETER Experiment Name: Zm_Imbibed_Seeds_P Parameter: Tissue Value: Roots vs. Embryo
  misc_feature: MA Experiment ID: 108535 Result: Down-regulated in Transcription
  misc_feature: MA Experiment 108535 PARAMETER Experiment Name: Zm_Meristem_P Parameter: Age (day) Value: 8
  misc_feature: MA Experiment 108535 PARAMETER Experiment Name: Zm_Meristem_P Parameter: Organism Value: Zea mays
  misc_feature: MA Experiment 108535 PARAMETER Experiment Name: Zm_Meristem_P Parameter: Plant Line Value: 35A19
  misc_feature: MA Experiment 108535 PARAMETER Experiment Name: Zm_Meristem_P Parameter: Tissue Value: Root Meristem vs. Above Root Meristem
  misc_feature: MA Experiment ID: 20000480 Result: Down-regulated in Transcription
  misc_feature: MA Experiment 20000480 PARAMETER Experiment Name: Zm_Drought_P Parameter: Age (day) Value: 11
  misc_feature: MA Experiment 20000480 PARAMETER Experiment Name: Zm_Drought_P Parameter: Organism Value: Zea mays
  misc_feature: MA Experiment 20000480 PARAMETER Experiment Name: Zm_Drought_P Parameter: Plant Line Value: 35A19
  misc_feature: MA Experiment 20000480 PARAMETER Experiment Name: Zm_Drought_P Parameter: Timepoint (hr) Value: 72
  misc_feature: MA Experiment 20000480 PARAMETER Experiment Name: Zm_Drought_P Parameter: Tissue Value: Aerial
  misc_feature: MA Experiment 20000480 PARAMETER Experiment Name: Zm_Drought_P Parameter: Treatment Value: Drought vs. No Drought
acgcgcgaagtcattctcgtccaaaatggcgcacaagcactgtttcgtccttcttcgtattccctccctatagccgcccgcatggcgaaccgaagcgaagccaaaacgcccattccccttcgccctcttcgaccctagcaagaagacggcggcggagatggtgtactacgcgcttttggtgggcgcagagctggacggcctcaccaacctgcagcccagcggcggctgcgacgaccccagcttcccctactacctcaagctcaagtgcgagaactgcggggaggtcaccgccaagtccacctacgtcactctcagcgagcaagtcgacctgcccaagggacatggcaccgctcacctcgtccagaagtgcaagctttgcgggagagatggaacaattgtgatgattcctggtcaggggacgccacttactattgagcagagccagaaagaagagaagacttgtttgatggtgtttgactgcagaggctatgaacctgttgagttttcttttggagctggctggaaggctgaatctgtgcatgggactccttttgaaattgactgctctgaagatgaattttctgagtatgatgagaagggagaatgcccggttgagctaagcaagctgcagtcaacattcaaagtggtgaagaagcatgagaagggtggtaagacaagatttgtctagatccagtgacttggagtctgtcgggtattggaatcgaaggtgtataaatggtacatttgggctaaaaggttgtgcgtaatcagacgtcccttttctgtctattgattctgtggatgccgtgaaccatgtgaagctttcggtgacagtgtccacagaggcatttgccctggaccgattgctattgttctgtggtctgaggccatcggaaccgatctttttatcttgtgctaatgcttgaacatgctgctgatttttttagcattgtgactgatggctctgaagacatctcacgaattggaggctccgaaccatt

SEQ ID NO: 4960 - protein, 176 aa, Zea mays subsp. mays
  peptide (1)..(176): Ceres Seq. ID no. 12405117
  misc_feature (1)..(164): Pfam Name: Eukaryotic protein of unknown function (DUF866) Pfam Description: Eukaryotic protein of unknown function (DUF866)
  misc_feature (1)..(174): Homolog of NCBI NO: 34914208 NR Description: OSJNBb0049O23.17 [Oryza sativa (japonica
  misc_feature (1)..(165): Homolog of NCBI NO: 18418118 NR Description: putative protein; protein id: At4g32930.1, by cDNA: 8739. [Arabidopsis thaliana] >gi|21617910|gb|AAM66960.1| [Arabidopsis thaliana] >gi|27754522|gb|AAO22708.1| unknown
  misc_feature (1)..(165): Homolog of NCBI NO: 7486215 NR Description: hypothetical protein F26P21.50 - Arabidopsis >gi|3688174|emb|CAA21202.1| putative protein [Arabidopsis >gi|7270240|emb|CAB80010.1| putative protein [Arabidopsis
  misc_feature (3)..(169): Homolog of NCBI NO: 7503539 NR Description: hypothetical protein F46B6.3 - Caenorhabditis
  misc_feature (5)..(161): Homolog of NCBI NO: 8923541 NR Description: hypothetical protein FLJ20580 [Homo sapiens] unnamed protein product [Homo sapiens]
  misc_feature (5)..(161): Homolog of NCBI NO: 27715611 NR Description: similar to hypothetical protein FLJ20580 [Homo
  misc_feature (5)..(161): Homolog of NCBI NO: 21539639 NR Description: RIKEN cDNA 0610037L13 [Mus musculus] unnamed protein product [Mus musculus]
  misc_feature (5)..(161): Homolog of NCBI NO: 26328397 NR Description: unnamed protein product [Mus musculus]
  misc_feature (33)..(169): Homolog of NCBI NO: 17561054 NR Description: Putative protein of eukaryotic origin elegans] >gi|13548373|emb|CAC35815.1| Hypothetical protein
  misc_feature (5)..(161): Homolog of NCBI NO: 26341300 NR Description: unnamed protein product [Mus musculus]
MVYYALLVGAELDGLTNLQPSGGCDDPSFPYYLKLKCENCGEVTAKSTYVTLSEQVDLPKGHGTAHLVQKCKLCGRDGTIVMIPGQGTPLTIEQSQKEEKTCLMVFDCRGYEPVEFSFGAGWKAESVHGTPFEIDCSEDEFSEYDEKGECPVELSKLQSTFKVVKKHEKGGKTRFV

SEQ ID NO: 4961 - protein, 132 aa, Zea mays subsp. mays
  peptide (1)..(132): Ceres Seq. ID no. 12405118
ARSHSRPKWRTSTVSSFFVFPPYSRPHGEPKRSQNAHSPSPSSTLARRRRRRWCTTRFWWAQSWTASPTCSPAAAATTPASPTTSSSSARTAGRSPPSPPTSLSASKSTCPRDMAPLTSSRSASFAGEMEQL

SEQ ID NO: 4962 - protein, 95 aa, Zea mays subsp. mays
  peptide (1)..(95): Ceres Seq. ID no. 12405119
  misc_feature (1)..(83): Pfam Name: Eukaryotic protein of unknown function (DUF866) Pfam Description: Eukaryotic protein of unknown function (DUF866)
  misc_feature (1)..(80): Homolog of NCBI NO: 21539639 NR Description: RIKEN cDNA 0610037L13 [Mus musculus] unnamed protein product [Mus musculus]
  misc_feature (1)..(80): Homolog of NCBI NO: 26328397 NR Description: unnamed protein product [Mus musculus]
  misc_feature (1)..(93): Homolog of NCBI NO: 34914208 NR Description: OSJNBb0049O23.17 [Oryza sativa (japonica
  misc_feature (1)..(84): Homolog of NCBI NO: 7486215 NR Description: hypothetical protein F26P21.50 - Arabidopsis >gi|3688174|emb|CAA21202.1| putative protein [Arabidopsis >gi|7270240|emb|CAB80010.1| putative protein [Arabidopsis
  misc_feature (1)..(80): Homolog of NCBI NO: 8923541 NR Description: hypothetical protein FLJ20580 [Homo sapiens] unnamed protein product [Homo sapiens]
  misc_feature (1)..(80): Homolog of NCBI NO: 27715611 NR Description: similar to hypothetical protein FLJ20580 [Homo
  misc_feature (1)..(88): Homolog of NCBI NO: 7503539 NR Description: hypothetical protein F46B6.3 - Caenorhabditis
  misc_feature (1)..(84): Homolog of NCBI NO: 18418118 NR Description: putative protein; protein id: At4g32930.1, by cDNA: 8739. [Arabidopsis thaliana] >gi|21617910|gb|AAM66960.1| [Arabidopsis thaliana] >gi|27754522|gb|AAO22708.1| unknown
  misc_feature (1)..(88): Homolog of NCBI NO: 17561054 NR Description: Putative protein of eukaryotic origin elegans] >gi|13548373|emb|CAC35815.1| Hypothetical protein
  misc_feature (1)..(80): Homolog of NCBI NO: 26341300 NR Description: unnamed protein product [Mus musculus]
MIPGQGTPLTIEQSQKEEKTCLMVFDCRGYEPVEFSFGAGWKAESVHGTPFEIDCSEDEFSEYDEKGECPVELSKLQSTFKVVKKHEKGGKTRFV

SEQ ID NO: 4963 - DNA, 1674 bp, Zea mays subsp. mays
  misc_feature (1)..(1674): Ceres Seq. ID no. 12409778
  misc_feature: MA Experiment ID: 20000535 Result: Down-regulated in Transcription
  misc_feature: MA Experiment 20000535 PARAMETER Experiment Name: Zm_Hybrid_Seed_Dev_P Parameter: DAP Value: 30 vs. 12
  misc_feature: MA Experiment 20000535 PARAMETER Experiment Name: Zm_Hybrid_Seed_Dev_P Parameter: Organism Value: Zea mays
  misc_feature: MA Experiment 20000535 PARAMETER Experiment Name: Zm_Hybrid_Seed_Dev_P Parameter: Plant Line Value: 35A19
  misc_feature: MA Experiment 20000535 PARAMETER Experiment Name: Zm_Hybrid_Seed_Dev_P Parameter: Tissue Value: Embryo vs. Unfert Floret
atcacataacatcacatgtttttcgtcgtgacgtctcacactcccactagttgattgaggaagagacctgctcgcttctccctctccccgagtcgatcggtccagtccgagggaagaaggcaagaagctcccggcgcgcgcgcgcaagcgagaggaaatggcgaccagcaacggctcaggggtcgcgcagggggaggaggggaagacgccaccgcctgcggggtcgatcggcgggtacgagtccctgcacaggctcctggaggccaacctttcccccgatctattccaggaagcaagtcgattgctgctgggactgaattgtgcacgacctcttgaggctatctcactgcctgacgccacaaccactcttgcggaaacacacagttttgatttgcaggcattccgttttagtgcagacaaagagtttctgaggcaatcaagagttgttcgagtaggtctaattcagaactcaattgctgttcccactacttgtcactttgctgaccaaaagaaggcaatcatggacaaaataaaacctctaattgatgcagccggcgcttctggtgtcaatattatgtgcttacaagaagcctggacaatgccttttgccttctgcacacgcgagaaaagatggtgtgaatttgctgaaccagttgatggagaatctactcaattccttcaggaacttgcacagaagtataacatggtaatagtgagcccaatccttgaaagggatataaaccatggggagactatttggaatactgctgttgttattggaaacaacggcaacataattggcattcatcgaaagaatcacattccaagagttggtgatttcaatgagagcacatactacatggagggtaacactgggcatccagtgtttgaaacagcttatggcaaaataggagtgaacatttgttatggaagacatcatccccttaattggcttgcgtttggtctcaatggagctgaaatagtgttcaacccatctgcgactgttggtgaactgagtgaaccaatgtggcccattgaggcaaggaacgccgcaattgcaaacagctacttcgttggatcaattaatcgggttggcacagaagtgttccctaatcctttcacatccggtgatgggaaaccgcaacacgcagactttggccatttctatggatctagccatttctcagcacctgatgcctcctgcaccccatctctatcacgctaccgagatggcttgatcatctccgatatggacctcaacctatgccgccagatcaaagacaagtgggccttccgcatgactgctcgctatgagatgtatgcatccttgctctcagagtacttgaagccagatttcaaacctcaagtcattgttgatcccttgattaataagaaggcataaaaactgaggtatgctggatacttgggcttaaaaggaggtcatttgtgtattgacatgaacaggaaaaggtttaccatttagcagaataatgtctacgatgaagatgcaaaatggaggaagtttctttctttttttttcctttacatttccacatactgtaaaaatgtgtttggtgtagtttgagcttcttttactcaatattcgaaacagtaatgcttgttttgttgtataatttgctagagatttttcgatgaagaaattcaacaatcttt

SEQ ID NO: 4964 - protein, 414 aa, Zea mays subsp. mays
  peptide (1)..(414): Ceres Seq. ID no. 12409779
  misc_feature (1)..(414): Homolog of NCBI NO: 22775671 NR Description: contains ESTs
  misc_feature (13)..(414): Homolog of NCBI NO: 30698009 NR Description: beta-ureidopropionase [Arabidopsis thaliana]
  misc_feature (27)..(408): Homolog of NCBI NO: 14334061 NR Description: beta-alanine synthase [Dictyostelium discoideum]
  misc_feature (22)..(405): Homolog of NCBI NO: 40215848 NR Description: LD13390p [Drosophila melanogaster]
  misc_feature (28)..(405): Homolog of NCBI NO: 21358471 NR Description: CG3027-PA [Drosophila melanogaster]
  misc_feature (27)..(405): Homolog of NCBI NO: 7706509 NR Description: beta-ureidopropionase [Homo sapiens]
  misc_feature (27)..(405): Homolog of NCBI NO: 6288790 NR Description: beta-ureidopropionase [Homo sapiens]
  misc_feature (27)..(410): Homolog of NCBI NO: 16758704 NR Description: ureidopropionase, beta [Rattus norvegicus]
  misc_feature (27)..(410): Homolog of NCBI NO: 19527212 NR Description: expressed sequence AI195023 [Mus musculus]
  misc_feature (21)..(404): Homolog of NCBI NO: 39597058 NR Description: Hypothetical protein CBG02618 [Caenorhabditis
MATSNGSGVAQGEEGKTPPPAGSIGGYESLHRLLEANLSPDLFQEASRLLLGLNCARPLEAISLPDATTTLAETHSFDLQAFRFSADKEFLRQSRVVRVGLIQNSIAVPTTCHFADQKKAIMDKIKPLIDAAGASGVNIMCLQEAWTMPFAFCTREKRWCEFAEPVDGESTQFLQELAQKYNMVIVSPILERDINHGETIWNTAVVIGNNGNIIGIHRKNHIPRVGDFNESTYYMEGNTGHPVFETAYGKIGVNICYGRHHPLNWLAFGLNGAEIVFNPSATVGELSEPMWPIEARNAAIANSYFVGSINRVGTEVFPNPFTSGDGKPQHADFGHFYGSSHFSAPDASCTPSLSRYRDGLIISDMDLNLCRQIKDKWAFRMTARYEMYASLLSEYLKPDFKPQVIVDPLINKKA

SEQ ID NO: 4965 - protein, 293 aa, Zea mays subsp. mays
  peptide (1)..(293): Ceres Seq. ID no. 12409780
  misc_feature (1)..(293): Homolog of NCBI NO: 22775671 NR Description: contains ESTs
  misc_feature (1)..(293): Homolog of NCBI NO: 30698009 NR Description: beta-ureidopropionase [Arabidopsis thaliana]
  misc_feature (1)..(287): Homolog of NCBI NO: 14334061 NR Description: beta-alanine synthase [Dictyostelium discoideum]
  misc_feature (1)..(284): Homolog of NCBI NO: 40215848 NR Description: LD13390p [Drosophila melanogaster]
  misc_feature (1)..(284): Homolog of NCBI NO: 21358471 NR Description: CG3027-PA [Drosophila melanogaster]
  misc_feature (1)..(284): Homolog of NCBI NO: 7706509 NR Description: beta-ureidopropionase [Homo sapiens]
  misc_feature (1)..(284): Homolog of NCBI NO: 6288790 NR Description: beta-ureidopropionase [Homo sapiens]
  misc_feature (1)..(289): Homolog of NCBI NO: 16758704 NR Description: ureidopropionase, beta [Rattus norvegicus]
  misc_feature (1)..(289): Homolog of NCBI NO: 19527212 NR Description: expressed sequence AI195023 [Mus musculus]
  misc_feature (1)..(283): Homolog of NCBI NO: 39597058 NR Description: Hypothetical protein CBG02618 [Caenorhabditis
MDKIKPLIDAAGASGVNIMCLQEAWTMPFAFCTREKRWCEFAEPVDGESTQFLQELAQKYNMVIVSPILERDINHGETIWNTAVVIGNNGNIIGIHRKNHIPRVGDFNESTYYMEGNTGHPVFETAYGKIGVNICYGRHHPLNWLAFGLNGAEIVFNPSATVGELSEPMWPIEARNAAIANSYFVGSINRVGTEVFPNPFTSGDGKPQHADFGHFYGSSHFSAPDASCTPSLSRYRDGLIISDMDLNLCRQIKDKWAFRMTARYEMYASLLSEYLKPDFKPQVIVDPLINKKA

SEQ ID NO: 4966 - protein, 275 aa, Zea mays subsp. mays
  peptide (1)..(275): Ceres Seq. ID no. 12409781
  misc_feature (1)..(275): Homolog of NCBI NO: 22775671 NR Description: contains ESTs
  misc_feature (1)..(275): Homolog of NCBI NO: 30698009 NR Description: beta-ureidopropionase [Arabidopsis thaliana]
  misc_feature (1)..(269): Homolog of NCBI NO: 14334061 NR Description: beta-alanine synthase [Dictyostelium discoideum]
  misc_feature (1)..(266): Homolog of NCBI NO: 40215848 NR Description: LD13390p [Drosophila melanogaster]
  misc_feature (1)..(266): Homolog of NCBI NO: 21358471 NR Description: CG3027-PA [Drosophila melanogaster]
  misc_feature (1)..(266): Homolog of NCBI NO: 7706509 NR Description: beta-ureidopropionase [Homo sapiens]
  misc_feature (1)..(266): Homolog of NCBI NO: 6288790 NR Description: beta-ureidopropionase [Homo sapiens]
  misc_feature (1)..(271): Homolog of NCBI NO: 16758704 NR Description: ureidopropionase, beta [Rattus norvegicus]
  misc_feature (1)..(271): Homolog of NCBI NO: 19527212 NR Description: expressed sequence AI195023 [Mus musculus]
  misc_feature (1)..(265): Homolog of NCBI NO: 39597058 NR Description: Hypothetical protein CBG02618 [Caenorhabditis
MCLQEAWTMPFAFCTREKRWCEFAEPVDGESTQFLQELAQKYNMVIVSPILERDINHGETIWNTAVVIGNNGNIIGIHRKNHIPRVGDFNESTYYMEGNTGHPVFETAYGKIGVNICYGRHHPLNWLAFGLNGAEIVFNPSATVGELSEPMWPIEARNAAIANSYFVGSINRVGTEVFPNPFTSGDGKPQHADFGHFYGSSHFSAPDASCTPSLSRYRDGLIISDMDLNLCRQIKDKWAFRMTARYEMYASLLSEYLKPDFKPQVIVDPLINKKA

SEQ ID NO: 4967 - DNA, 2088 bp, Zea mays subsp. mays
  misc_feature (1)..(2088): Ceres Seq. ID no. 12409774
  misc_feature: MA Experiment ID: 108504 Result: Down-regulated in Transcription
  misc_feature: MA Experiment 108504 PARAMETER Experiment Name: Zm_Drought_P Parameter: Age (day) Value: 8
  misc_feature: MA Experiment 108504 PARAMETER Experiment Name: Zm_Drought_P Parameter: Organism Value: Zea mays
  misc_feature: MA Experiment 108504 PARAMETER Experiment Name: Zm_Drought_P Parameter: Plant Line Value: 35A19
  misc_feature: MA Experiment 108504 PARAMETER Experiment Name: Zm_Drought_P Parameter: Timepoint (hr) Value: 12
  misc_feature: MA Experiment 108504 PARAMETER Experiment Name: Zm_Drought_P Parameter: Tissue Value: Aerial
  misc_feature: MA Experiment 108504 PARAMETER Experiment Name: Zm_Drought_P Parameter: Treatment Value: Drought vs. No Drought
  misc_feature: MA Experiment ID: 108535 Result: Down-regulated in Transcription
  misc_feature: MA Experiment 108535 PARAMETER Experiment Name: Zm_Meristem_P Parameter: Age (day) Value: 8
  misc_feature: MA Experiment 108535 PARAMETER Experiment Name: Zm_Meristem_P Parameter: Organism Value: Zea mays
  misc_feature: MA Experiment 108535 PARAMETER Experiment Name: Zm_Meristem_P Parameter: Plant Line Value: 35A19
  misc_feature: MA Experiment 108535 PARAMETER Experiment Name: Zm_Meristem_P Parameter: Tissue Value: Root Meristem vs. Above Root Meristem
  misc_feature: MA Experiment ID: 108536 Result: Down-regulated in Transcription
  misc_feature: MA Experiment 108536 PARAMETER Experiment Name: Zm_Meristem_P Parameter: Age (day) Value: 8
  misc_feature: MA Experiment 108536 PARAMETER Experiment Name: Zm_Meristem_P Parameter: Organism Value: Zea mays
  misc_feature: MA Experiment 108536 PARAMETER Experiment Name: Zm_Meristem_P Parameter: Plant Line Value: 35A19
  misc_feature: MA Experiment 108536 PARAMETER Experiment Name: Zm_Meristem_P Parameter: Tissue Value: Shoot Meristem vs. Above Shoot Meristem
  misc_feature: MA Experiment ID: 20000478 Result: Down-regulated in Transcription
  misc_feature: MA Experiment 20000478 PARAMETER Experiment Name: Zm_5mM_SA_P Parameter: Age (day) Value: 11
  misc_feature: MA Experiment 20000478 PARAMETER Experiment Name: Zm_5mM_SA_P Parameter: Organism Value: Zea mays
  misc_feature: MA Experiment 20000478 PARAMETER Experiment Name: Zm_5mM_SA_P Parameter: Plant Line Value: 35A19
  misc_feature: MA Experiment 20000478 PARAMETER Experiment Name: Zm_5mM_SA_P Parameter: Timepoint (hr) Value: 72
  misc_feature: MA Experiment 20000478 PARAMETER Experiment Name: Zm_5mM_SA_P Parameter: Tissue Value: Aerial
  misc_feature: MA Experiment 20000478 PARAMETER Experiment Name: Zm_5mM_SA_P Parameter: Treatment Value: 5mM SA vs. No Treatment
  misc_feature: MA Experiment ID: 20000479 Result: Down-regulated in Transcription
  misc_feature: MA Experiment 20000479 PARAMETER Experiment Name: Zm_Drought_P Parameter: Age (day) Value: 10
  misc_feature: MA Experiment 20000479 PARAMETER Experiment Name: Zm_Drought_P Parameter: Organism Value: Zea mays
  misc_feature: MA Experiment 20000479 PARAMETER Experiment Name: Zm_Drought_P Parameter: Plant Line Value: 35A19
  misc_feature: MA Experiment 20000479 PARAMETER Experiment Name: Zm_Drought_P Parameter: Timepoint (hr) Value: 48
  misc_feature: MA Experiment 20000479 PARAMETER Experiment Name: Zm_Drought_P Parameter: Tissue Value: Aerial
  misc_feature: MA Experiment 20000479 PARAMETER Experiment Name: Zm_Drought_P Parameter: Treatment Value: Drought vs. No Drought
  misc_feature: MA Experiment ID: 20000480 Result: Down-regulated in Transcription
  misc_feature: MA Experiment 20000480 PARAMETER Experiment Name: Zm_Drought_P Parameter: Age (day) Value: 11
  misc_feature: MA Experiment 20000480 PARAMETER Experiment Name: Zm_Drought_P Parameter: Organism Value: Zea mays
  misc_feature: MA Experiment 20000480 PARAMETER Experiment Name: Zm_Drought_P Parameter: Plant Line Value: 35A19
  misc_feature: MA Experiment 20000480 PARAMETER Experiment Name: Zm_Drought_P Parameter: Timepoint (hr) Value: 72
  misc_feature: MA Experiment 20000480 PARAMETER Experiment Name: Zm_Drought_P Parameter: Tissue Value: Aerial
  misc_feature: MA Experiment 20000480 PARAMETER Experiment Name: Zm_Drought_P Parameter: Treatment Value: Drought vs. No Drought
gaccggccactcgtctgacgctacgctgcctactatctatctacctctaccctccctcatcacttgttccactacgaccggccacctagctcgccgcgcgcgcaagcctgcgccaccacccactctactagcttagtctcccctcgtgcagcgcgacgacagccagcaatggccgccgcccagtgaggcagggtcgcagtgacggcacgagacgcacacccacgggcgctggcggcatgccgggcgacgcctacgacctcctgtgcgccgaggacgacgccgccggcagcgccctgctgtgcaccaccgacgacgacgacgggtgctgctccgctgtcgaggaggactcggcggcggcggcggcctccatcgccgagctcatcggcggcgaggcccagtactcgcccaggccggactaccccgacaggctccgctccaggtccatcgacccggccgcccgcgccgagtcggtcgcatggattctcaaggtgcaagaatactatgggtttcttccattgacagcctacctcgccgtcaactacatggaccggttcctctctctccaccgtttgccgcaggaggacgggtgggcgatgcagctgctggccgtgacctgcctctccctcgctgccaagatggaggagaccctcgtgccctccctcctggacctgcaggttgagggcaccagcagatacgactgcttcgagcctgggacggtcggccggatggagctcctcgtcctgatggcgctcaactggcggctccgctcggttactcccttcaccttcgtcgacttcttcgcgtgcaaggtcgacccaggagggaggcacaccaggtgcctcattgcccgggccacgcaagtcattctggctgcgatgcatgacgtcgagttcttggaccactgcccgtcatcaatggcggcagcggccgtgctctgcgccatcggtgagacgccgtcactggagtcggtcagccctggggctgccgtcagctggtgcatcggccttgcagaggaagggatcagcagctgctacagactgatgcagcggctggtgataggcaacgtccggacaagggtcgccagcacgacgaccatggcagcagtgaacctgtgctgctcggatgaggcgctgtcctcgcattcctccgccacctcctcgccacccccggccaagaggaggaagaggtcgccgacggccacgtgaaaactgaagaacgcaagtagataggattatttatacgcttttggggggcagattaacagggtttgatcgatttctttgcagtttgtttgtcgttttttcttctttgtgattctttctcctttttcccccttttgccatttatttgttctgttcttttgggttggatctctactcctcggtggggggattctgcctgcctgctcgaccggcccagtcatcatggcggcctctggcctctgcaccgccagccagtatgtgaaggcgacgagactcgagagagagaaagaaagacagctactacgtataacagacacatctgtgtttctctgtgcaacactctgtggggcttcttcaaccccgacgcagagctgcagagagggaccattgattggtgagcgagggcagccatggcggcagatggagatggagagggaggggggaagaggcaatgagttgcggtggatggatgatgattggtagggttaaatgaggtggtcaaagggccgggcggtcagtgctcctgccaagatgcagccctgcctgcaaagtttctgttcatattcatgagggcaaaaattgtttgtttccgagtggtttgtttgtattttgttgatgccgctgaggcgagggcgtcagagagagagaaagaggggcatgctttgctttgctgtgatgggagtcacatggatatgccctactgtggtggtgctctggagggaaatatttgtccatctccagagctaacagtgtccaagcatggggcttttgggggcccttgctgattgtttgtatctcttttttcttgcttgtgtatcaatgaagattttgccatttgaattggcctgagaagagagtacaagctgaagagagagtttctgtgttc

SEQ ID NO: 4968 - protein, 322 aa, Zea mays subsp. mays
  peptide (1)..(322): Ceres Seq. ID no. 12409775
  misc_feature (44)..(177): Pfam Name: Cyclin, N-terminal domain Pfam Description: Cyclin, N-terminal domain
  misc_feature (7)..(316): Homolog of NCBI NO: 25989347 NR Description: cyclin D1 [Helianthus tuberosus]
  misc_feature (7)..(318): Homolog of NCBI NO: 15223075 NR Description: Cyclin D1;1; protein id: At1g70210.1 [Arabidopsis
  misc_feature (122)..(316): Homolog of NCBI NO: 34904924 NR Description: putative cyclin delta-1 [Oryza sativa (japonica group)] >gi|25553718|dbj|BAC24951.1| putative cyclin D1 [Oryza
  misc_feature (27)..(116): Homolog of NCBI NO: 34904924 NR Description: putative cyclin delta-1 [Oryza sativa (japonica group)] >gi|25553718|dbj|BAC24951.1| putative cyclin D1 [Oryza
  misc_feature (7)..(318): Homolog of NCBI NO: 3915635 NR Description: Cyclin delta-1 >gi|2995130|emb|CAA58285.1| cyclin
  misc_feature (7)..(318): Homolog of NCBI NO: 1076311 NR Description: cyclin delta-1 - Arabidopsis thaliana
  misc_feature (7)..(316): Homolog of NCBI NO: 6448480 NR Description: cyclin D1 [Antirrhinum majus]
  misc_feature (12)..(318): Homolog of NCBI NO: 18916916 NR Description: cyclin [Oryza sativa (japonica cultivar-group)]
  misc_feature (34)..(275): Homolog of NCBI NO: 25809160 NR Description: cyclin D protein [Physcomitrella patens]
  misc_feature (38)..(290): Homolog of NCBI NO: 1076312 NR Description: cyclin delta-2 - Arabidopsis thaliana
MPGDAYDLLCAEDDAAGSALLCTTDDDDGCCSAVEEDSAAAAASIAELIGGEAQYSPRPDYPDRLRSRSIDPAARAESVAWILKVQEYYGFLPLTAYLAVNYMDRFLSLHRLPQEDGWAMQLLAVTCLSLAAKMEETLVPSLLDLQVEGTSRYDCFEPGTVGRMELLVLMALNWRLRSVTPFTFVDFFACKVDPGGRHTRCLIARATQVILAAMHDVEFLDHCPSSMAAAAVLCAIGETPSLESVSPGAAVSWCIGLAEEGISSCYRLMQRLVIGNVRTRVASTTTMAAVNLCCSDEALSSHSSATSSPPPAKRRKRSPTAT

SEQ ID NO: 4969 - protein, 220 aa, Zea mays subsp. mays
  peptide (1)..(220): Ceres Seq. ID no. 12409776
  misc_feature (1)..(75): Pfam Name: Cyclin, N-terminal domain Pfam Description: Cyclin, N-terminal domain
  misc_feature (1)..(214): Homolog of NCBI NO: 25989347 NR Description: cyclin D1 [Helianthus tuberosus]
  misc_feature (1)..(216): Homolog of NCBI NO: 15223075 NR Description: Cyclin D1;1; protein id: At1g70210.1 [Arabidopsis
  misc_feature (20)..(214): Homolog of NCBI NO: 34904924 NR Description: putative cyclin delta-1 [Oryza sativa (japonica group)] >gi|25553718|dbj|BAC24951.1| putative cyclin D1 [Oryza
  misc_feature (1)..(14): Homolog of NCBI NO: 34904924 NR Description: putative cyclin delta-1 [Oryza sativa (japonica group)] >gi|25553718|dbj|BAC24951.1| putative cyclin D1 [Oryza
  misc_feature (1)..(216): Homolog of NCBI NO: 3915635 NR Description: Cyclin delta-1 >gi|2995130|emb|CAA58285.1| cyclin
  misc_feature (1)..(216): Homolog of NCBI NO: 1076311 NR Description: cyclin delta-1 - Arabidopsis thaliana
  misc_feature (1)..(214): Homolog of NCBI NO: 6448480 NR Description: cyclin D1 [Antirrhinum majus]
  misc_feature (1)..(216): Homolog of NCBI NO: 18916916 NR Description: cyclin [Oryza sativa (japonica cultivar-group)]
  misc_feature (1)..(173): Homolog of NCBI NO: 25809160 NR Description: cyclin D protein [Physcomitrella patens]
  misc_feature (1)..(188): Homolog of NCBI NO: 1076312 NR Description: cyclin delta-2 - Arabidopsis thaliana
MDRFLSLHRLPQEDGWAMQLLAVTCLSLAAKMEETLVPSLLDLQVEGTSRYDCFEPGTVGRMELLVLMALNWRLRSVTPFTFVDFFACKVDPGGRHTRCLIARATQVILAAMHDVEFLDHCPSSMAAAAVLCAIGETPSLESVSPGAAVSWCIGLAEEGISSCYRLMQRLVIGNVRTRVASTTTMAAVNLCCSDEALSSHSSATSSPPPAKRRKRSPTAT

SEQ ID NO: 4970 - protein, 203 aa, Zea mays subsp. mays
  peptide (1)..(203): Ceres Seq. ID no. 12409777
  misc_feature (1)..(58): Pfam Name: Cyclin, N-terminal domain Pfam Description: Cyclin, N-terminal domain
  misc_feature (1)..(197): Homolog of NCBI NO: 25989347 NR Description: cyclin D1 [Helianthus tuberosus]
  misc_feature (1)..(199): Homolog of NCBI NO: 15223075 NR Description: Cyclin D1;1; protein id: At1g70210.1 [Arabidopsis
  misc_feature (3)..(197): Homolog of NCBI NO: 34904924 NR Description: putative cyclin delta-1 [Oryza sativa (japonica group)] >gi|25553718|dbj|BAC24951.1| putative cyclin D1 [Oryza
  misc_feature (1)..(199): Homolog of NCBI NO: 3915635 NR Description: Cyclin delta-1 >gi|2995130|emb|CAA58285.1| cyclin
  misc_feature (1)..(199): Homolog of NCBI NO: 1076311 NR Description: cyclin delta-1 - Arabidopsis thaliana
  misc_feature (1)..(197): Homolog of NCBI NO: 6448480 NR Description: cyclin D1 [Antirrhinum majus]
  misc_feature (1)..(199): Homolog of NCBI NO: 18916916 NR Description: cyclin [Oryza sativa (japonica cultivar-group)]
  misc_feature (1)..(156): Homolog of NCBI NO: 25809160 NR Description: cyclin D protein [Physcomitrella patens]
  misc_feature (1)..(171): Homolog of NCBI NO: 1076312 NR Description: cyclin delta-2 - Arabidopsis thaliana
  misc_feature (1)..(171): Homolog of NCBI NO: 15227224 NR Description: Cyclin D2;1; protein id: At2g22490.1 [Arabidopsis
MQLLAVTCLSLAAKMEETLVPSLLDLQVEGTSRYDCFEPGTVGRMELLVLMALNWRLRSVTPFTFVDFFACKVDPGGRHTRCLIARATQVILAAMHDVEFLDHCPSSMAAAAVLCAIGETPSLESVSPGAAVSWCIGLAEEGISSCYRLMQRLVIGNVRTRVASTTTMAAVNLCCSDEALSSHSSATSSPPPAKRRKRSPTAT

SEQ ID NO: 4971 - DNA, 1624 bp, Zea mays subsp. mays
  misc_feature (1)..(1624): Ceres Seq. ID no. 12407768
  misc_feature: MA Experiment ID: 108528 Result: Down-regulated in Transcription
  misc_feature: MA Experiment 108528 PARAMETER Experiment Name: Zm_Imbibed_Seeds_P Parameter: Age (day) Value: 5 vs. 2
  misc_feature: MA Experiment 108528 PARAMETER Experiment Name: Zm_Imbibed_Seeds_P Parameter: Organism Value: Zea mays
  misc_feature: MA Experiment 108528 PARAMETER Experiment Name: Zm_Imbibed_Seeds_P Parameter: Plant Line Value: 35A19
  misc_feature: MA Experiment 108528 PARAMETER Experiment Name: Zm_Imbibed_Seeds_P Parameter: Tissue Value: Aerial vs. Embryo
  misc_feature: MA Experiment ID: 108530 Result: Down-regulated in Transcription
  misc_feature: MA Experiment 108530 PARAMETER Experiment Name: Zm_Imbibed_Seeds_P Parameter: Age (day) Value: 6 vs. 2
  misc_feature: MA Experiment 108530 PARAMETER Experiment Name: Zm_Imbibed_Seeds_P Parameter: Organism Value: Zea mays
  misc_feature: MA Experiment 108530 PARAMETER Experiment Name: Zm_Imbibed_Seeds_P Parameter: Plant Line Value: 35A19
  misc_feature: MA Experiment 108530 PARAMETER Experiment Name: Zm_Imbibed_Seeds_P Parameter: Tissue Value: Aerial vs. Embryo
  misc_feature: MA Experiment ID: 108533 Result: Up-regulated in Transcription
  misc_feature: MA Experiment 108533 PARAMETER Experiment Name: Zm_4deg_Cold_P Parameter: Age (hr) Value: 8
  misc_feature: MA Experiment 108533 PARAMETER Experiment Name: Zm_4deg_Cold_P Parameter: Organism Value: Zea mays
  misc_feature: MA Experiment 108533 PARAMETER Experiment Name: Zm_4deg_Cold_P Parameter: Plant Line Value: 35A19
  misc_feature: MA Experiment 108533 PARAMETER Experiment Name: Zm_4deg_Cold_P Parameter: Temperature (deg C) Value: 4 vs. 22
  misc_feature: MA Experiment 108533 PARAMETER Experiment Name: Zm_4deg_Cold_P Parameter: Timepoint (hr) Value: 1
  misc_feature: MA Experiment 108533 PARAMETER Experiment Name: Zm_4deg_Cold_P Parameter: Tissue Value: Aerial
  misc_feature: MA Experiment ID: 108534 Result: Up-regulated in Transcription
  misc_feature: MA Experiment 108534 PARAMETER Experiment Name: Zm_4deg_Cold_P Parameter: Age (hr) Value: 8
  misc_feature: MA Experiment 108534 PARAMETER Experiment Name: Zm_4deg_Cold_P Parameter: Organism Value: Zea mays
  misc_feature: MA Experiment 108534 PARAMETER Experiment Name: Zm_4deg_Cold_P Parameter: Plant Line Value: 35A19
  misc_feature: MA Experiment 108534 PARAMETER Experiment Name: Zm_4deg_Cold_P Parameter: Temperature (deg C) Value: 4 vs. 22
  misc_feature: MA Experiment 108534 PARAMETER Experiment Name: Zm_4deg_Cold_P Parameter: Timepoint (hr) Value: 6
  misc_feature: MA Experiment 108534 PARAMETER Experiment Name: Zm_4deg_Cold_P Parameter: Tissue Value: Aerial
  misc_feature: MA Experiment ID: 108543 Result: Up-regulated in Transcription
  misc_feature: MA Experiment ID: 108545 Result: Down-regulated in Transcription
  misc_feature: MA Experiment 108545 PARAMETER Experiment Name: Zm_Imbibed_Seeds_P Parameter: Age (day) Value: 3 vs. 2
  misc_feature: MA Experiment 108545 PARAMETER Experiment Name: Zm_Imbibed_Seeds_P Parameter: Organism Value: Zea mays
  misc_feature: MA Experiment 108545 PARAMETER Experiment Name: Zm_Imbibed_Seeds_P Parameter: Plant Line Value: 35A19
  misc_feature: MA Experiment 108545 PARAMETER Experiment Name: Zm_Imbibed_Seeds_P Parameter: Tissue Value: Aerial vs. Embryo
  misc_feature: MA Experiment ID: 20000492 Result: Down-regulated in Transcription
  misc_feature: MA Experiment 20000492 PARAMETER Experiment Name: Zm_Hybrid_Seed_Dev_P Parameter: DAP Value: 12
  misc_feature: MA Experiment 20000492 PARAMETER Experiment Name: Zm_Hybrid_Seed_Dev_P Parameter: Organism Value: Zea mays
  misc_feature: MA Experiment 20000492 PARAMETER Experiment Name: Zm_Hybrid_Seed_Dev_P Parameter: Plant Line Value: 35A19
  misc_feature: MA Experiment 20000492 PARAMETER Experiment Name: Zm_Hybrid_Seed_Dev_P Parameter: Tissue Value: Fert Kernel vs. Unfert Floret
  misc_feature: MA Experiment ID: 20000535 Result: Down-regulated in Transcription
  misc_feature: MA Experiment 20000535 PARAMETER Experiment Name: Zm_Hybrid_Seed_Dev_P Parameter: DAP Value: 30 vs. 12
  misc_feature: MA Experiment 20000535 PARAMETER Experiment Name: Zm_Hybrid_Seed_Dev_P Parameter: Organism Value: Zea mays
  misc_feature: MA Experiment 20000535 PARAMETER Experiment Name: Zm_Hybrid_Seed_Dev_P Parameter: Plant Line Value: 35A19
  misc_feature: MA Experiment 20000535 PARAMETER Experiment Name: Zm_Hybrid_Seed_Dev_P Parameter: Tissue Value: Embryo vs. Unfert Floret
  misc_feature: MA Experiment ID: 20000626 Result: Down-regulated in Transcription
  misc_feature: MA Experiment 20000626 PARAMETER Experiment Name: Zm_Herbicide-Treatments_P Parameter: Timepoint (hr) Value: 12
  misc_feature: MA Experiment 20000626 PARAMETER Experiment Name: Zm_Herbicide-Treatments_P Parameter: Tissue Value: Aerial
  misc_feature: MA Experiment 20000626 PARAMETER Experiment Name: Zm_Herbicide-Treatments_P Parameter: Treatment Value: Roundup vs. No Treatment
atataattgcagatgagcatgtggccgtcgccgagtccctgtcgatcggcgtcaactacgggcagatcgccaacaacctgccatcgccggcgcaggtatcgtggctgctccggtcgatgcgggtcagcaaggtgaagctgtacgacgccgaccccaacgtcctgcgcgcgttcctcggcacgggcgtcgagttcgtagtcggcatcggcaacgagtacgtgccggcgatggtgagccccgcggcggcgcaggcgtggctgcagcagcacgtggtgccgtacctccgctcgggcgcgcgcatcacctgcgtcaccgtgggcaacgaggtgttcaagggcaacgacaccgccctccaggcggcggtgcttcccgccatgcagtccgtgcacagggccctgggcgcgctcggcctccagggccgcatcaacgtcaccacggcgcactcgctggacgtcatgggcgtctccttcccgccctccgccggcgccttcgcccccgcggcgctggcgcacctgcagccgttcctgagctttctgtcggcgacgcggtcgccgttcctcatcaactgctacccctacttcgcgtacaaggacgacccggcgcgggtgccgccggactacgtgctcttccgtcccaacgccggtgtcgccgacgcccgcacggggctccgctacgacaacatgctgtacgcgcaggtgtggacgccgtgtacgcggccatccaggggctcgggtacacggacgtggaggtcaaggtgtcggagaccgggtggccgtcgcgaggcgacgccgacgaacccggcgccacgcccgagtacgcggggacctacatccggaacctgctgcagcggatcgagatgaagcagggcacgccgctgcgcccggcgacgcccgtcgacgtctacgtgttcgcgctcttcaacgagaacctcaagccagggccggcgtcggagaggaactacggcctcttctaccccgacggcacaccggtgtacaacgtcggcctgcacggatacctcccgccgatgctggtgtcgtcgactgcagcacgacagctgattcgttattttgcactagtcgccatcgcgtccgtcgcatattcgtctgtcttatcctgacagtgtagcctaccgacggagcactaaacagctaagcatctcatgctactcacgactcaaggaacttctgagtaatctgctggccatctcaacttgggtacctttactgcatttcggatagcgatcacaagctcttactgtacacatactgacaataaggtagaactgactgaagcatatgcagcatccattcatcacagcttacattttgacccaaaaaggaaaggtacaaacagtagggagagctgcatggacagcacctattttgttgttcactccttttcaaatgctatgaatcaagaacaagtcaacacaattattaaagattaagggtcttcgtcttccgaagtattatctccacaagaagataatattcatcagacgaagaccatttgagacgaacattcattatttaatatgtcaatgggaatgcaaaagggtagagatggaactggatcttcattaattcatttatattcatgtcccacaaaatataaatgaatattc

SEQ ID NO: 4972 - protein, 285 aa, Zea mays subsp. mays
  peptide (1)..(285): Ceres Seq. ID no. 12407769
  misc_feature (16)..(232): Pfam Name: Glycosyl hydrolases family 17 Pfam Description: Glycosyl hydrolases family 17
  misc_feature (1)..(232): Homolog of NCBI NO: 38346337 NR Description: OSJNBa0073L04.8 [Oryza sativa (japonica
  misc_feature (15)..(232): Homolog of NCBI NO: 18401444 NR Description: glycosyl hydrolase family 17; protein id: supported by cDNA: 1126., supported by cDNA: gi_17473571,
  misc_feature (15)..(232): Homolog of NCBI NO: 25316425 NR Description: probable beta-1,3-glucanase [imported] -
  misc_feature (9)..(232): Homolog of NCBI NO: 34908492 NR Description: putative beta-1,3-glucanase [Oryza sativa
  misc_feature (14)..(232): Homolog of NCBI NO: 25316443 NR Description: CDS protein F9L11.6 [imported] - Arabidopsis
  misc_feature (14)..(232): Homolog of NCBI NO: 30692765 NR Description: glycosyl hydrolase family 17 [Arabidopsis
  misc_feature (10)..(232): Homolog of NCBI NO: 6006371 NR Description: Similar to hypothetical protein - potato (S31196)
  misc_feature (15)..(232): Homolog of NCBI NO: 419789 NR Description: hypothetical protein - potato
  misc_feature (14)..(232): Homolog of NCBI NO: 22328768 NR Description: glycosyl hydrolase family 17; protein id:
  misc_feature (14)..(232): Homolog of NCBI NO: 7447983 NR Description: hypothetical protein T9A21.190 - Arabidopsis
IIADEHVAVAESLSIGVNYGQIANNLPSPAQVSWLLRSMRVSKVKLYDADPNVLRAFLGTGVEFVVGIGNEYVPAMVSPAAAQAWLQQHVVPYLRSGARITCVTVGNEVFKGNDTALQAAVLPAMQSVHRALGALGLQGRINVTTAHSLDVMGVSFPPSAGAFAPAALAHLQPFLSFLSATRSPFLINCYPYFAYKDDPARVPPDYVLFRPNAGVADARTGLRYDNMLYAQVWTPCTRPSRGSGTRTWRSRCRRPGGRREATPTNPAPRPSTRGPTSGTCCSGSR

SEQ ID NO: 4973 - protein, 247 aa, Zea mays subsp. mays
  peptide (1)..(247): Ceres Seq. ID no. 12407770
  misc_feature (1)..(194): Pfam Name: Glycosyl hydrolases family 17 Pfam Description: Glycosyl hydrolases family 17
  misc_feature (1)..(194): Homolog of NCBI NO: 38346337 NR Description: OSJNBa0073L04.8 [Oryza sativa (japonica
  misc_feature (1)..(194): Homolog of NCBI NO: 18401444 NR Description: glycosyl hydrolase family 17; protein id: supported by cDNA: 1126., supported by cDNA: gi_17473571,
  misc_feature (1)..(194): Homolog of NCBI NO: 25316425 NR Description: probable beta-1,3-glucanase [imported] -
  misc_feature (1)..(194): Homolog of NCBI NO: 34908492 NR Description: putative beta-1,3-glucanase [Oryza sativa
  misc_feature (1)..(194): Homolog of NCBI NO: 25316443 NR Description: CDS protein F9L11.6 [imported] - Arabidopsis
  misc_feature (1)..(194): Homolog of NCBI NO: 30692765 NR Description: glycosyl hydrolase family 17 [Arabidopsis
  misc_feature (1)..(194): Homolog of NCBI NO: 6006371 NR Description: Similar to hypothetical protein - potato (S31196)
  misc_feature (1)..(194): Homolog of NCBI NO: 419789 NR Description: hypothetical protein - potato
  misc_feature (1)..(194): Homolog of NCBI NO: 22328768 NR Description: glycosyl hydrolase family 17; protein id:
  misc_feature (1)..(194): Homolog of NCBI NO: 7447983 NR Description: hypothetical protein T9A21.190 - Arabidopsis
MRVSKVKLYDADPNVLRAFLGTGVEFVVGIGNEYVPAMVSPAAAQAWLQQHVVPYLRSGARITCVTVGNEVFKGNDTALQAAVLPAMQSVHRALGALGLQGRINVTTAHSLDVMGVSFPPSAGAFAPAALAHLQPFLSFLSATRSPFLINCYPYFAYKDDPARVPPDYVLFRPNAGVADARTGLRYDNMLYAQVWTPCTRPSRGSGTRTWRSRCRRPGGRREATPTNPAPRPSTRGPTSGTCCSGSR

SEQ ID NO: 4974 - protein, 210 aa, Zea mays subsp. mays
  peptide (1)..(210): Ceres Seq. ID no. 12407771
  misc_feature (1)..(157): Pfam Name: Glycosyl hydrolases family 17 Pfam Description: Glycosyl hydrolases family 17
  misc_feature (1)..(157): Homolog of NCBI NO: 38346337 NR Description: OSJNBa0073L04.8 [Oryza sativa (japonica
  misc_feature (1)..(157): Homolog of NCBI NO: 18401444 NR Description: glycosyl hydrolase family 17; protein id: supported by cDNA: 1126., supported by cDNA: gi_17473571,
  misc_feature (1)..(157): Homolog of NCBI NO: 25316425 NR Description: probable beta-1,3-glucanase [imported] -
  misc_feature (1)..(157): Homolog of NCBI NO: 34908492 NR Description: putative beta-1,3-glucanase [Oryza sativa
  misc_feature (1)..(157): Homolog of NCBI NO: 25316443 NR Description: CDS protein F9L11.6 [imported] - Arabidopsis
  misc_feature (1)..(157): Homolog of NCBI NO: 30692765 NR Description: glycosyl hydrolase family 17 [Arabidopsis
  misc_feature (1)..(157): Homolog of NCBI NO: 6006371 NR Description: Similar to hypothetical protein - potato (S31196)
  misc_feature (1)..(157): Homolog of NCBI NO: 419789 NR Description: hypothetical protein - potato
  misc_feature (1)..(157): Homolog of NCBI NO: 22328768 NR Description: glycosyl hydrolase family 17; protein id:
  misc_feature (1)..(157): Homolog of NCBI NO: 7447983 NR Description: hypothetical protein T9A21.190 - Arabidopsis
MVSPAAAQAWLQQHVVPYLRSGARITCVTVGNEVFKGNDTALQAAVLPAMQSVHRALGALGLQGRINVTTAHSLDVMGVSFPPSAGAFAPAALAHLQPFLSFLSATRSPFLINCYPYFAYKDDPARVPPDYVLFRPNAGVADARTGLRYDNMLYAQVWTPCTRPSRGSGTRTWRSRCRRPGGRREATPTNPAPRPSTRGPTSGTCCSGSR

SEQ ID NO: 4975 - DNA, 1701 bp, Zea mays subsp. mays
  misc_feature (1)..(1701): Ceres Seq. ID no. 12344072
  misc_feature: MA Experiment ID: 108526 Result: Up-regulated in Transcription
  misc_feature: MA Experiment 108526 PARAMETER Experiment Name: Zm_5mM_NO_P Parameter: Age (day) Value: 8
  misc_feature: MA Experiment 108526 PARAMETER Experiment Name: Zm_5mM_NO_P Parameter: Organism Value: Zea mays
  misc_feature: MA Experiment 108526 PARAMETER Experiment Name: Zm_5mM_NO_P Parameter: Plant Line Value: 35A19
  misc_feature: MA Experiment 108526 PARAMETER Experiment Name: Zm_5mM_NO_P Parameter: Timepoint (hr) Value: 1
  misc_feature: MA Experiment 108526 PARAMETER Experiment Name: Zm_5mM_NO_P Parameter: Tissue Value: Aerial
  misc_feature: MA Experiment 108526 PARAMETER Experiment Name: Zm_5mM_NO_P Parameter: Treatment Value: 5mM NO vs. No Treatment
  misc_feature: MA Experiment ID: 108527 Result: Up-regulated in Transcription
  misc_feature: MA Experiment 108527 PARAMETER Experiment Name: Zm_5mM_NO_P Parameter: Age (day) Value: 8
  misc_feature: MA Experiment 108527 PARAMETER Experiment Name: Zm_5mM_NO_P Parameter: Organism Value: Zea mays
  misc_feature: MA Experiment 108527 PARAMETER Experiment Name: Zm_5mM_NO_P Parameter: Plant Line Value: 35A19
  misc_feature: MA Experiment 108527 PARAMETER Experiment Name: Zm_5mM_NO_P Parameter: Timepoint (hr) Value: 6
  misc_feature: MA Experiment 108527 PARAMETER Experiment Name: Zm_5mM_NO_P Parameter: Tissue Value: Aerial
  misc_feature: MA Experiment 108527 PARAMETER Experiment Name: Zm_5mM_NO_P Parameter: Treatment Value: 5mM NO vs. No Treatment
  misc_feature: MA Experiment ID: 108529 Result: Up-regulated in Transcription
  misc_feature: MA Experiment 108529 PARAMETER Experiment Name: Zm_Imbibed_Seeds_P Parameter: Age (day) Value: 5 vs. 2
  misc_feature: MA Experiment 108529 PARAMETER Experiment Name: Zm_Imbibed_Seeds_P Parameter: Organism Value: Zea mays
  misc_feature: MA Experiment 108529 PARAMETER Experiment Name: Zm_Imbibed_Seeds_P Parameter: Plant Line Value: 35A19
  misc_feature: MA Experiment 108529 PARAMETER Experiment Name: Zm_Imbibed_Seeds_P Parameter: Tissue Value: Roots vs. Embryo
  misc_feature: MA Experiment ID: 108534 Result: Up-regulated in Transcription
  misc_feature: MA Experiment 108534 PARAMETER Experiment Name: Zm_4deg_Cold_P Parameter: Age (hr) Value: 8
  misc_feature: MA Experiment 108534 PARAMETER Experiment Name: Zm_4deg_Cold_P Parameter: Organism Value: Zea mays
  misc_feature: MA Experiment 108534 PARAMETER Experiment Name: Zm_4deg_Cold_P Parameter: Plant Line Value: 35A19
  misc_feature: MA Experiment 108534 PARAMETER Experiment Name: Zm_4deg_Cold_P Parameter: Temperature (deg C) Value: 4 vs. 22
  misc_feature: MA Experiment 108534 PARAMETER Experiment Name: Zm_4deg_Cold_P Parameter: Timepoint (hr) Value: 6
  misc_feature: MA Experiment 108534 PARAMETER Experiment Name: Zm_4deg_Cold_P Parameter: Tissue Value: Aerial
  misc_feature: MA Experiment ID: 108535 Result: Down-regulated in Transcription
  misc_feature: MA Experiment 108535 PARAMETER Experiment Name: Zm_Meristem_P Parameter: Age (day) Value: 8
  misc_feature: MA Experiment 108535 PARAMETER Experiment Name: Zm_Meristem_P Parameter: Organism Value: Zea mays
  misc_feature: MA Experiment 108535 PARAMETER Experiment Name: Zm_Meristem_P Parameter: Plant Line Value: 35A19
  misc_feature: MA Experiment 108535 PARAMETER Experiment Name: Zm_Meristem_P Parameter: Tissue Value: Root Meristem vs. Above Root Meristem
  misc_feature: MA Experiment ID: 20000477 Result: Up-regulated in Transcription
  misc_feature: MA Experiment 20000477 PARAMETER Experiment Name: Zm_5mM_SA_P Parameter: Age (day) Value: 10
  misc_feature: MA Experiment 20000477 PARAMETER Experiment Name: Zm_5mM_SA_P Parameter: Organism Value: Zea mays
  misc_feature: MA Experiment 20000477 PARAMETER Experiment Name: Zm_5mM_SA_P Parameter: Plant Line Value: 35A19
  misc_feature: MA Experiment 20000477 PARAMETER Experiment Name: Zm_5mM_SA_P Parameter: Timepoint (hr) Value: 48
  misc_feature: MA Experiment 20000477 PARAMETER Experiment Name: Zm_5mM_SA_P Parameter: Tissue Value: Aerial
  misc_feature: MA Experiment 20000477 PARAMETER Experiment Name: Zm_5mM_SA_P Parameter: Treatment Value: 5mM SA vs. No Treatment
  misc_feature: MA Experiment ID: 20000479 Result: Up-regulated in Transcription
  misc_feature: MA Experiment 20000479 PARAMETER Experiment Name: Zm_Drought_P Parameter: Age (day) Value: 10
  misc_feature: MA Experiment 20000479 PARAMETER Experiment Name: Zm_Drought_P Parameter: Organism Value: Zea mays
  misc_feature: MA Experiment 20000479 PARAMETER Experiment Name: Zm_Drought_P Parameter: Plant Line Value: 35A19
  misc_feature: MA Experiment 20000479 PARAMETER Experiment Name: Zm_Drought_P Parameter: Timepoint (hr) Value: 48
  misc_feature: MA Experiment 20000479 PARAMETER Experiment Name: Zm_Drought_P Parameter: Tissue Value: Aerial
  misc_feature: MA Experiment 20000479 PARAMETER Experiment Name: Zm_Drought_P Parameter: Treatment Value: Drought vs. No Drought
  misc_feature: MA Experiment ID: 20000532 Result: Up-regulated in Transcription
  misc_feature: MA Experiment 20000532 PARAMETER Experiment Name: Zm_0.001percent_MeJA_P Parameter: Age (day) Value: 10
  misc_feature: MA Experiment 20000532 PARAMETER Experiment Name: Zm_0.001percent_MeJA_P Parameter: Organism Value: Zea mays
  misc_feature: MA Experiment 20000532 PARAMETER Experiment Name: Zm_0.001percent_MeJA_P Parameter: Plant Line Value: 35A19
  misc_feature: MA Experiment 20000532 PARAMETER Experiment Name: Zm_0.001percent_MeJA_P Parameter: Timepoint (hr) Value: 48
  misc_feature: MA Experiment 20000532 PARAMETER Experiment Name: Zm_0.001percent_MeJA_P Parameter: Tissue Value: Aerial
  misc_feature: MA Experiment 20000532 PARAMETER Experiment Name: Zm_0.001percent_MeJA_P Parameter: Treatment Value: 0.001percent MeJA vs. No Treatment
  misc_feature: MA Experiment ID: 20000629 Result: Down-regulated in Transcription
  misc_feature: MA Experiment 20000629 PARAMETER Experiment Name: Zm_Herbicide-Treatments_P Parameter: Timepoint (hr) Value: 12
  misc_feature: MA Experiment 20000629 PARAMETER Experiment Name: Zm_Herbicide-Treatments_P Parameter: Tissue Value: Aerial
  misc_feature: MA Experiment 20000629 PARAMETER Experiment Name: Zm_Herbicide-Treatments_P Parameter: Treatment Value: Trimec vs. No Treatment
ctacaaaaagaggagacgcgcgcacgcaaacccggaggccgggaggcggagggcagaggcagcaccgtcccgtccacctgaccacctccaccattttttcctcttcctcctcgcctccaccccttcccttccatctcttctcacctggccactcctctccctctctcccgcgccgatcgattggcccacccatcgatcgagcacgggaagaagattccagtccggagaggtctcaattcgatcgggctcgttctggtgtgggtgggcaccatggcggccacagaggcctcggcagacaagaacgccgtcttccgcaagcttcgcaccaaatcagacaacaagatgtgcttcgattgtaacgccaagaacccgacgtgggcgtccgtcacctacggtgtcttcctctgcatcgactgctcggcggtgcaccgcagcctcggcgtccacgtctccttcgtcaggtcaacaaatttggattcatggactccagaacagctgaaaatgatggtctatggaggaaacaaccgtgcacaagctttctttaagcagcatggttggacagatggtggaaaaattgaagcaaagtatacttcaagagcagctgacttgtaccggcagttgcttgctaaagaggtcgctaaaagcgccactgaagatggcaacaatagttggccatcttcaccagttgcagcttcccaggcttcggatcaaactgctgcgtttccagatcttaagctgacagaggtatcaaaagaaaatgtaagtgaaaaggaagactctgagattgttcgttcgcctagagttccaacccgttctatcaagaagccgattggtgctaaaaagcctggaaataagaccggcggacttggtgcacggaagcttacatcaaagccaaatgaaagcctgtatgagcagaagcccgaagaaacagctcctgtcctgccatcatcggtgattgcaagtactacagctaggagcaaaccccatacttcccgatttgagtatgtagaaaatgcacctgctcctaagactgggagcagctcagaaggcaatctcatgagtggacatgttgcacccccaaagtcatcgaacttctttgttgaatttgggatggacagtggatatcacaaaaaatctacatccagttcatccaaagtgcagattgaggaaagcagtgaagcaagacagaaattctcgaatgcaaaatcaatttcatcctctcagttttttggtgatcaggccagtttcgaaaaggacactcaagtctctctccaaaagttttctggttcctctgccatatcaagtgctgatctatttggccatccagcaaacaattctagcgtggatctcagtgcttcagatttgatcaacagaatatcattccaggccactcaagatctgtcttctctcaagaacatggcaggggaaactgggaaaaggttgacatcgatggcatccaacatcatcactgatcttcaggaccgcatcctctaagcttaagttacagcaaagtaaacttttacgttgcttcagtggctggtcccgtcaaccgggtgacagactggcctgccccgcagatctgtctaggagttcgagttcgtaggcgtctgaaaacttcctggcatatctgtctaggagttcggaagcatctgaaaaaagtgtaagctatttccttaatatgaaagcaggaaggattgccgc

SEQ ID NO: 4976 - protein, 407 aa, Zea mays subsp. mays
  peptide (1)..(407): Ceres Seq. ID no. 12344073
  misc_feature (11)..(127): Pfam Name: Putative GTPase activating protein for Arf Pfam Description: Putative GTPase activating protein for Arf
  misc_feature (1)..(407): Homolog of NCBI NO: 37537094 NR Description: unknown protein [Oryza sativa (japonica
  misc_feature (3)..(407): Homolog of NCBI NO: 29126345 NR Description: putative zinc finger protein [Oryza sativa
  misc_feature (1)..(407): Homolog of NCBI NO: 13430530 NR Description: unknown protein [Arabidopsis thaliana]
  misc_feature (1)..(407): Homolog of NCBI NO: 7487780 NR Description: hypothetical protein T6K21.70 - Arabidopsis >gi|2894598|emb|CAA17132.1| putative protein [Arabidopsis >gi|7268541|emb|CAB78791.1| putative protein [Arabidopsis
  misc_feature (1)..(407): Homolog of NCBI NO: 18414983 NR Description: Expressed protein; protein id: At4g17890.1 thaliana] >gi|24030421|gb|AAN41368.1| unknown protein
  misc_feature (3)..(407): Homolog of NCBI NO: 15237500 NR Description: zinc finger protein Glo3-like; protein id:
  misc_feature (3)..(398): Homolog of NCBI NO: 18403775 NR Description: expressed protein; protein id: At2g35210.1, by cDNA: 159093. [Arabidopsis thaliana] >gi|25408361|pir||H84765
  misc_feature (11)..(192): Homolog of NCBI NO: 37362182 NR Description: ADP-ribosylation factor GTPase activating protein
  misc_feature (291)..(405): Homolog of NCBI NO: 37362182 NR Description: ADP-ribosylation factor GTPase activating protein
  misc_feature (1)..(229): Homolog of NCBI NO: 12844436 NR Description: unnamed protein product [Mus musculus]
MAATEASADKNAVFRKLRTKSDNKMCFDCNAKNPTWASVTYGVFLCIDCSAVHRSLGVHVSFVRSTNLDSWTPEQLKMMVYGGNNRAQAFFKQHGWTDGGKIEAKYTSRAADLYRQLLAKEVAKSATEDGNNSWPSSPVAASQASDQTAAFPDLKLTEVSKENVSEKEDSEIVRSPRVPTRSIKKPIGAKKPGNKTGGLGARKLTSKPNESLYEQKPEETAPVLPSSVIASTTARSKPHTSRFEYVENAPAPKTGSSSEGNLMSGHVAPPKSSNFFVEFGMDSGYHKKSTSSSSKVQIEESSEARQKFSNAKSISSSQFFGDQASFEKDTQVSLQKFSGSSAISSADLFGHPANNSSVDLSASDLINRISFQATQDLSSLKNMAGETGKRLTSMASNIITDLQDRIL

SEQ ID NO: 4977 - protein, 383 aa, Zea mays subsp. mays
  peptide (1)..(383): Ceres Seq. ID no. 12344074
  misc_feature (1)..(103): Pfam Name: Putative GTPase activating protein for Arf Pfam Description: Putative GTPase activating protein for Arf
  misc_feature (1)..(383): Homolog of NCBI NO: 37537094 NR Description: unknown protein [Oryza sativa (japonica
  misc_feature (1)..(383): Homolog of NCBI NO: 29126345 NR Description: putative zinc finger protein [Oryza sativa
  misc_feature (1)..(383): Homolog of NCBI NO: 13430530 NR Description: unknown protein [Arabidopsis thaliana]
  misc_feature (1)..(383): Homolog of NCBI NO: 7487780 NR Description: hypothetical protein T6K21.70 - Arabidopsis >gi|2894598|emb|CAA17132.1| putative protein [Arabidopsis >gi|7268541|emb|CAB78791.1| putative protein [Arabidopsis
  misc_feature (1)..(383): Homolog of NCBI NO: 18414983 NR Description: Expressed protein; protein id: At4g17890.1 thaliana] >gi|24030421|gb|AAN41368.1| unknown protein
  misc_feature (1)..(383): Homolog of NCBI NO: 15237500 NR Description: zinc finger protein Glo3-like; protein id:
  misc_feature (1)..(374): Homolog of NCBI NO: 18403775 NR Description: expressed protein; protein id: At2g35210.1, by cDNA: 159093. [Arabidopsis thaliana] >gi|25408361|pir||H84765
  misc_feature (1)..(168): Homolog of NCBI NO: 37362182 NR Description: ADP-ribosylation factor GTPase activating protein
  misc_feature (267)..(381): Homolog of NCBI NO: 37362182 NR Description: ADP-ribosylation factor GTPase activating protein
  misc_feature (1)..(205): Homolog of NCBI NO: 12844436 NR Description: unnamed protein product [Mus musculus]
MCFDCNAKNPTWASVTYGVFLCIDCSAVHRSLGVHVSFVRSTNLDSWTPEQLKMMVYGGNNRAQAFFKQHGWTDGGKIEAKYTSRAADLYRQLLAKEVAKSATEDGNNSWPSSPVAASQASDQTAAFPDLKLTEVSKENVSEKEDSEIVRSPRVPTRSIKKPIGAKKPGNKTGGLGARKLTSKPNESLYEQKPEETAPVLPSSVIASTTARSKPHTSRFEYVENAPAPKTGSSSEGNLMSGHVAPPKSSNFFVEFGMDSGYHKKSTSSSSKVQIEESSEARQKFSNAKSISSSQFFGDQASFEKDTQVSLQKFSGSSAISSADLFGHPANNSSVDLSASDLINRISFQATQDLSSLKNMAGETGKRLTSMASNIITDLQDRIL

SEQ ID NO: 4978 - protein, 330 aa, Zea mays subsp. mays
  peptide (1)..(330): Ceres Seq. ID no. 12344075
  misc_feature (1)..(330): Homolog of NCBI NO: 37537094 NR Description: unknown protein [Oryza sativa (japonica
  misc_feature (1)..(330): Homolog of NCBI NO: 29126345 NR Description: putative zinc finger protein [Oryza sativa
  misc_feature (1)..(330): Homolog of NCBI NO: 13430530 NR Description: unknown protein [Arabidopsis thaliana]
  misc_feature (1)..(330): Homolog of NCBI NO: 7487780 NR Description: hypothetical protein T6K21.70 - Arabidopsis >gi|2894598|emb|CAA17132.1| putative protein [Arabidopsis >gi|7268541|emb|CAB78791.1| putative protein [Arabidopsis
  misc_feature (1)..(330): Homolog of NCBI NO: 18414983 NR Description: Expressed protein; protein id: At4g17890.1 thaliana] >gi|24030421|gb|AAN41368.1| unknown protein
  misc_feature (1)..(330): Homolog of NCBI NO: 15237500 NR Description: zinc finger protein Glo3-like; protein id:
  misc_feature (1)..(321): Homolog of NCBI NO: 18403775 NR Description: expressed protein; protein id: At2g35210.1, by cDNA: 159093. [Arabidopsis thaliana] >gi|25408361|pir||H84765
  misc_feature (1)..(115): Homolog of NCBI NO: 37362182 NR Description: ADP-ribosylation factor GTPase activating protein
  misc_feature (214)..(328): Homolog of NCBI NO: 37362182 NR Description: ADP-ribosylation factor GTPase activating protein
  misc_feature (1)..(152): Homolog of NCBI NO: 12844436 NR Description: unnamed protein product [Mus musculus]
MMVYGGNNRAQAFFKQHGWTDGGKIEAKYTSRAADLYRQLLAKEVAKSATEDGNNSWPSSPVAASQASDQTAAFPDLKLTEVSKENVSEKEDSEIVRSPRVPTRSIKKPIGAKKPGNKTGGLGARKLTSKPNESLYEQKPEETAPVLPSSVIASTTARSKPHTSRFEYVENAPAPKTGSSSEGNLMSGHVAPPKSSNFFVEFGMDSGYHKKSTSSSSKVQIEESSEARQKFSNAKSISSSQFFGDQASFEKDTQVSLQKFSGSSAISSADLFGHPANNSSVDLSASDLINRISFQATQDLSSLKNMAGETGKRLTSMASNIITDLQDRIL

SEQ ID NO: 4979 - DNA, 1273 bp, Zea mays subsp. mays
  misc_feature (1)..(1273): Ceres Seq. ID no. 12374425
  misc_feature: MA Experiment ID: 108535 Result: Down-regulated in Transcription
  misc_feature: MA Experiment 108535 PARAMETER Experiment Name: Zm_Meristem_P Parameter: Age (day) Value: 8
  misc_feature: MA Experiment 108535 PARAMETER Experiment Name: Zm_Meristem_P Parameter: Organism Value: Zea mays
  misc_feature: MA Experiment 108535 PARAMETER Experiment Name: Zm_Meristem_P Parameter: Plant Line Value: 35A19
  misc_feature: MA Experiment 108535 PARAMETER Experiment Name: Zm_Meristem_P Parameter: Tissue Value: Root Meristem vs. Above Root Meristem
  misc_feature: MA Experiment ID: 108543 Result: Up-regulated in Transcription
acgccacgctcccgtcctctccgctggcctcgtgccccctcgtcccaactcccaactgccgatggggaaggagcaatccggtgtgcgcgcgcgggcgcggaagtgaaccccggttgagtagtaggtgggagatcgaggtcgcgcccttgccccacacgccactaaaggccgcgccgacgggctcatcagacgctttggagtttggacgggctcgcctcggccgctctggcgcttgtgcggtgggtgaagcgcgggtgctggtgcgggaagcctcgccagacctagcgctgccgactgccgagctgggtgcgggcgcgaggagtcgacgggaagacaagggtgaggaattatgagtgaaacagggcacactgtacaagtcactaacctctcgagcagagtatctgaaagtgatcttcatgagttcttttcgttctctggtcctattgagcatatagaacttatcagatcagaaggatacggtgccactgcttatgtgacattcaaggaacgctttgccttggaaactgcagtattgctcagtggggctactattgtggatcagccagtatgcataacctattggggacaacctgagggaacttttaatttctgggacaggccaacttgggaggttgaagaggaaatcgaatacaggaactaccaaacatgccagtacaacactactccgcaggaagcttttacagtggctcaagatatcatgaagacgatgctagaaaaggggtacgtgctcagcaaggatgctttggctaaggctagagcctttgatgagtcctatggattaacagctgcagcagcagccagggctgcagagctgagcaagagaattggtttaactgatagggtcaatgctggtgttggtgcaatgcgatcagtcgatgagacatatcgcgtaagagagacaaccaagacggttgctactgccactggaagaacggcagcaaaggtggtaaatggcatcgtcaccagcagctacttctctgcaggagccatgatcttgtctgatgctcttactagggctgccaaggccgcggcagatctggccgctcatggtaggcagaattaagtgaaaaatagacataaagttcatccttgcagttactaaacatgaggacgaacaccttcaagtgatgttgcttgatgtatatttatgacacaacagtgtcgtaaattaaaaggagacgatcactgcgtttggaacaaattgtttgctctgataagtttgattattgcaaatgtagtcaagtgatcgtgc

SEQ ID NO: 4980 - protein, 244 aa, Zea mays subsp. mays
  peptide (1)..(244): Ceres Seq. ID no. 12374426
  misc_feature (8)..(76): Pfam Name: RNA recognition motif. (a.k.a. RRM, RBD, or RNP domain) Pfam Description: RNA recognition motif. (a.k.a. RRM, RBD, or RNP
  misc_feature (1)..(244): Homolog of NCBI NO: 38344906 NR Description: OSJNBb0079B02.9 [Oryza sativa (japonica
  misc_feature (5)..(243): Homolog of NCBI NO: 18394102 NR Description: RRM-containing protein; protein id: At1g14340.1, by cDNA: 9495., supported by cDNA: gi_15292970, supported by gi_20259676 [Arabidopsis thaliana] >gi|15292971|gb|AAK93596.1|
  misc_feature (5)..(243): Homolog of NCBI NO: 21618045 NR Description: unknown [Arabidopsis thaliana]
  misc_feature (5)..(239): Homolog of NCBI NO: 25518024 NR Description: F14L17.11 protein - Arabidopsis thaliana Contains similarity to Vip1 protein from Schizosaccharomyces gb|Y13635.1 and contains a RNA recognition motif PF|00076. EST
  misc_feature (1)..(241): Homolog of NCBI NO: 6714467 NR Description: unknown protein [Arabidopsis thaliana]
  misc_feature (7)..(243): Homolog of NCBI NO: 8809670 NR Description: gene_id:MSD23.5~pir||C71447~similar to unknown
  misc_feature (7)..(243): Homolog of NCBI NO: 30695063 NR Description: RNA recognition motif (RRM)-containing protein
  misc_feature (7)..(243): Homolog of NCBI NO: 18414951 NR Description: RRM-containing protein; protein id: At4g17720.1, by cDNA: 39922. [Arabidopsis thaliana]
  misc_feature (7)..(239): Homolog of NCBI NO: 18071362 NR Description: putative splicing regulatory protein [Oryza
  misc_feature (3)..(232): Homolog of NCBI NO: 18421342 NR Description: RRM-containing protein; protein id: At5g32450.1, by cDNA: 5850. [Arabidopsis thaliana] >gi|21593919|gb|AAM65884.1|
MSETGHTVQVTNLSSRVSESDLHEFFSFSGPIEHIELIRSEGYGATAYVTFKERFALETAVLLSGATIVDQPVCITYWGQPEGTFNFWDRPTWEVEEEIEYRNYQTCQYNTTPQEAFTVAQDIMKTMLEKGYVLSKDALAKARAFDESYGLTAAAAARAAELSKRIGLTDRVNAGVGAMRSVDETYRVRETTKTVATATGRTAAKVVNGIVTSSYFSAGAMILSDALTRAAKAAADLAAHGRQN

SEQ ID NO: 4981 - DNA, 1855 bp, Zea mays subsp. mays
  misc_feature (1)..(1855): Ceres Seq. ID no. 12566608
  misc_feature: MA Experiment ID: 108522 Result: Down-regulated in Transcription
  misc_feature: MA Experiment 108522 PARAMETER Experiment Name: Zm_42deg_Heat_P Parameter: Age (day) Value: 8
  misc_feature: MA Experiment 108522 PARAMETER Experiment Name: Zm_42deg_Heat_P Parameter: Organism Value: Zea mays
  misc_feature: MA Experiment 108522 PARAMETER Experiment Name: Zm_42deg_Heat_P Parameter: Plant Line Value: 35A19
  misc_feature: MA Experiment 108522 PARAMETER Experiment Name: Zm_42deg_Heat_P Parameter: Temperature (deg C) Value: 42 vs. 22
  misc_feature: MA Experiment 108522 PARAMETER Experiment Name: Zm_42deg_Heat_P Parameter: Timepoint (hr) Value: 1
  misc_feature: MA Experiment 108522 PARAMETER Experiment Name: Zm_42deg_Heat_P Parameter: Tissue Value: Aerial
  misc_feature: MA Experiment ID: 108527 Result: Down-regulated in Transcription
  misc_feature: MA Experiment 108527 PARAMETER Experiment Name: Zm_5mM_NO_P Parameter: Age (day) Value: 8
  misc_feature: MA Experiment 108527 PARAMETER Experiment Name: Zm_5mM_NO_P Parameter: Organism Value: Zea mays
  misc_feature: MA Experiment 108527 PARAMETER Experiment Name: Zm_5mM_NO_P Parameter: Plant Line Value: 35A19
  misc_feature: MA Experiment 108527 PARAMETER Experiment Name: Zm_5mM_NO_P Parameter: Timepoint (hr) Value: 6
  misc_feature: MA Experiment 108527 PARAMETER Experiment Name: Zm_5mM_NO_P Parameter: Tissue Value: Aerial
  misc_feature: MA Experiment 108527 PARAMETER Experiment Name: Zm_5mM_NO_P Parameter: Treatment Value: 5mM NO vs. No Treatment
  misc_feature: MA Experiment ID: 108528 Result: Up-regulated in Transcription
  misc_feature: MA Experiment 108528 PARAMETER Experiment Name: Zm_Imbibed_Seeds_P Parameter: Age (day) Value: 5 vs. 2
  misc_feature: MA Experiment 108528 PARAMETER Experiment Name: Zm_Imbibed_Seeds_P Parameter: Organism Value: Zea mays
  misc_feature: MA Experiment 108528 PARAMETER Experiment Name: Zm_Imbibed_Seeds_P Parameter: Plant Line Value: 35A19
  misc_feature: MA Experiment 108528 PARAMETER Experiment Name: Zm_Imbibed_Seeds_P Parameter: Tissue Value: Aerial vs. Embryo
  misc_feature: MA Experiment ID: 108530 Result: Up-regulated in Transcription
  misc_feature: MA Experiment 108530 PARAMETER Experiment Name: Zm_Imbibed_Seeds_P Parameter: Age (day) Value: 6 vs. 2
  misc_feature: MA Experiment 108530 PARAMETER Experiment Name: Zm_Imbibed_Seeds_P Parameter: Organism Value: Zea mays
  misc_feature: MA Experiment 108530 PARAMETER Experiment Name: Zm_Imbibed_Seeds_P Parameter: Plant Line Value: 35A19
  misc_feature: MA Experiment 108530 PARAMETER Experiment Name: Zm_Imbibed_Seeds_P Parameter: Tissue Value: Aerial vs. Embryo
  misc_feature: MA Experiment ID: 108533 Result: Down-regulated in Transcription
  misc_feature: MA Experiment 108533 PARAMETER Experiment Name: Zm_4deg_Cold_P Parameter: Age (hr) Value: 8
  misc_feature: MA Experiment 108533 PARAMETER Experiment Name: Zm_4deg_Cold_P Parameter: Organism Value: Zea mays
  misc_feature: MA Experiment 108533 PARAMETER Experiment Name: Zm_4deg_Cold_P Parameter: Plant Line Value: 35A19
  misc_feature: MA Experiment 108533 PARAMETER Experiment Name: Zm_4deg_Cold_P Parameter: Temperature (deg C) Value: 4 vs. 22
  misc_feature: MA Experiment 108533 PARAMETER Experiment Name: Zm_4deg_Cold_P Parameter: Timepoint (hr) Value: 1
  misc_feature: MA Experiment 108533 PARAMETER Experiment Name: Zm_4deg_Cold_P Parameter: Tissue Value: Aerial
  misc_feature: MA Experiment ID: 20000479 Result: Down-regulated in Transcription
  misc_feature: MA Experiment 20000479 PARAMETER Experiment Name: Zm_Drought_P Parameter: Age (day) Value: 10
  misc_feature: MA Experiment 20000479 PARAMETER Experiment Name: Zm_Drought_P Parameter: Organism Value: Zea mays
  misc_feature: MA Experiment 20000479 PARAMETER Experiment Name: Zm_Drought_P Parameter: Plant Line Value: 35A19
  misc_feature: MA Experiment 20000479 PARAMETER Experiment Name: Zm_Drought_P Parameter: Timepoint (hr) Value: 48
  misc_feature: MA Experiment 20000479 PARAMETER Experiment Name: Zm_Drought_P Parameter: Tissue Value: Aerial
  misc_feature: MA Experiment 20000479 PARAMETER Experiment Name: Zm_Drought_P Parameter: Treatment Value: Drought vs. No Drought
  misc_feature: MA Experiment ID: 20000492 Result: Down-regulated in Transcription
  misc_feature: MA Experiment 20000492 PARAMETER Experiment Name: Zm_Hybrid_Seed_Dev_P Parameter: DAP Value: 12
  misc_feature: MA Experiment 20000492 PARAMETER Experiment Name: Zm_Hybrid_Seed_Dev_P Parameter: Organism Value: Zea mays
  misc_feature: MA Experiment 20000492 PARAMETER Experiment Name: Zm_Hybrid_Seed_Dev_P Parameter: Plant Line Value: 35A19
  misc_feature: MA Experiment 20000492 PARAMETER Experiment Name: Zm_Hybrid_Seed_Dev_P Parameter: Tissue Value: Fert Kernel vs. Unfert Floret
gactcggatcagccgcagttgatctggaggcgcgggccggccatggaggagggtggcgagcacacgagtcttctggtcaaggatgatgcatcatgtcatggcgaggaaacacagagtctattggaagcaaatctagggccacagctgaaaagtaaatgctctgattggagagcaccggcactcatcctgggattggaatgcttggagagcatggctttcaatggcattgccacaaacctagttgtgtatctccgttcagttctccatgggggtattgcttccagtgcagcaactgtatctctttggtatgggacaagcttctttgtgccaattcttggagccgccatagcagatacttgcttgggaaattataagaccatcttgatctcccttatcatgtacctatttggaatagtactaattacagttgcaacattcatgccttctacttcagtcttgtgcgacgtcagttcatgcttgtcatcaaatggaactcaaaccatgattttctttgctggtttgtatctcactgctgttggatgtggaggagtaagatctgcattgcttccgtttggtgctaaccagttcaacaacgagaacagtctagacataaaaaagagaagaaatttcttcagcttgttctatatatgtgtcatctttggtgtgattacttctgggacaatcatagtttgggttcaggaaaatgttagctgggctattggatatggagtcgccactacatgcataggtcttgctttgataggatttctggtgggaacaccaatattccaagaagatgagccttgtggttctccagtgaagagtattttccaggttattgttgcctcttttaggaacatgagcttggaagtacctgctgatagctgtcttctgtatgaggtcgggagcaaccacatacaaaggacaaaacttgctcactctgatgattttaggttcttagataaggcggcagttatttctgatccaagcctggtgtatggaggctgtcgaagctcatggagcatatgtacagttactgaagttgaggaactgaaaatacttatccgcttgctcccaatatgggtgactggaatattctttggtgctgcgatctcgcaaatgcacaccacttttattcagcagggaactgtgatggacaccaagatcggttccctgtccattccaccagcatccttatactcatttgaagtgatatgtgtcacgctttgggtacttgctgtcaacaaagtgcttgtgccggcaatccgaacgtattttgcaaatggggtagagctcacacagttacagaggattgggatcggtcgtttcctgatgatctttgccatggcaatggcagcacttctagaaaccaagaggctgcatattgttcaggagggggaactgctaagcattgtatggcagcttccacagtacttcgtcattgctggggctgagtgcttcggtatcatcactcagctggagttctttcatggccaggcgccagactccatgaagagcattttaacggcatttgcattgctcaccactgcccttgggaattacttgagctcagctatcatcaccctcattgcaggggtgaccagggtatggcatagccctggttggataccagatgatctgaacaaaggacaccttgactactactactggtgtcttactaccctctcattggtgaattttgttgtgtatctgtattttgctagtaaatacaaattgaagaaagttgtttgttaatactaccaaacactaatgaaatatctttacgtgtaacatatgaaatataacgtttcaaatgtttatgtttattaatataaggtttcaaatgtttatgttt

SEQ ID NO: 4982 - protein, 584 aa, Zea mays subsp. mays
  peptide (1)..(584): Ceres Seq. ID no. 12566609
  misc_feature (124)..(514): Pfam Name: POT family Pfam Description: POT family
  misc_feature (15)..(583): Homolog of NCBI NO: 34394564 NR Description: putative peptide transporter [Oryza sativa
  misc_feature (47)..(583): Homolog of NCBI NO: 38567970 NR Description: OSJNBa0093F12.11 [Oryza sativa (japonica
  misc_feature (42)..(583): Homolog of NCBI NO: 38567971 NR Description: OSJNBa0093F12.12 [Oryza sativa (japonica
  misc_feature (55)..(582): Homolog of NCBI NO: 37537182 NR Description: putative peptide transporter [Oryza sativa
  misc_feature (47)..(581): Homolog of NCBI NO: 15076661 NR Description: peptide transporter [Oryza sativa (japonica >gi|15076663|dbj|BAB62327.1| peptide transporter [Oryza sativa
  misc_feature (47)..(581): Homolog of NCBI NO: 4102839 NR Description: LeOPT1 [Lycopersicon esculentum]
  misc_feature (13)..(581): Homolog of NCBI NO: 15226861 NR Description: histidine transport protein (PTR2-B); protein id: supported by cDNA: gi_13937184, supported by cDNA: gi_633939
  misc_feature (13)..(581): Homolog of NCBI NO: 1076331 NR Description: histidine transport protein - Arabidopsis thaliana
  misc_feature (46)..(581): Homolog of NCBI NO: 37537188 NR Description: putative peptide transporter [Oryza sativa
  misc_feature (47)..(581): Homolog of NCBI NO: 31088360 NR Description: peptide transporter 1 [Vicia faba]
DSDQPQLIWRRGPAMEEGGEHTSLLVKDDASCHGEETQSLLEANLGPQLKSKCSDWRAPALILGLECLESMAFNGIATNLVVYLRSVLHGGIASSAATVSLWYGTSFFVPILGAAIADTCLGNYKTILISLIMYLFGIVLITVATFMPSTSVLCDVSSCLSSNGTQTMIFFAGLYLTAVGCGGVRSALLPFGANQFNNENSLDIKKRRNFFSLFYICVIFGVITSGTIIVWVQENVSWAIGYGVATTCIGLALIGFLVGTPIFQEDEPCGSPVKSIFQVIVASFRNMSLEVPADSCLLYEVGSNHIQRTKLAHSDDFRFLDKAAVISDPSLVYGGCRSSWSICTVTEVEELKILIRLLPIWVTGIFFGAAISQMHTTFIQQGTVMDTKIGSLSIPPASLYSFEVICVTLWVLAVNKVLVPAIRTYFANGVELTQLQRIGIGRFLMIFAMAMAALLETKRLHIVQEGELLSIVWQLPQYFVIAGAECFGIITQLEFFHGQAPDSMKSILTAFALLTTALGNYLSSAIITLIAGVTRVWHSPGWIPDDLNKGHLDYYYWCLTTLSLVNFVVYLYFASKYKLKKVVC

SEQ ID NO: 4983 - protein, 570 aa, Zea mays subsp. mays
  peptide (1)..(570): Ceres Seq. ID no. 12566610
  misc_feature (110)..(500): Pfam Name: POT family Pfam Description: POT family
  misc_feature (1)..(569): Homolog of NCBI NO: 34394564 NR Description: putative peptide transporter [Oryza sativa
  misc_feature (33)..(569): Homolog of NCBI NO: 38567970 NR Description: OSJNBa0093F12.11 [Oryza sativa (japonica
  misc_feature (28)..(569): Homolog of NCBI NO: 38567971 NR Description: OSJNBa0093F12.12 [Oryza sativa (japonica
  misc_feature (41)..(568): Homolog of NCBI NO: 37537182 NR Description: putative peptide transporter [Oryza sativa
  misc_feature (33)..(567): Homolog of NCBI NO: 15076661 NR Description: peptide transporter [Oryza sativa (japonica >gi|15076663|dbj|BAB62327.1| peptide transporter [Oryza sativa
  misc_feature (33)..(567): Homolog of NCBI NO: 4102839 NR Description: LeOPT1 [Lycopersicon esculentum]
  misc_feature (1)..(567): Homolog of NCBI NO: 15226861 NR Description: histidine transport protein (PTR2-B); protein id: supported by cDNA: gi_13937184, supported by cDNA: gi_633939
  misc_feature (1)..(567): Homolog of NCBI NO: 1076331 NR Description: histidine transport protein - Arabidopsis thaliana
  misc_feature (32)..(567): Homolog of NCBI NO: 37537188 NR Description: putative peptide transporter [Oryza sativa
  misc_feature (33)..(567): Homolog of NCBI NO: 31088360 NR Description: peptide transporter 1 [Vicia faba]
MEEGGEHTSLLVKDDASCHGEETQSLLEANLGPQLKSKCSDWRAPALILGLECLESMAFNGIATNLVVYLRSVLHGGIASSAATVSLWYGTSFFVPILGAAIADTCLGNYKTILISLIMYLFGIVLITVATFMPSTSVLCDVSSCLSSNGTQTMIFFAGLYLTAVGCGGVRSALLPFGANQFNNENSLDIKKRRNFFSLFYICVIFGVITSGTIIVWVQENVSWAIGYGVATTCIGLALIGFLVGTPIFQEDEPCGSPVKSIFQVIVASFRNMSLEVPADSCLLYEVGSNHIQRTKLAHSDDFRFLDKAAVISDPSLVYGGCRSSWSICTVTEVEELKILIRLLPIWVTGIFFGAAISQMHTTFIQQGTVMDTKIGSLSIPPASLYSFEVICVTLWVLAVNKVLVPAIRTYFANGVELTQLQRIGIGRFLMIFAMAMAALLETKRLHIVQEGELLSIVWQLPQYFVIAGAECFGIITQLEFFHGQAPDSMKSILTAFALLTTALGNYLSSAIITLIAGVTRVWHSPGWIPDDLNKGHLDYYYWCLTTLSLVNFVVYLYFASKYKLKKVVC

SEQ ID NO: 4984 - protein, 514 aa, Zea mays subsp. mays
  peptide (1)..(514): Ceres Seq. ID no. 12566611
  misc_feature (54)..(444): Pfam Name: POT family Pfam Description: POT family
  misc_feature (1)..(513): Homolog of NCBI NO: 34394564 NR Description: putative peptide transporter [Oryza sativa
  misc_feature (1)..(513): Homolog of NCBI NO: 38567970 NR Description: OSJNBa0093F12.11 [Oryza sativa (japonica
  misc_feature (1)..(513): Homolog of NCBI NO: 38567971 NR Description: OSJNBa0093F12.12 [Oryza sativa (japonica
  misc_feature (1)..(512): Homolog of NCBI NO: 37537182 NR Description: putative peptide transporter [Oryza sativa
  misc_feature (1)..(511): Homolog of NCBI NO: 15076661 NR Description: peptide transporter [Oryza sativa (japonica >gi|15076663|dbj|BAB62327.1| peptide transporter [Oryza sativa
  misc_feature (1)..(511): Homolog of NCBI NO: 4102839 NR Description: LeOPT1 [Lycopersicon esculentum]
  misc_feature (1)..(511): Homolog of NCBI NO: 15226861 NR Description: histidine transport protein (PTR2-B); protein id: supported by cDNA: gi_13937184, supported by cDNA: gi_633939
  misc_feature (1)..(511): Homolog of NCBI NO: 1076331 NR Description: histidine transport protein - Arabidopsis thaliana
  misc_feature (1)..(511): Homolog of NCBI NO: 37537188 NR Description: putative peptide transporter [Oryza sativa
  misc_feature (1)..(511): Homolog of NCBI NO: 31088360 NR Description: peptide transporter 1 [Vicia faba]
MAFNGIATNLVVYLRSVLHGGIASSAATVSLWYGTSFFVPILGAAIADTCLGNYKTILISLIMYLFGIVLITVATFMPSTSVLCDVSSCLSSNGTQTMIFFAGLYLTAVGCGGVRSALLPFGANQFNNENSLDIKKRRNFFSLFYICVIFGVITSGTIIVWVQENVSWAIGYGVATTCIGLALIGFLVGTPIFQEDEPCGSPVKSIFQVIVASFRNMSLEVPADSCLLYEVGSNHIQRTKLAHSDDFRFLDKAAVISDPSLVYGGCRSSWSICTVTEVEELKILIRLLPIWVTGIFFGAAISQMHTTFIQQGTVMDTKIGSLSIPPASLYSFEVICVTLWVLAVNKVLVPAIRTYFANGVELTQLQRIGIGRFLMIFAMAMAALLETKRLHIVQEGELLSIVWQLPQYFVIAGAECFGIITQLEFFHGQAPDSMKSILTAFALLTTALGNYLSSAIITLIAGVTRVWHSPGWIPDDLNKGHLDYYYWCLTTLSLVNFVVYLYFASKYKLKKVVC

SEQ ID NO: 4985 - DNA, 1968 bp, Zea mays subsp. mays
  misc_feature (1)..(1968): Ceres Seq. ID no. 12409766
  misc_feature: MA Experiment ID: 108544 Result: Down-regulated in Transcription
ataaaacacgcaccggcacctaccagccgccaccttcccggctcctttactcgccggaggcgaaccagaactcgtgccacctcctcctgttccttgccatctccgaattcccatctgagattccaagggccgcgccgtgcaatcgaggctctccccgctcaccatatatcggaggctccgcccccgcgcctcgaatccttcgcgagaggtgctgttgtttgccgtgatttgagccgggtggaggtgtctcgcttcttgatcttgagaggtgttcctagttgattgttgggagcgaagaaggcatgataccttctgtgaggatctctcctggctctgcagccttctctggctccagcctacgcttaaaattacattcaattccatccatctctagtctcaaaccctccaaatatgtggtctcctcgctgaaaccactctacctagcaccgctagatggtccacacacttctgagcttaagtcttggagacaaccacttgagttccgttgtgctgcttctgctgccgatgacaaggagtcaaagactcaggtggtgccagttcagttggaaggcgcacagaggttaaagatctccatctatttcgcgacctggtgggcgcttaatgtgatatttaacatttacaacaagaaggttctcaatgctttcccttacccctggctcacctccacactctcccttgcctgcggctctgcgatgatgcttttctcgtgggccactcgtcttgttgaggcccccaagaccgacctagacttctggaaagtccttttcccggttgctgtggcacatacaattggccatgttgctgcgacagtgagcatgtctaaggtggcagtgtcattcacacacataattaaaagtgcagaacctgcattcactgttttggtgtcaaagttcctccttggggagacgtttccagttccagtctatctttctcttcttccaatcattggtggttgtgctctagctgctgtcacagagctgaactttaatatggttggatttatgggtgctatgatgtccaaccttgcatttgttttccgcaacatcttctcgaagaggggcatgaaggggaagtccgtcagtggcatgaattactatgcttgcctgtcaataatgtcgctggtcatactgactccatttgctatagctatggaaggtcctcagatgtgggctgctggttggcaaaaggctgttgcagaagttggacccaatgttgtctggtggatcgctgcacagagcgtgttctatcacttatataaccaggtgtcctacatgtctctcgatcagatctctccattgacgtttagcattggcaatacaatgaaacgtatatcagtgattgtttcatctataattatcttccacacgcctgtccgccctgtcaatgcactgggagctgccattgccatccttggcacattcctgtactctcaggcaaaggcgtgaggctaaagctttggccaaaggatcggagccagtagcaggcactggatccagttttgcttgttggagtggcatgtagatataaggttcggttttcgtgagagagagggtaataatggatcagtggctctgctgttccgttcttgtttgttgaccagattgaaatgcacaggccgtgacatgaaccgtcgtcaagtgtacctgaataacaccgtaacgaaattcaccgatgctgtttctttatggtattttagcagagctaagctgcgagccatgaccatgaccatgagcgcttgaacctccctacctttctggcgtttgagcatcatcagaagttagcttgaacaagcaagagtgaagatttcgaaggcttgaagaatgttctctgcatcagtgtacaaatatattgcagggctagtacaacaaagtagaatgtgatgttatgtttagctgcattgtgattgctttgccagtttacatgtaacaaaaagatagctgggacgtg

SEQ ID NO: 4986 - protein, 387 aa, Zea mays subsp. mays
  peptide (1)..(387): Ceres Seq. ID no. 12409767
  misc_feature (105)..(230): Pfam Name: Integral membrane protein DUF6 Pfam Description: Integral membrane protein DUF6
  misc_feature (1)..(387): Homolog of NCBI NO: 7489744 NR Description: glucose-6-phosphate/phosphate-translocator
  misc_feature (1)..(386): Homolog of NCBI NO: 38637068 NR Description: glucose-6-phosphate/phosphate translocator [Oryza
  misc_feature (1)..(386): Homolog of NCBI NO: 14150753 NR Description: glucose-6-phosphate/phosphate translocator [Oryza
  misc_feature (3)..(386): Homolog of NCBI NO: 7488807 NR Description: glucose-6-phosphate/phosphate-translocator
  misc_feature (7)..(386): Homolog of NCBI NO: 18407336 NR Description: glucose-6-phosphate/phosphate-translocator putative; protein id: At1g61800.1, supported by cDNA:
  misc_feature (7)..(386): Homolog of NCBI NO: 14596173 NR Description: Similar to
  misc_feature (7)..(384): Homolog of NCBI NO: 7484980 NR Description: glucose-6-phosphate/phosphate translocator
  misc_feature (1)..(386): Homolog of NCBI NO: 18423670 NR Description: glucose-6-phosphate/phosphate translocator; id: At5g54800.1, supported by cDNA: 26107., supported by cDNA: supported by cDNA: gi_7229674 [Arabidopsis thaliana]
  misc_feature (4)..(386): Homolog of NCBI NO: 7489258 NR Description: probable
  misc_feature (4)..(386): Homolog of NCBI NO: 27752361 NR Description: glucose-6-phosphate/phosphate translocator 2
MIPSVRISPGSAAFSGSSLRLKLHSIPSISSLKPSKYVVSSLKPLYLAPLDGPHTSELKSWRQPLEFRCAASAADDKESKTQVVPVQLEGAQRLKISIYFATWWALNVIFNIYNKKVLNAFPYPWLTSTLSLACGSAMMLFSWATRLVEAPKTDLDFWKVLFPVAVAHTIGHVAATVSMSKVAVSFTHIIKSAEPAFTVLVSKFLLGETFPVPVYLSLLPIIGGCALAAVTELNFNMVGFMGAMMSNLAFVFRNIFSKRGMKGKSVSGMNYYACLSIMSLVILTPFAIAMEGPQMWAAGWQKAVAEVGPNVVWWIAAQSVFYHLYNQVSYMSLDQISPLTFSIGNTMKRISVIVSSIIIFHTPVRPVNALGAAIAILGTFLYSQAKA

SEQ ID NO: 4987 - protein, 250 aa, Zea mays subsp. mays
  peptide (1)..(250): Ceres Seq. ID no. 12409768
  misc_feature (1)..(93): Pfam Name: Integral membrane protein DUF6 Pfam Description: Integral membrane protein DUF6
  misc_feature (1)..(250): Homolog of NCBI NO: 7489744 NR Description: glucose-6-phosphate/phosphate-translocator
  misc_feature (1)..(249): Homolog of NCBI NO: 38637068 NR Description: glucose-6-phosphate/phosphate translocator [Oryza
  misc_feature (1)..(249): Homolog of NCBI NO: 14150753 NR Description: glucose-6-phosphate/phosphate translocator [Oryza
  misc_feature (1)..(249): Homolog of NCBI NO: 7488807 NR Description: glucose-6-phosphate/phosphate-translocator
  misc_feature (1)..(249): Homolog of NCBI NO: 18407336 NR Description: glucose-6-phosphate/phosphate-translocator putative; protein id: At1g61800.1, supported by cDNA:
  misc_feature (1)..(249): Homolog of NCBI NO: 14596173 NR Description: Similar to
  misc_feature (1)..(247): Homolog of NCBI NO: 7484980 NR Description: glucose-6-phosphate/phosphate translocator
  misc_feature (1)..(249): Homolog of NCBI NO: 18423670 NR Description: glucose-6-phosphate/phosphate translocator; id: At5g54800.1, supported by cDNA: 26107., supported by cDNA: supported by cDNA: gi_7229674 [Arabidopsis thaliana]
  misc_feature (1)..(249): Homolog of NCBI NO: 7489258 NR Description: probable
  misc_feature (1)..(249): Homolog of NCBI NO: 27752361 NR Description: glucose-6-phosphate/phosphate translocator 2
MMLFSWATRLVEAPKTDLDFWKVLFPVAVAHTIGHVAATVSMSKVAVSFTHIIKSAEPAFTVLVSKFLLGETFPVPVYLSLLPIIGGCALAAVTELNFNMVGFMGAMMSNLAFVFRNIFSKRGMKGKSVSGMNYYACLSIMSLVILTPFAIAMEGPQMWAAGWQKAVAEVGPNVVWWIAAQSVFYHLYNQVSYMSLDQISPLTFSIGNTMKRISVIVSSIIIFHTPVRPVNALGAAIAILGTFLYSQAKA

SEQ ID NO: 4988 - protein, 249 aa, Zea mays subsp. mays
  peptide (1)..(249): Ceres Seq. ID no. 12409769
  misc_feature (1)..(92): Pfam Name: Integral membrane protein DUF6 Pfam Description: Integral membrane protein DUF6
  misc_feature (1)..(249): Homolog of NCBI NO: 7489744 NR Description: glucose-6-phosphate/phosphate-translocator
  misc_feature (1)..(248): Homolog of NCBI NO: 38637068 NR Description: glucose-6-phosphate/phosphate translocator [Oryza
  misc_feature (1)..(248): Homolog of NCBI NO: 14150753 NR Description: glucose-6-phosphate/phosphate translocator [Oryza
  misc_feature (1)..(248): Homolog of NCBI NO: 7488807 NR Description: glucose-6-phosphate/phosphate-translocator
  misc_feature (1)..(248): Homolog of NCBI NO: 18407336 NR Description: glucose-6-phosphate/phosphate-translocator putative; protein id: At1g61800.1, supported by cDNA:
  misc_feature (1)..(248): Homolog of NCBI NO: 14596173 NR Description: Similar to
  misc_feature (1)..(246): Homolog of NCBI NO: 7484980 NR Description: glucose-6-phosphate/phosphate translocator
  misc_feature (1)..(248): Homolog of NCBI NO: 18423670 NR Description: glucose-6-phosphate/phosphate translocator; id: At5g54800.1, supported by cDNA: 26107., supported by cDNA: supported by cDNA: gi_7229674 [Arabidopsis thaliana]
  misc_feature (1)..(248): Homolog of NCBI NO: 7489258 NR Description: probable
  misc_feature (1)..(248): Homolog of NCBI NO: 27752361 NR Description: glucose-6-phosphate/phosphate translocator 2
MLFSWATRLVEAPKTDLDFWKVLFPVAVAHTIGHVAATVSMSKVAVSFTHIIKSAEPAFTVLVSKFLLGETFPVPVYLSLLPIIGGCALAAVTELNFNMVGFMGAMMSNLAFVFRNIFSKRGMKGKSVSGMNYYACLSIMSLVILTPFAIAMEGPQMWAAGWQKAVAEVGPNVVWWIAAQSVFYHLYNQVSYMSLDQISPLTFSIGNTMKRISVIVSSIIIFHTPVRPVNALGAAIAILGTFLYSQAKA

SEQ ID NO: 4989 - DNA, 1346 bp, Zea mays subsp. mays
  misc_feature (1)..(1346): Ceres Seq. ID no. 12379321
  misc_feature: MA Experiment ID: 20000535 Result: Down-regulated in Transcription
  misc_feature: MA Experiment 20000535 PARAMETER Experiment Name: Zm_Hybrid_Seed_Dev_P Parameter: DAP Value: 30 vs. 12
  misc_feature: MA Experiment 20000535 PARAMETER Experiment Name: Zm_Hybrid_Seed_Dev_P Parameter: Organism Value: Zea mays
  misc_feature: MA Experiment 20000535 PARAMETER Experiment Name: Zm_Hybrid_Seed_Dev_P Parameter: Plant Line Value: 35A19
  misc_feature: MA Experiment 20000535 PARAMETER Experiment Name: Zm_Hybrid_Seed_Dev_P Parameter: Tissue Value: Embryo vs. Unfert Floret
gcacgagaccattacctagaacatcctaatccaaaagttttaacccaaagtaaccgtcccgtgtttccgtttgcttcgcctggtcaccttccgtggtgcctgtggctgtgtacgcggtcgtctccatccgacccatcgatcatccaaaaactaaaccaaatcttccccatcgatcccaacttccagtcgatctcctcgctcggctgttgcctcccaaagccgcgccttacaacgagattcctcccctcctctctccaataaccctagcctcctccgccgccggcgacgaatccggcgttttgagtttctgttgccagcgtagccatgtccatgttcaataggatcttcgggaagcccaaggagcaggccaactccaatgccttggccactctggacaagttaaatgagactcttgatatgctggagaagaaagaaaaggtgctggagaaaaaagcagccgctgagctggagagagccaaggagttctcaaaagctaagaataaaagagcggctatccaatccttgaagaggaaaaaactttatgagcaacaaattgagcagcttggaaattttcagttgagaatccatgatcagatgatcatgttagaagcagctaaagctacaacagagactgttgatgcattgagaactggagctgcagctatgaaagcaatgcaaaaagcaacaaacattgatgatgtagacaagaccatggatgaaattaatgaacagactgaaaatatgaaacaaattcaggatgctttgtcagctcctctcggagcttctgctgatttcgatgaggatgaactggaagccgaacttgaagaactggagggagcagagttggaatctcagcttctggagcctgttgcagctcctccggtgcatccagtgcatgccccagccaacaagcaaccagcgcgccctgctccacagaaagctacagctgaagatgatgagcttgctgcactgcaagctgaaatggcattgtgatcaggtttccaatgaagaggtggaatgtgtatatgaatggcgttatgctaccaagatgaaagttgagtcaggatttattatatttgccatgtgtataatcttgggggatatttggcaagcagaaaaaaagctgctccaggcagtgtttgtttcagtgattttgggctctgttttccacaaacagtttaatgtcgcccggttagctctaagctaactattcaggtcaccaacgtgcattgtttgtcacagtatttttcatttacccatattgtctggagccatgtaagagtgttggaacgtataaagcctcagggtacacatttgatgtgccggtttgcagctatttcgacctc

SEQ ID NO: 4990 - protein, 222 aa, Zea mays subsp. mays
  peptide (1)..(222): Ceres Seq. ID no. 12379322
  misc_feature (22)..(203): Pfam Name: SNF7 Pfam Description: SNF7
  misc_feature (22)..(203): Pfam Name: SNF7 Pfam Description: SNF7
  misc_feature (3)..(222): Homolog of NCBI NO: 15233464 NR Description: putative protein; protein id: At4g29160.1, by cDNA: 7471., supported by cDNA: gi_14596130, supported by
  misc_feature (5)..(222): Homolog of NCBI NO: 21594892 NR Description: copia-like retroelement pol polyprotein
  misc_feature (3)..(222): Homolog of NCBI NO: 15224854 NR Description: copia-like retroelement pol polyprotein; protein At2g19830.1, supported by cDNA: gi_15028176, supported by cDNA:
  misc_feature (1)..(218): Homolog of NCBI NO: 28277855 NR Description: Unknown (protein for MGC:56112) [Danio rerio]
  misc_feature (1)..(217): Homolog of NCBI NO: 28077049 NR Description: RIKEN cDNA 2010012F05 [Mus musculus] Protein c20orf178 homolog >gi|15030308|gb|AAH11429.1| Unknown
  misc_feature (5)..(222): Homolog of NCBI NO: 21594892 NR Description: copia-like retroelement pol polyprotein
  misc_feature (1)..(218): Homolog of NCBI NO: 28277855 NR Description: Unknown (protein for MGC:56112) [Danio rerio]
  misc_feature (25)..(213): Homolog of NCBI NO: 28828571 NR Description: hypothetical protein [Dictyostelium discoideum]
  misc_feature (1)..(219): Homolog of NCBI NO: 13182765 NR Description: CDA04 [Homo sapiens]
  misc_feature (1)..(219): Homolog of NCBI NO: 40548422 NR Description: Snf7 homologue associated with Alix 2 [Homo >gi|28071136|emb|CAD61949.1| unnamed protein product [Homo
  misc_feature (1)..(212): Homolog of NCBI NO: 28278647 NR Description: Similar to RIKEN cDNA 2010012F05 gene [Danio
  misc_feature (1)..(217): Homolog of NCBI NO: 28827795 NR Description: chromosome 20 open reading frame 178 [Homo >gi|24636296|sp|Q9H444|CTH8_HUMAN Protein c20orf178 dJ553F4.4 (Novel protein similar to Drosophila CG8055 protein)
  misc_feature (1)..(217): Homolog of NCBI NO: 28077049 NR Description: RIKEN cDNA 2010012F05 [Mus musculus] Protein c20orf178 homolog >gi|15030308|gb|AAH11429.1| Unknown
  misc_feature (3)..(222): Homolog of NCBI NO: 15224854 NR Description: copia-like retroelement pol polyprotein; protein At2g19830.1, supported by cDNA: gi_15028176, supported by cDNA:
  misc_feature (3)..(222): Homolog of NCBI NO: 15233464 NR Description: putative protein; protein id: At4g29160.1, by cDNA: 7471., supported by cDNA: gi_14596130, supported by
  misc_feature (1)..(217): Homolog of NCBI NO: 28827795 NR Description: chromosome 20 open reading frame 178 [Homo >gi|24636296|sp|Q9H444|CTH8_HUMAN Protein c20orf178 dJ553F4.4 (Novel protein similar to Drosophila CG8055 protein)
  misc_feature (1)..(212): Homolog of NCBI NO: 28278647 NR Description: Similar to RIKEN cDNA 2010012F05 gene [Danio
  misc_feature (1)..(219): Homolog of NCBI NO: 40548422 NR Description: Snf7 homologue associated with Alix 2 [Homo >gi|28071136|emb|CAD61949.1| unnamed protein product [Homo
  misc_feature (1)..(219): Homolog of NCBI NO: 13182765 NR Description: CDA04 [Homo sapiens]
  misc_feature (25)..(213): Homolog of NCBI NO: 28828571 NR Description: hypothetical protein [Dictyostelium discoideum]
MSMFNRIFGKPKEQANSNALATLDKLNETLDMLEKKEKVLEKKAAAELERAKEFSKAKNKRAAIQSLKRKKLYEQQIEQLGNFQLRIHDQMIMLEAAKATTETVDALRTGAAAMKAMQKATNIDDVDKTMDEINEQTENMKQIQDALSAPLGASADFDEDELEAELEELEGAELESQLLEPVAAPPVHPVHAPANKQPARPAPQKATAEDDELAALQAEMAL

SEQ ID NO: 4991 - protein, 220 aa, Zea mays subsp. mays
  peptide (1)..(220): Ceres Seq. ID no. 12379323
  misc_feature (20)..(201): Pfam Name: SNF7 Pfam Description: SNF7
  misc_feature (20)..(201): Pfam Name: SNF7 Pfam Description: SNF7
  misc_feature (1)..(220): Homolog of NCBI NO: 15233464 NR Description: putative protein; protein id: At4g29160.1, by cDNA: 7471., supported by cDNA: gi_14596130, supported by
  misc_feature (3)..(220): Homolog of NCBI NO: 21594892 NR Description: copia-like retroelement pol polyprotein
  misc_feature (1)..(220): Homolog of NCBI NO: 15224854 NR Description: copia-like retroelement pol polyprotein; protein At2g19830.1, supported by cDNA: gi_15028176, supported by cDNA:
  misc_feature (1)..(216): Homolog of NCBI NO: 28277855 NR Description: Unknown (protein for MGC:56112) [Danio rerio]
  misc_feature (1)..(215): Homolog of NCBI NO: 28077049 NR Description: RIKEN cDNA 2010012F05 [Mus musculus] Protein c20orf178 homolog >gi|15030308|gb|AAH11429.1| Unknown
  misc_feature (3)..(220): Homolog of NCBI NO: 21594892 NR Description: copia-like retroelement pol polyprotein
  misc_feature (1)..(216): Homolog of NCBI NO: 28277855 NR Description: Unknown (protein for MGC:56112) [Danio rerio]
  misc_feature (23)..(211): Homolog of NCBI NO: 28828571 NR Description: hypothetical protein [Dictyostelium discoideum]
  misc_feature (1)..(217): Homolog of NCBI NO: 13182765 NR Description: CDA04 [Homo sapiens]
  misc_feature (1)..(217): Homolog of NCBI NO: 40548422 NR Description: Snf7 homologue associated with Alix 2 [Homo >gi|28071136|emb|CAD61949.1| unnamed protein product [Homo
  misc_feature (1)..(210): Homolog of NCBI NO: 28278647 NR Description: Similar to RIKEN cDNA 2010012F05 gene [Danio
  misc_feature (1)..(215): Homolog of NCBI NO: 28827795 NR Description: chromosome 20 open reading frame 178 [Homo >gi|24636296|sp|Q9H444|CTH8_HUMAN Protein c20orf178 dJ553F4.4 (Novel protein similar to Drosophila CG8055 protein)
  misc_feature (1)..(215): Homolog of NCBI NO: 28077049 NR Description: RIKEN cDNA 2010012F05 [Mus musculus] Protein c20orf178 homolog >gi|15030308|gb|AAH11429.1| Unknown
  misc_feature (1)..(220): Homolog of NCBI NO: 15224854 NR Description: copia-like retroelement pol polyprotein; protein At2g19830.1, supported by cDNA: gi_15028176, supported by cDNA:
  misc_feature (1)..(220): Homolog of NCBI NO: 15233464 NR Description: putative protein; protein id: At4g29160.1, by cDNA: 7471., supported by cDNA: gi_14596130, supported by
  misc_feature (1)..(215): Homolog of NCBI NO: 28827795 NR Description: chromosome 20 open reading frame 178 [Homo >gi|24636296|sp|Q9H444|CTH8_HUMAN Protein c20orf178 dJ553F4.4 (Novel protein similar to Drosophila CG8055 protein)
  misc_feature (1)..(210): Homolog of NCBI NO: 28278647 NR Description: Similar to RIKEN cDNA 2010012F05 gene [Danio
  misc_feature (1)..(217): Homolog of NCBI NO: 40548422 NR Description: Snf7 homologue associated with Alix 2 [Homo >gi|28071136|emb|CAD61949.1| unnamed protein product [Homo
  misc_feature (1)..(217): Homolog of NCBI NO: 13182765 NR Description: CDA04 [Homo sapiens]
  misc_feature (23)..(211): Homolog of NCBI NO: 28828571 NR Description: hypothetical protein [Dictyostelium discoideum]
MFNRIFGKPKEQANSNALATLDKLNETLDMLEKKEKVLEKKAAAELERAKEFSKAKNKRAAIQSLKRKKLYEQQIEQLGNFQLRIHDQMIMLEAAKATTETVDALRTGAAAMKAMQKATNIDDVDKTMDEINEQTENMKQIQDALSAPLGASADFDEDELEAELEELEGAELESQLLEPVAAPPVHPVHAPANKQPARPAPQKATAEDDELAALQAEMAL

SEQ ID NO: 4992 - protein, 191 aa, Zea mays subsp. mays
  peptide (1)..(191): Ceres Seq. ID no. 12379324
  misc_feature (1)..(172): Pfam Name: SNF7 Pfam Description: SNF7
  misc_feature (1)..(172): Pfam Name: SNF7 Pfam Description: SNF7
  misc_feature (1)..(191): Homolog of NCBI NO: 15233464 NR Description: putative protein; protein id: At4g29160.1, by cDNA: 7471., supported by cDNA: gi_14596130, supported by
  misc_feature (1)..(191): Homolog of NCBI NO: 21594892 NR Description: copia-like retroelement pol polyprotein
  misc_feature (1)..(191): Homolog of NCBI NO: 15224854 NR Description: copia-like retroelement pol polyprotein; protein At2g19830.1, supported by cDNA: gi_15028176, supported by cDNA:
  misc_feature (1)..(187): Homolog of NCBI NO: 28277855 NR Description: Unknown (protein for MGC:56112) [Danio rerio]
  misc_feature (1)..(186): Homolog of NCBI NO: 28077049 NR Description: RIKEN cDNA 2010012F05 [Mus musculus] Protein c20orf178 homolog >gi|15030308|gb|AAH11429.1| Unknown
  misc_feature (1)..(191): Homolog of NCBI NO: 21594892 NR Description: copia-like retroelement pol polyprotein
  misc_feature (1)..(187): Homolog of NCBI NO: 28277855 NR Description: Unknown (protein for MGC:56112) [Danio rerio]
  misc_feature (1)..(182): Homolog of NCBI NO: 28828571 NR Description: hypothetical protein [Dictyostelium discoideum]
  misc_feature (1)..(188): Homolog of NCBI NO: 13182765 NR Description: CDA04 [Homo sapiens]
  misc_feature (1)..(188): Homolog of NCBI NO: 40548422 NR Description: Snf7 homologue associated with Alix 2 [Homo >gi|28071136|emb|CAD61949.1| unnamed protein product [Homo
  misc_feature (1)..(181): Homolog of NCBI NO: 28278647 NR Description: Similar to RIKEN cDNA 2010012F05 gene [Danio
  misc_feature (1)..(186): Homolog of NCBI NO: 28827795 NR Description: chromosome 20 open reading frame 178 [Homo >gi|24636296|sp|Q9H444|CTH8_HUMAN Protein c20orf178 dJ553F4.4 (Novel protein similar to Drosophila CG8055 protein)
  misc_feature (1)..(186): Homolog of NCBI NO: 28077049 NR Description: RIKEN cDNA 2010012F05 [Mus musculus] Protein c20orf178 homolog >gi|15030308|gb|AAH11429.1| Unknown
  misc_feature (1)..(191): Homolog of NCBI NO: 15224854 NR Description: copia-like retroelement pol polyprotein; protein At2g19830.1, supported by cDNA: gi_15028176, supported by cDNA:
  misc_feature (1)..(191): Homolog of NCBI NO: 15233464 NR Description: putative protein; protein id: At4g29160.1, by cDNA: 7471., supported by cDNA: gi_14596130, supported by
  misc_feature (1)..(186): Homolog of NCBI NO: 28827795 NR Description: chromosome 20 open reading frame 178 [Homo >gi|24636296|sp|Q9H444|CTH8_HUMAN Protein c20orf178 dJ553F4.4 (Novel protein similar to Drosophila CG8055 protein)
  misc_feature (1)..(181): Homolog of NCBI NO: 28278647 NR Description: Similar to RIKEN cDNA 2010012F05 gene [Danio
  misc_feature (1)..(188): Homolog of NCBI NO: 40548422 NR Description: Snf7 homologue associated with Alix 2 [Homo >gi|28071136|emb|CAD61949.1| unnamed protein product [Homo
  misc_feature (1)..(188): Homolog of NCBI NO: 13182765 NR Description: CDA04 [Homo sapiens]
  misc_feature (1)..(182): Homolog of NCBI NO: 28828571 NR Description: hypothetical protein [Dictyostelium discoideum]
MLEKKEKVLEKKAAAELERAKEFSKAKNKRAAIQSLKRKKLYEQQIEQLGNFQLRIHDQMIMLEAAKATTETVDALRTGAAAMKAMQKATNIDDVDKTMDEINEQTENMKQIQDALSAPLGASADFDEDELEAELEELEGAELESQLLEPVAAPPVHPVHAPANKQPARPAPQKATAEDDELAALQAEMAL

SEQ ID NO: 4993 - DNA, 1321 bp, Zea mays subsp. mays
  misc_feature (1)..(1321): Ceres Seq. ID no. 12363181
  misc_feature: MA Experiment ID: 108528 Result: Down-regulated in Transcription
  misc_feature: MA Experiment 108528 PARAMETER Experiment Name: Zm_Imbibed_Seeds_P Parameter: Age (day) Value: 5 vs. 2
  misc_feature: MA Experiment 108528 PARAMETER Experiment Name: Zm_Imbibed_Seeds_P Parameter: Organism Value: Zea mays
  misc_feature: MA Experiment 108528 PARAMETER Experiment Name: Zm_Imbibed_Seeds_P Parameter: Plant Line Value: 35A19
  misc_feature: MA Experiment 108528 PARAMETER Experiment Name: Zm_Imbibed_Seeds_P Parameter: Tissue Value: Aerial vs. Embryo
  misc_feature: MA Experiment ID: 108530 Result: Down-regulated in Transcription
  misc_feature: MA Experiment 108530 PARAMETER Experiment Name: Zm_Imbibed_Seeds_P Parameter: Age (day) Value: 6 vs. 2
  misc_feature: MA Experiment 108530 PARAMETER Experiment Name: Zm_Imbibed_Seeds_P Parameter: Organism Value: Zea mays
  misc_feature: MA Experiment 108530 PARAMETER Experiment Name: Zm_Imbibed_Seeds_P Parameter: Plant Line Value: 35A19
  misc_feature: MA Experiment 108530 PARAMETER Experiment Name: Zm_Imbibed_Seeds_P Parameter: Tissue Value: Aerial vs. Embryo
  misc_feature: MA Experiment ID: 20000492 Result: Down-regulated in Transcription
  misc_feature: MA Experiment 20000492 PARAMETER Experiment Name: Zm_Hybrid_Seed_Dev_P Parameter: DAP Value: 12
  misc_feature: MA Experiment 20000492 PARAMETER Experiment Name: Zm_Hybrid_Seed_Dev_P Parameter: Organism Value: Zea mays
  misc_feature: MA Experiment 20000492 PARAMETER Experiment Name: Zm_Hybrid_Seed_Dev_P Parameter: Plant Line Value: 35A19
  misc_feature: MA Experiment 20000492 PARAMETER Experiment Name: Zm_Hybrid_Seed_Dev_P Parameter: Tissue Value: Fert Kernel vs. Unfert Floret
  misc_feature: MA Experiment ID: 20000535 Result: Down-regulated in Transcription
  misc_feature: MA Experiment 20000535 PARAMETER Experiment Name: Zm_Hybrid_Seed_Dev_P Parameter: DAP Value: 30 vs. 12
  misc_feature: MA Experiment 20000535 PARAMETER Experiment Name: Zm_Hybrid_Seed_Dev_P Parameter: Organism Value: Zea mays
  misc_feature: MA Experiment 20000535 PARAMETER Experiment Name: Zm_Hybrid_Seed_Dev_P Parameter: Plant Line Value: 35A19
  misc_feature: MA Experiment 20000535 PARAMETER Experiment Name: Zm_Hybrid_Seed_Dev_P Parameter: Tissue Value: Embryo vs. Unfert Floret
tcttcctcgtcgtcggcgactgcctccttgttggtctccagcccatcctagtgttcatgtcaaaggttgatgggaagtttcagttcagtcccatcagtgttaactttctgacggaggttatgaaagtcatctttgctgtcgtcatgctcataattcagtctagaaagcaaaaggttggagaaaagccacttttggcacgttcaaccttcatacaggcagcccgtaataatgtacttctagctgttcctgctcttctatatgcaatcaacaattacctaaaattcatcatgcagttgtacttcaatcctgcaactgtgaaaatgctaagtaacctaaaggtactggttatagcttttcttctgaaatttataatgagaaggagattctcagttattcagtgggaagctcttgctctattgcttattggaatcagcatcaatcaactccgaactgtacctgtgggcaacacagcatttggtcttcctgtcactgctattgcgtacatatatacattgatttttgtaactgttccttcagtggcttctgtctacaatgaatatgccttgaaaagtcaatatgacactagcatctatctccagaacttgtttctgtacggatatggagcaatattcaacttgcttggcattcttgggactgtcctattccaagggccagagagttttaatattcttcgaggccattcaagggccacaatatttctcatatgtaacaatgctgcacaaggcattctatcttcattcttctttaagtatgcagacacaattttgaagaaatattcgtcaactgttgccacaatatttactggcctagcttctgctgcatttttggggcattccttgaccattaattttctcctgggcatatcagtggtgtttatttcaatgcaccagttcttctctccgcttgcaaaagtcaaagatgacaaaccagctgactcaatagagttggaagatacacaaaatgaccgcccatctgaatcttcttttgtaaatatgactgctggtgccgctgatgatgcaagccatcggattggaactgatgagaggcagccgctattgcctatatgaacttgtttgttgaggtaggacagaagagaggggatagaagaagaggctcctttttgccgtgtgagcaacagatttgatgtagcattgttaggcgaataaacagctattgtacactgtagaggcaaaagaaacaaataaacgtggtttccattttctttaaattttttggggataccttgggagcggcagaaatcatacattttgatagacataattcaatagggatttctagg

SEQ ID NO: 4994 - protein, 361 aa, Zea mays subsp. mays
  peptide (1)..(361): Ceres Seq. ID no. 12363182
  misc_feature (61)..(297): Pfam Name: Nucleotide-sugar transporter Pfam Description: Nucleotide-sugar transporter
  misc_feature (2)..(361): Homolog of NCBI NO: 38345234 NR Description: OSJNBa0084K20.12 [Oryza sativa (japonica
  misc_feature (1)..(360): Homolog of NCBI NO: 26450627 NR Description: unknown protein [Arabidopsis thaliana]
  misc_feature (2)..(360): Homolog of NCBI NO: 18411150 NR Description: transporter-like protein; protein id: supported by cDNA: gi_13430657 [Arabidopsis thaliana] putative transporter protein [Arabidopsis thaliana]
  misc_feature (2)..(345): Homolog of NCBI NO: 34907666 NR Description: putative transporter-like protein [Oryza sativa
  misc_feature (171)..(347): Homolog of NCBI NO: 25408848 NR Description: hypothetical protein At2g43240 [imported] - thaliana >gi|3763933|gb|AAC64313.1| unknown protein [Arabidopsis
  misc_feature (1)..(99): Homolog of NCBI NO: 25408848 NR Description: hypothetical protein At2g43240 [imported] - thaliana >gi|3763933|gb|AAC64313.1| unknown protein [Arabidopsis
  misc_feature (171)..(347): Homolog of NCBI NO: 30689311 NR Description: expressed protein [Arabidopsis thaliana]
  misc_feature (1)..(58): Homolog of NCBI NO: 30689311 NR Description: expressed protein [Arabidopsis thaliana]
  misc_feature (71)..(99): Homolog of NCBI NO: 30689311 NR Description: expressed protein [Arabidopsis thaliana]
  misc_feature (2)..(292): Homolog of NCBI NO: 11358902 NR Description: transporter-like protein - Arabidopsis thaliana
FLVVGDCLLVGLQPILVFMSKVDGKFQFSPISVNFLTEVMKVIFAVVMLIIQSRKQKVGEKPLLARSTFIQAARNNVLLAVPALLYAINNYLKFIMQLYFNPATVKMLSNLKVLVIAFLLKFIMRRRFSVIQWEALALLLIGISINQLRTVPVGNTAFGLPVTAIAYIYTLIFVTVPSVASVYNEYALKSQYDTSIYLQNLFLYGYGAIFNLLGILGTVLFQGPESFNILRGHSRATIFLICNNAAQGILSSFFFKYADTILKKYSSTVATIFTGLASAAFLGHSLTINFLLGISVVFISMHQFFSPLAKVKDDKPADSIELEDTQNDRPSESSFVNMTAGAADDASHRIGTDERQPLLPI

SEQ ID NO: 4995 - protein, 343 aa, Zea mays subsp. mays
  peptide (1)..(343): Ceres Seq. ID no. 12363183
  misc_feature (43)..(279): Pfam Name: Nucleotide-sugar transporter Pfam Description: Nucleotide-sugar transporter
  misc_feature (1)..(342): Homolog of NCBI NO: 26450627 NR Description: unknown protein [Arabidopsis thaliana]
  misc_feature (1)..(342): Homolog of NCBI NO: 18411150 NR Description: transporter-like protein; protein id: supported by cDNA: gi_13430657 [Arabidopsis thaliana] putative transporter protein [Arabidopsis thaliana]
  misc_feature (1)..(327): Homolog of NCBI NO: 34907666 NR Description: putative transporter-like protein [Oryza sativa
  misc_feature (153)..(329): Homolog of NCBI NO: 25408848 NR Description: hypothetical protein At2g43240 [imported] - thaliana >gi|3763933|gb|AAC64313.1| unknown protein [Arabidopsis
  misc_feature (1)..(81): Homolog of NCBI NO: 25408848 NR Description: hypothetical protein At2g43240 [imported] - thaliana >gi|3763933|gb|AAC64313.1| unknown protein [Arabidopsis
  misc_feature (1)..(343): Homolog of NCBI NO: 38345234 NR Description: OSJNBa0084K20.12 [Oryza sativa (japonica
  misc_feature (153)..(329): Homolog of NCBI NO: 30689311 NR Description: expressed protein [Arabidopsis thaliana]
  misc_feature (1)..(40): Homolog of NCBI NO: 30689311 NR Description: expressed protein [Arabidopsis thaliana]
  misc_feature (53)..(81): Homolog of NCBI NO: 30689311 NR Description: expressed protein [Arabidopsis thaliana]
  misc_feature (1)..(274): Homolog of NCBI NO: 11358902 NR Description: transporter-like protein - Arabidopsis thaliana
MSKVDGKFQFSPISVNFLTEVMKVIFAVVMLIIQSRKQKVGEKPLLARSTFIQAARNNVLLAVPALLYAINNYLKFIMQLYFNPATVKMLSNLKVLVIAFLLKFIMRRRFSVIQWEALALLLIGISINQLRTVPVGNTAFGLPVTAIAYIYTLIFVTVPSVASVYNEYALKSQYDTSIYLQNLFLYGYGAIFNLLGILGTVLFQGPESFNILRGHSRATIFLICNNAAQGILSSFFFKYADTILKKYSSTVATIFTGLASAAFLGHSLTINFLLGISVVFISMHQFFSPLAKVKDDKPADSIELEDTQNDRPSESSFVNMTAGAADDASHRIGTDERQPLLPI

SEQ ID NO: 4996 - protein, 322 aa, Zea mays subsp. mays
  peptide (1)..(322): Ceres Seq. ID no. 12363184
  misc_feature (22)..(258): Pfam Name: Nucleotide-sugar transporter Pfam Description: Nucleotide-sugar transporter
  misc_feature (1)..(322): Homolog of NCBI NO: 38345234 NR Description: OSJNBa0084K20.12 [Oryza sativa (japonica
  misc_feature (1)..(321): Homolog of NCBI NO: 26450627 NR Description: unknown protein [Arabidopsis thaliana]
  misc_feature (1)..(321): Homolog of NCBI NO: 18411150 NR Description: transporter-like protein; protein id: supported by cDNA: gi_13430657 [Arabidopsis thaliana] putative transporter protein [Arabidopsis thaliana]
  misc_feature (1)..(306): Homolog of NCBI NO: 34907666 NR Description: putative transporter-like protein [Oryza sativa
  misc_feature (132)..(308): Homolog of NCBI NO: 25408848 NR Description: hypothetical protein At2g43240 [imported] - thaliana >gi|3763933|gb|AAC64313.1| unknown protein [Arabidopsis
  misc_feature (1)..(60): Homolog of NCBI NO: 25408848 NR Description: hypothetical protein At2g43240 [imported] - thaliana >gi|3763933|gb|AAC64313.1| unknown protein [Arabidopsis
  misc_feature (132)..(308): Homolog of NCBI NO: 30689311 NR Description: expressed protein [Arabidopsis thaliana]
  misc_feature (1)..(19): Homolog of NCBI NO: 30689311 NR Description: expressed protein [Arabidopsis thaliana]
  misc_feature (32)..(60): Homolog of NCBI NO: 30689311 NR Description: expressed protein [Arabidopsis thaliana]
  misc_feature (1)..(253): Homolog of NCBI NO: 11358902 NR Description: transporter-like protein - Arabidopsis thaliana
MKVIFAVVMLIIQSRKQKVGEKPLLARSTFIQAARNNVLLAVPALLYAINNYLKFIMQLYFNPATVKMLSNLKVLVIAFLLKFIMRRRFSVIQWEALALLLIGISINQLRTVPVGNTAFGLPVTAIAYIYTLIFVTVPSVASVYNEYALKSQYDTSIYLQNLFLYGYGAIFNLLGILGTVLFQGPESFNILRGHSRATIFLICNNAAQGILSSFFFKYADTILKKYSSTVATIFTGLASAAFLGHSLTINFLLGISVVFISMHQFFSPLAKVKDDKPADSIELEDTQNDRPSESSFVNMTAGAADDASHRIGTDERQPLLPI

SEQ ID NO: 4997 - DNA, 1678 bp, Zea mays subsp. mays
  misc_feature (1)..(1678): Ceres Seq. ID no. 13498837
  misc_feature: MA Experiment ID: 108528 Result: Down-regulated in Transcription
  misc_feature: MA Experiment 108528 PARAMETER Experiment Name: Zm_Imbibed_Seeds_P Parameter: Age (day) Value: 5 vs. 2
  misc_feature: MA Experiment 108528 PARAMETER Experiment Name: Zm_Imbibed_Seeds_P Parameter: Organism Value: Zea mays
  misc_feature: MA Experiment 108528 PARAMETER Experiment Name: Zm_Imbibed_Seeds_P Parameter: Plant Line Value: 35A19
  misc_feature: MA Experiment 108528 PARAMETER Experiment Name: Zm_Imbibed_Seeds_P Parameter: Tissue Value: Aerial vs. Embryo
  misc_feature: MA Experiment ID: 108530 Result: Down-regulated in Transcription
  misc_feature: MA Experiment 108530 PARAMETER Experiment Name: Zm_Imbibed_Seeds_P Parameter: Age (day) Value: 6 vs. 2
  misc_feature: MA Experiment 108530 PARAMETER Experiment Name: Zm_Imbibed_Seeds_P Parameter: Organism Value: Zea mays
  misc_feature: MA Experiment 108530 PARAMETER Experiment Name: Zm_Imbibed_Seeds_P Parameter: Plant Line Value: 35A19
  misc_feature: MA Experiment 108530 PARAMETER Experiment Name: Zm_Imbibed_Seeds_P Parameter: Tissue Value: Aerial vs. Embryo
  misc_feature: MA Experiment ID: 108535 Result: Up-regulated in Transcription
  misc_feature: MA Experiment 108535 PARAMETER Experiment Name: Zm_Meristem_P Parameter: Age (day) Value: 8
  misc_feature: MA Experiment 108535 PARAMETER Experiment Name: Zm_Meristem_P Parameter: Organism Value: Zea mays
  misc_feature: MA Experiment 108535 PARAMETER Experiment Name: Zm_Meristem_P Parameter: Plant Line Value: 35A19
  misc_feature: MA Experiment 108535 PARAMETER Experiment Name: Zm_Meristem_P Parameter: Tissue Value: Root Meristem vs. Above Root Meristem
  misc_feature: MA Experiment ID: 108543 Result: Up-regulated in Transcription
  misc_feature: MA Experiment ID: 108544 Result: Up-regulated in Transcription
  misc_feature: MA Experiment ID: 108547 Result: Down-regulated in Transcription
  misc_feature: MA Experiment 108547 PARAMETER Experiment Name: Zm_Imbibed_Seeds_P Parameter: Age (day) Value: 4 vs. 2
  misc_feature: MA Experiment 108547 PARAMETER Experiment Name: Zm_Imbibed_Seeds_P Parameter: Organism Value: Zea mays
  misc_feature: MA Experiment 108547 PARAMETER Experiment Name: Zm_Imbibed_Seeds_P Parameter: Plant Line Value: 35A19
  misc_feature: MA Experiment 108547 PARAMETER Experiment Name: Zm_Imbibed_Seeds_P Parameter: Tissue Value: Aerial vs. Embryo
  misc_feature: MA Experiment ID: 108688 Result: Down-regulated in Transcription
  misc_feature: MA Experiment 108688 PARAMETER Experiment Name: Zm_Embryos-Flowers__P Parameter: Tissue Value: Immature Flowers vs. Aerial+
  misc_feature: MA Experiment ID: 20000479 Result: Up-regulated in Transcription
  misc_feature: MA Experiment 20000479 PARAMETER Experiment Name: Zm_Drought_P Parameter: Age (day) Value: 10
  misc_feature: MA Experiment 20000479 PARAMETER Experiment Name: Zm_Drought_P Parameter: Organism Value: Zea mays
  misc_feature: MA Experiment 20000479 PARAMETER Experiment Name: Zm_Drought_P Parameter: Plant Line Value: 35A19
  misc_feature: MA Experiment 20000479 PARAMETER Experiment Name: Zm_Drought_P Parameter: Timepoint (hr) Value: 48
  misc_feature: MA Experiment 20000479 PARAMETER Experiment Name: Zm_Drought_P Parameter: Tissue Value: Aerial
  misc_feature: MA Experiment 20000479 PARAMETER Experiment Name: Zm_Drought_P Parameter: Treatment Value: Drought vs. No Drought
  misc_feature: MA Experiment ID: 20000535 Result: Up-regulated in Transcription
  misc_feature: MA Experiment 20000535 PARAMETER Experiment Name: Zm_Hybrid_Seed_Dev_P Parameter: DAP Value: 30 vs. 12
  misc_feature: MA Experiment 20000535 PARAMETER Experiment Name: Zm_Hybrid_Seed_Dev_P Parameter: Organism Value: Zea mays
  misc_feature: MA Experiment 20000535 PARAMETER Experiment Name: Zm_Hybrid_Seed_Dev_P Parameter: Plant Line Value: 35A19
  misc_feature: MA Experiment 20000535 PARAMETER Experiment Name: Zm_Hybrid_Seed_Dev_P Parameter: Tissue Value: Embryo vs. Unfert Floret
atctcgcaagcagcagcagagcagaaactgagggaagcgagggacggcgatggcgggtgcggaggggagagggccgagacggagccgcgtggcgttcgtgctggtggacgggatcggggacgtgagcgttccgtcgctgggcgggcgcacgccgctggacgcggcgtgcgcgccgcggctggacgcggtggcggcggccggggtgaccgggctcatggaccccgtggagccggggcttgcatgcggcagcgacacggcgcacctatccctcctcgggtacgacccacgggagtactaccgcggccgcggcgcgttcgaatccatgggtgccgggctcgccatggcgcctggcgacatcgccttcaagtcgaacttcgctacactggatgagaacactggagttatcatcagcaggagggcagatcggcactttgaagaggaaggccctatactctgtgctgcgttggatgggatgaaacttcggtcgtttcctgagtatgaagtcagagtaagatatgctaccgagcatagatgtggtgtggttgtcaaaggaccaaagctgagtgggaacatttctggaactgatcccttgaaggacaaccgcttgcatctgaaggctgaaccgttggatggctcagaagaagctaaaaacactgcagctgtggtcaatgagctttctatggagattacgcgcatactggtttctcaccccatcaacgcaaagcgtgcagctgaggggaagaacatcgcaaatgttgtgttgctgcgaggttgtggtattcggattgaggtgcctgcctttgaaaccaaacatggacttgcaccttgcatggttgctcctaccaagatcatagctggcctgggactgtcactggggattgatatccttgaagcacctggagcaactggagattatcgtactctcttaacttctaaagctaaagccatagccaaggcactctctgcccctatggatacaccacctcgtgtttttgtgcctggagaggatggatacaaggctggaaaagaaaatggatatgactttgggttcctgcacataaaggccattgatgatgctggtcatgacaaggctgtcaagttgaaagtacggggtctagaagctgttgatcgagctattggtcagcttgcgaggcttctttgggaagctgaaaaggccggacactatcagtactttctttgngtcactggagaccattctactcctgttgaatatggtgatcatagcttcgaacccgtcccgtttgcaatatgcagactgagagattatgcaggagccattggggaggataatattatgaatacacagctcgacgattttcccctcccttcggtaaaatccggagaagatttgctcgacagtatagaatcactggagcacaagcctggtcaacttaaagctttcagtggcgacagtgtgtgtgagttcaacgagatcgccgctgcgaggggctgccttggacgattcccaggaagcgagatgatgggcatcattaagaagtttatcaaggccaagaatgattaatgctggttgaaatgctaacctttagcgtaatatattggccataaggtttattatcaatgtaataaactaataatgacagaatggagcaatatggaagaaccgtcttgattggagatgaataagagataccttggc

SEQ ID NO: 4998 - protein, 497 aa, Zea mays subsp. mays
  peptide (1)..(497): Ceres Seq. ID no. 13498838
  misc_feature (312)..(423): Pfam Name: Metalloenzyme superfamily Pfam Description: Metalloenzyme superfamily
  misc_feature (11)..(492): Homolog of NCBI NO: 30690068 NR Description: phosphonopyruvate decarboxylase -related
  misc_feature (11)..(493): Homolog of NCBI NO: 30681098 NR Description: expressed protein [Arabidopsis thaliana]
  misc_feature (11)..(493): Homolog of NCBI NO: 25407505 NR Description: hypothetical protein AT4g09520 [imported] - thaliana >gi|7267647|emb|CAB78075.1| putative protein
  misc_feature (12)..(302): Homolog of NCBI NO: 28828261 NR Description: similar to Arabidopsis thaliana (Mouse-ear cress).
  misc_feature (330)..(466): Homolog of NCBI NO: 28828261 NR Description: similar to Arabidopsis thaliana (Mouse-ear cress).
  misc_feature (458)..(492): Homolog of NCBI NO: 28828261 NR Description: similar to Arabidopsis thaliana (Mouse-ear cress).
  misc_feature (13)..(304): Homolog of NCBI NO: 20094629 NR Description: Predicted phosphoglycerate mutase [Methanopyrus
  misc_feature (330)..(407): Homolog of NCBI NO: 20094629 NR Description: Predicted phosphoglycerate mutase [Methanopyrus
  misc_feature (461)..(489): Homolog of NCBI NO: 20094629 NR Description: Predicted phosphoglycerate mutase [Methanopyrus
  misc_feature (17)..(341): Homolog of NCBI NO: 15679586 NR Description: phosphonopyruvate decarboxylase
  misc_feature (384)..(384): Xaa is any aa, unknown or other
MAGAEGRGPRRSRVAFVLVDGIGDVSVPSLGGRTPLDAACAPRLDAVAAAGVTGLMDPVEPGLACGSDTAHLSLLGYDPREYYRGRGAFESMGAGLAMAPGDIAFKSNFATLDENTGVIISRRADRHFEEEGPILCAALDGMKLRSFPEYEVRVRYATEHRCGVVVKGPKLSGNISGTDPLKDNRLHLKAEPLDGSEEAKNTAAVVNELSMEITRILVSHPINAKRAAEGKNIANVVLLRGCGIRIEVPAFETKHGLAPCMVAPTKIIAGLGLSLGIDILEAPGATGDYRTLLTSKAKAIAKALSAPMDTPPRVFVPGEDGYKAGKENGYDFGFLHIKAIDDAGHDKAVKLKVRGLEAVDRAIGQLARLLWEAEKAGHYQYFLXVTGDHSTPVEYGDHSFEPVPFAICRLRDYAGAIGEDNIMNTQLDDFPLPSVKSGEDLLDSIESLEHKPGQLKAFSGDSVCEFNEIAAARGCLGRFPGSEMMGIIKKFIKAKND

SEQ ID NO: 4999 - protein, 442 aa, Zea mays subsp. mays
  peptide (1)..(442): Ceres Seq. ID no. 13498839
  misc_feature (257)..(368): Pfam Name: Metalloenzyme superfamily Pfam Description: Metalloenzyme superfamily
  misc_feature (1)..(437): Homolog of NCBI NO: 30690068 NR Description: phosphonopyruvate decarboxylase -related
  misc_feature (1)..(438): Homolog of NCBI NO: 30681098 NR Description: expressed protein [Arabidopsis thaliana]
  misc_feature (1)..(438): Homolog of NCBI NO: 25407505 NR Description: hypothetical protein AT4g09520 [imported] - thaliana >gi|7267647|emb|CAB78075.1| putative protein
  misc_feature (1)..(247): Homolog of NCBI NO: 28828261 NR Description: similar to Arabidopsis thaliana (Mouse-ear cress).
  misc_feature (275)..(411): Homolog of NCBI NO: 28828261 NR Description: similar to Arabidopsis thaliana (Mouse-ear cress).
  misc_feature (403)..(437): Homolog of NCBI NO: 28828261 NR Description: similar to Arabidopsis thaliana (Mouse-ear cress).
  misc_feature (1)..(249): Homolog of NCBI NO: 20094629 NR Description: Predicted phosphoglycerate mutase [Methanopyrus
  misc_feature (275)..(352): Homolog of NCBI NO: 20094629 NR Description: Predicted phosphoglycerate mutase [Methanopyrus
  misc_feature (406)..(434): Homolog of NCBI NO: 20094629 NR Description: Predicted phosphoglycerate mutase [Methanopyrus
  misc_feature (1)..(286): Homolog of NCBI NO: 15679586 NR Description: phosphonopyruvate decarboxylase
  misc_feature (329)..(329): Xaa is any aa, unknown or other
MDPVEPGLACGSDTAHLSLLGYDPREYYRGRGAFESMGAGLAMAPGDIAFKSNFATLDENTGVIISRRADRHFEEEGPILCAALDGMKLRSFPEYEVRVRYATEHRCGVVVKGPKLSGNISGTDPLKDNRLHLKAEPLDGSEEAKNTAAVVNELSMEITRILVSHPINAKRAAEGKNIANVVLLRGCGIRIEVPAFETKHGLAPCMVAPTKIIAGLGLSLGIDILEAPGATGDYRTLLTSKAKAIAKALSAPMDTPPRVFVPGEDGYKAGKENGYDFGFLHIKAIDDAGHDKAVKLKVRGLEAVDRAIGQLARLLWEAEKAGHYQYFLXVTGDHSTPVEYGDHSFEPVPFAICRLRDYAGAIGEDNIMNTQLDDFPLPSVKSGEDLLDSIESLEHKPGQLKAFSGDSVCEFNEIAAARGCLGRFPGSEMMGIIKKFIKAKND

SEQ ID NO: 5000 - protein, 406 aa, Zea mays subsp. mays
  peptide (1)..(406): Ceres Seq. ID no. 13498840
  misc_feature (221)..(332): Pfam Name: Metalloenzyme superfamily Pfam Description: Metalloenzyme superfamily
  misc_feature (1)..(401): Homolog of NCBI NO: 30690068 NR Description: phosphonopyruvate decarboxylase -related
  misc_feature (1)..(402): Homolog of NCBI NO: 30681098 NR Description: expressed protein [Arabidopsis thaliana]
  misc_feature (1)..(402): Homolog of NCBI NO: 25407505 NR Description: hypothetical protein AT4g09520 [imported] - thaliana >gi|7267647|emb|CAB78075.1| putative protein
  misc_feature (1)..(211): Homolog of NCBI NO: 28828261 NR Description: similar to Arabidopsis thaliana (Mouse-ear cress).
  misc_feature (239)..(375): Homolog of NCBI NO: 28828261 NR Description: similar to Arabidopsis thaliana (Mouse-ear cress).
  misc_feature (367)..(401): Homolog of NCBI NO: 28828261 NR Description: similar to Arabidopsis thaliana (Mouse-ear cress).
  misc_feature (1)..(213): Homolog of NCBI NO: 20094629 NR Description: Predicted phosphoglycerate mutase [Methanopyrus
  misc_feature (239)..(316): Homolog of NCBI NO: 20094629 NR Description: Predicted phosphoglycerate mutase [Methanopyrus
  misc_feature (370)..(398): Homolog of NCBI NO: 20094629 NR Description: Predicted phosphoglycerate mutase [Methanopyrus
  misc_feature (1)..(250): Homolog of NCBI NO: 15679586 NR Description: phosphonopyruvate decarboxylase
  misc_feature (293)..(293): Xaa is any aa, unknown or other
MGAGLAMAPGDIAFKSNFATLDENTGVIISRRADRHFEEEGPILCAALDGMKLRSFPEYEVRVRYATEHRCGVVVKGPKLSGNISGTDPLKDNRLHLKAEPLDGSEEAKNTAAVVNELSMEITRILVSHPINAKRAAEGKNIANVVLLRGCGIRIEVPAFETKHGLAPCMVAPTKIIAGLGLSLGIDILEAPGATGDYRTLLTSKAKAIAKALSAPMDTPPRVFVPGEDGYKAGKENGYDFGFLHIKAIDDAGHDKAVKLKVRGLEAVDRAIGQLARLLWEAEKAGHYQYFLXVTGDHSTPVEYGDHSFEPVPFAICRLRDYAGAIGEDNIMNTQLDDFPLPSVKSGEDLLDSIESLEHKPGQLKAFSGDSVCEFNEIAAARGCLGRFPGSEMMGIIKKFIKAKND

SEQ ID NO: 5001 - DNA, 1097 bp, Zea mays subsp. mays
  misc_feature (1)..(1097): Ceres Seq. ID no. 12409745
  misc_feature: MA Experiment ID: 108523 Result: Up-regulated in Transcription
  misc_feature: MA Experiment 108523 PARAMETER Experiment Name: Zm_42deg_Heat_P Parameter: Age (day) Value: 8
  misc_feature: MA Experiment 108523 PARAMETER Experiment Name: Zm_42deg_Heat_P Parameter: Organism Value: Zea mays
  misc_feature: MA Experiment 108523 PARAMETER Experiment Name: Zm_42deg_Heat_P Parameter: Plant Line Value: 35A19
  misc_feature: MA Experiment 108523 PARAMETER Experiment Name: Zm_42deg_Heat_P Parameter: Temperature (deg C) Value: 42 vs. 22
  misc_feature: MA Experiment 108523 PARAMETER Experiment Name: Zm_42deg_Heat_P Parameter: Timepoint (hr) Value: 6
  misc_feature: MA Experiment 108523 PARAMETER Experiment Name: Zm_42deg_Heat_P Parameter: Tissue Value: Aerial
  misc_feature: MA Experiment ID: 108526 Result: Up-regulated in Transcription
  misc_feature: MA Experiment 108526 PARAMETER Experiment Name: Zm_5mM_NO_P Parameter: Age (day) Value: 8
  misc_feature: MA Experiment 108526 PARAMETER Experiment Name: Zm_5mM_NO_P Parameter: Organism Value: Zea mays
  misc_feature: MA Experiment 108526 PARAMETER Experiment Name: Zm_5mM_NO_P Parameter: Plant Line Value: 35A19
  misc_feature: MA Experiment 108526 PARAMETER Experiment Name: Zm_5mM_NO_P Parameter: Timepoint (hr) Value: 1
  misc_feature: MA Experiment 108526 PARAMETER Experiment Name: Zm_5mM_NO_P Parameter: Tissue Value: Aerial
  misc_feature: MA Experiment 108526 PARAMETER Experiment Name: Zm_5mM_NO_P Parameter: Treatment Value: 5mM NO vs. No Treatment
  misc_feature: MA Experiment ID: 108527 Result: Up-regulated in Transcription
  misc_feature: MA Experiment 108527 PARAMETER Experiment Name: Zm_5mM_NO_P Parameter: Age (day) Value: 8
  misc_feature: MA Experiment 108527 PARAMETER Experiment Name: Zm_5mM_NO_P Parameter: Organism Value: Zea mays
  misc_feature: MA Experiment 108527 PARAMETER Experiment Name: Zm_5mM_NO_P Parameter: Plant Line Value: 35A19
  misc_feature: MA Experiment 108527 PARAMETER Experiment Name: Zm_5mM_NO_P Parameter: Timepoint (hr) Value: 6
  misc_feature: MA Experiment 108527 PARAMETER Experiment Name: Zm_5mM_NO_P Parameter: Tissue Value: Aerial
  misc_feature: MA Experiment 108527 PARAMETER Experiment Name: Zm_5mM_NO_P Parameter: Treatment Value: 5mM NO vs. No Treatment
  misc_feature: MA Experiment ID: 108528 Result: Down-regulated in Transcription
  misc_feature: MA Experiment 108528 PARAMETER Experiment Name: Zm_Imbibed_Seeds_P Parameter: Age (day) Value: 5 vs. 2
  misc_feature: MA Experiment 108528 PARAMETER Experiment Name: Zm_Imbibed_Seeds_P Parameter: Organism Value: Zea mays
  misc_feature: MA Experiment 108528 PARAMETER Experiment Name: Zm_Imbibed_Seeds_P Parameter: Plant Line Value: 35A19
  misc_feature: MA Experiment 108528 PARAMETER Experiment Name: Zm_Imbibed_Seeds_P Parameter: Tissue Value: Aerial vs. Embryo
  misc_feature: MA Experiment ID: 108529 Result: Down-regulated in Transcription
  misc_feature: MA Experiment 108529 PARAMETER Experiment Name: Zm_Imbibed_Seeds_P Parameter: Age (day) Value: 5 vs. 2
  misc_feature: MA Experiment 108529 PARAMETER Experiment Name: Zm_Imbibed_Seeds_P Parameter: Organism Value: Zea mays
  misc_feature: MA Experiment 108529 PARAMETER Experiment Name: Zm_Imbibed_Seeds_P Parameter: Plant Line Value: 35A19
  misc_feature: MA Experiment 108529 PARAMETER Experiment Name: Zm_Imbibed_Seeds_P Parameter: Tissue Value: Roots vs. Embryo
  misc_feature: MA Experiment ID: 108545 Result: Down-regulated in Transcription
  misc_feature: MA Experiment 108545 PARAMETER Experiment Name: Zm_Imbibed_Seeds_P Parameter: Age (day) Value: 3 vs. 2
  misc_feature: MA Experiment 108545 PARAMETER Experiment Name: Zm_Imbibed_Seeds_P Parameter: Organism Value: Zea mays
  misc_feature: MA Experiment 108545 PARAMETER Experiment Name: Zm_Imbibed_Seeds_P Parameter: Plant Line Value: 35A19
  misc_feature: MA Experiment 108545 PARAMETER Experiment Name: Zm_Imbibed_Seeds_P Parameter: Tissue Value: Aerial vs. Embryo
  misc_feature: MA Experiment ID: 108547 Result: Down-regulated in Transcription
  misc_feature: MA Experiment 108547 PARAMETER Experiment Name: Zm_Imbibed_Seeds_P Parameter: Age (day) Value: 4 vs. 2
  misc_feature: MA Experiment 108547 PARAMETER Experiment Name: Zm_Imbibed_Seeds_P Parameter: Organism Value: Zea mays
  misc_feature: MA Experiment 108547 PARAMETER Experiment Name: Zm_Imbibed_Seeds_P Parameter: Plant Line Value: 35A19
  misc_feature: MA Experiment 108547 PARAMETER Experiment Name: Zm_Imbibed_Seeds_P Parameter: Tissue Value: Aerial vs. Embryo
  misc_feature: MA Experiment ID: 108559 Result: Up-regulated in Transcription
  misc_feature: MA Experiment 108559 PARAMETER Experiment Name: Zm_5mM_NO_P Parameter: Age (day) Value: 8
  misc_feature: MA Experiment 108559 PARAMETER Experiment Name: Zm_5mM_NO_P Parameter: Organism Value: Zea mays
  misc_feature: MA Experiment 108559 PARAMETER Experiment Name: Zm_5mM_NO_P Parameter: Plant Line Value: 35A19
  misc_feature: MA Experiment 108559 PARAMETER Experiment Name: Zm_5mM_NO_P Parameter: Timepoint (hr) Value: 12
  misc_feature: MA Experiment 108559 PARAMETER Experiment Name: Zm_5mM_NO_P Parameter: Tissue Value: Aerial
  misc_feature: MA Experiment 108559 PARAMETER Experiment Name: Zm_5mM_NO_P Parameter: Treatment Value: 5mM NO vs. No Treatment
  misc_feature: MA Experiment ID: 108597 Result: Up-regulated in Transcription
  misc_feature: MA Experiment 108597 PARAMETER Experiment Name: Zm_100uM_ABA_P Parameter: Age (day) Value: 9
  misc_feature: MA Experiment 108597 PARAMETER Experiment Name: Zm_100uM_ABA_P Parameter: Organism Value: Zea mays
  misc_feature: MA Experiment 108597 PARAMETER Experiment Name: Zm_100uM_ABA_P Parameter: Plant Line Value: 35A19
  misc_feature: MA Experiment 108597 PARAMETER Experiment Name: Zm_100uM_ABA_P Parameter: Timepoint (hr) Value: 24
  misc_feature: MA Experiment 108597 PARAMETER Experiment Name: Zm_100uM_ABA_P Parameter: Tissue Value: Aerial
  misc_feature: MA Experiment 108597 PARAMETER Experiment Name: Zm_100uM_ABA_P Parameter: Treatment Value: 100uM ABA vs. No Treatment
  misc_feature: MA Experiment ID: 20000479 Result: Up-regulated in Transcription
  misc_feature: MA Experiment 20000479 PARAMETER Experiment Name: Zm_Drought_P Parameter: Age (day) Value: 10
  misc_feature: MA Experiment 20000479 PARAMETER Experiment Name: Zm_Drought_P Parameter: Organism Value: Zea mays
  misc_feature: MA Experiment 20000479 PARAMETER Experiment Name: Zm_Drought_P Parameter: Plant Line Value: 35A19
  misc_feature: MA Experiment 20000479 PARAMETER Experiment Name: Zm_Drought_P Parameter: Timepoint (hr) Value: 48
  misc_feature: MA Experiment 20000479 PARAMETER Experiment Name: Zm_Drought_P Parameter: Tissue Value: Aerial
  misc_feature: MA Experiment 20000479 PARAMETER Experiment Name: Zm_Drought_P Parameter: Treatment Value: Drought vs. No Drought
  misc_feature: MA Experiment ID: 20000480 Result: Up-regulated in Transcription
  misc_feature: MA Experiment 20000480 PARAMETER Experiment Name: Zm_Drought_P Parameter: Age (day) Value: 11
  misc_feature: MA Experiment 20000480 PARAMETER Experiment Name: Zm_Drought_P Parameter: Organism Value: Zea mays
  misc_feature: MA Experiment 20000480 PARAMETER Experiment Name: Zm_Drought_P Parameter: Plant Line Value: 35A19
  misc_feature: MA Experiment 20000480 PARAMETER Experiment Name: Zm_Drought_P Parameter: Timepoint (hr) Value: 72
  misc_feature: MA Experiment 20000480 PARAMETER Experiment Name: Zm_Drought_P Parameter: Tissue Value: Aerial
  misc_feature: MA Experiment 20000480 PARAMETER Experiment Name: Zm_Drought_P Parameter: Treatment Value: Drought vs. No Drought
  misc_feature: MA Experiment ID: 20001614 Result: Up-regulated in Transcription
  misc_feature: MA Experiment 20001614 PARAMETER Experiment Name: Zm_50ppm_KNO3_L-to-H_P Parameter: Age (day) Value: 21
  misc_feature: MA Experiment 20001614 PARAMETER Experiment Name: Zm_50ppm_KNO3_L-to-H_P Parameter: Organism Value: Zea mays
  misc_feature: MA Experiment 20001614 PARAMETER Experiment Name: Zm_50ppm_KNO3_L-to-H_P Parameter: Plant Line Value: 35A19
  misc_feature: MA Experiment 20001614 PARAMETER Experiment Name: Zm_50ppm_KNO3_L-to-H_P Parameter: Timepoint (hr) Value: 48
  misc_feature: MA Experiment 20001614 PARAMETER Experiment Name: Zm_50ppm_KNO3_L-to-H_P Parameter: Tissue Value: Roots
  misc_feature: MA Experiment 20001614 PARAMETER Experiment Name: Zm_50ppm_KNO3_L-to-H_P Parameter: Treatment Value: 50ppm KNO3 vs. 50ppm KCl
atcaacccacactccagcacacagcaatggcgttcacgcggcggcgtccgtgcggcatcctcctcctctccctgctggcggcatccggctcgctgtcgctggccgccaccggcccgggcgacgtggccgtcttctggggccggaacaaggacgagggcacgctgcgcgaaggcctgcgacacgggcacctacaccaccgtcatcatctccttcctccgcggcttcggccacggcgccgcctactactcgctcgacctctcgggccacccgctcgcgggcgtcggcgccgacgtcaagcactgccaggccaagggcatcctcgtgctcctctccatcggcgggccgcccaacaccaacaccggcgccggcgccggctactccctcccgtccgcgcgggcggcggcggacctcgccgcgtacctgtgggacgcctacctgggcggctcgcgcgcggggctgcgccgcccgttcggcgacgcggcgctggacggcgtcgacctgtacatcgaccagggcggcgccggcgtcgacggccactacgacgagctggccaggcgcctctacgcctacaacaggagctaccgcggcaggctcggggtgacgctgacggccacggtgcggtgcgcgtacccggacccgcgcgcgcaggcggcgctcgccacggggctcgtctcccgcgtccacgtccgcctgtaacggcgacctcaagtgcacctggtccgaccgggaggcgtgggagaagtgggccgcggcgtacccggccagccgcgtgttcgtcggcgtcgtggcgtcgcccgaggcggacaaggacgcctacatgttccagaaggacctctactacaacgtgctgcagttcgcccagaaggcgcccaactacggtggcctcatgatctgggataggtactacgacaagatgaaccactacatcagcagcagctaataattaagcttcccatccacatccatccacatccacccggtttatcacctaatatataatagtattattgtatttttcttcttaactttataatacactgtaatgtaataatgtgatgatctgatgatccaccaacggaataaaatggtcagcttcc

SEQ ID NO: 5002 - protein, 295 aa, Zea mays subsp. mays
  peptide (1)..(295): Ceres Seq. ID no. 12409746
  misc_feature (9)..(61): Homolog of NCBI NO: 7451377 NR Description: chitinase (EC 3.2.1.14) III C00481 - rice
  misc_feature (9)..(62): Homolog of NCBI NO: 7451381 NR Description: chitinase (EC 3.2.1.14) III C10150 - rice
  misc_feature (14)..(56): Homolog of NCBI NO: 7451378 NR Description: chitinase (EC 3.2.1.14) III C10701 - rice
  misc_feature (8)..(61): Homolog of NCBI NO: 34913272 NR Description: putative xylanase inhibitor protein [Oryza sativa
  misc_feature (14)..(61): Homolog of NCBI NO: 20804336 NR Description: xylanase inhibitor protein I [Triticum aestivum]
  misc_feature (9)..(61): Homolog of NCBI NO: 18693099 NR Description: putative xylanase inhibitor protein [Triticum
  misc_feature (20)..(62): Homolog of NCBI NO: 2425170 NR Description: basic class III chitinase OsChib3b [Oryza sativa
  misc_feature (20)..(56): Homolog of NCBI NO: 34911368 NR Description: putative acidic chitinase SE2 [Oryza sativa
  misc_feature (227)..(295): Homolog of NCBI NO: 28574039 NR Description: Salivary gland secretion 1 CG3047-PA
  misc_feature (227)..(295): Homolog of NCBI NO: 28574039 NR Description: Salivary gland secretion 1 CG3047-PA
QPTLQHTAMAFTRRRPCGILLLSLLAASGSLSLAATGPGDVAVFWGRNKDEGTLREGLRHGHLHHRHHLLPPRLRPRRRLLLARPLGPPARGRRRRRQALPGQGHPRAPLHRRAAQHQHRRRRRLLPPVRAGGGGPRRVPVGRLPGRLARGAAPPVRRRGAGRRRPVHRPGRRRRRRPLRRAGQAPLRLQQELPRQARGDADGHGAVRVPGPARAGGARHGARLPRPRPPVTATSSAPGPTGRRGRSGPRRTRPAACSSASWRRPRRTRTPTCSRRTSTTTCCSSPRRRPTTVAS

SEQ ID NO: 5003 - protein, 287 aa, Zea mays subsp. mays
  peptide (1)..(287): Ceres Seq. ID no. 12409747
  misc_feature (1)..(53): Homolog of NCBI NO: 7451377 NR Description: chitinase (EC 3.2.1.14) III C00481 - rice
  misc_feature (1)..(54): Homolog of NCBI NO: 7451381 NR Description: chitinase (EC 3.2.1.14) III C10150 - rice
  misc_feature (6)..(48): Homolog of NCBI NO: 7451378 NR Description: chitinase (EC 3.2.1.14) III C10701 - rice
  misc_feature (1)..(53): Homolog of NCBI NO: 34913272 NR Description: putative xylanase inhibitor protein [Oryza sativa
  misc_feature (6)..(53): Homolog of NCBI NO: 20804336 NR Description: xylanase inhibitor protein I [Triticum aestivum]
  misc_feature (1)..(53): Homolog of NCBI NO: 18693099 NR Description: putative xylanase inhibitor protein [Triticum
  misc_feature (12)..(54): Homolog of NCBI NO: 2425170 NR Description: basic class III chitinase OsChib3b [Oryza sativa
  misc_feature (12)..(48): Homolog of NCBI NO: 34911368 NR Description: putative acidic chitinase SE2 [Oryza sativa
  misc_feature (219)..(287): Homolog of NCBI NO: 28574039 NR Description: Salivary gland secretion 1 CG3047-PA
  misc_feature (219)..(287): Homolog of NCBI NO: 28574039 NR Description: Salivary gland secretion 1 CG3047-PA
MAFTRRRPCGILLLSLLAASGSLSLAATGPGDVAVFWGRNKDEGTLREGLRHGHLHHRHHLLPPRLRPRRRLLLARPLGPPARGRRRRRQALPGQGHPRAPLHRRAAQHQHRRRRRLLPPVRAGGGGPRRVPVGRLPGRLARGAAPPVRRRGAGRRRPVHRPGRRRRRRPLRRAGQAPLRLQQELPRQARGDADGHGAVRVPGPARAGGARHGARLPRPRPPVTATSSAPGPTGRRGRSGPRRTRPAACSSASWRRPRRTRTPTCSRRTSTTTCCSSPRRRPTTVAS

SEQ ID NO: 5004 - protein, 231 aa, Zea mays subsp. mays
  peptide (1)..(231): Ceres Seq. ID no. 12409748
  misc_feature (57)..(231): Pfam Name: Glycosyl hydrolases family 18 Pfam Description: Glycosyl hydrolases family 18
  misc_feature (57)..(231): Homolog of NCBI NO: 7451377 NR Description: chitinase (EC 3.2.1.14) III C00481 - rice
  misc_feature (57)..(231): Homolog of NCBI NO: 7451381 NR Description: chitinase (EC 3.2.1.14) III C10150 - rice
  misc_feature (57)..(230): Homolog of NCBI NO: 7451378 NR Description: chitinase (EC 3.2.1.14) III C10701 - rice
  misc_feature (57)..(230): Homolog of NCBI NO: 34913272 NR Description: putative xylanase inhibitor protein [Oryza sativa
  misc_feature (57)..(230): Homolog of NCBI NO: 20804336 NR Description: xylanase inhibitor protein I [Triticum aestivum]
  misc_feature (57)..(230): Homolog of NCBI NO: 18693099 NR Description: putative xylanase inhibitor protein [Triticum
  misc_feature (29)..(231): Homolog of NCBI NO: 4884518 NR Description: class III chitinase homologue (OsChib3H-c) [Oryza
  misc_feature (56)..(231): Homolog of NCBI NO: 2425170 NR Description: basic class III chitinase OsChib3b [Oryza sativa
  misc_feature (49)..(231): Homolog of NCBI NO: 38346492 NR Description: OSJNBa0020I02.6 [Oryza sativa (japonica
  misc_feature (48)..(231): Homolog of NCBI NO: 7451379 NR Description: chitinase (EC 3.2.1.14) III C10122 - rice
INPHSSTQQWRSRGGVRAASSSSPCWRHPARCRWPPPARATWPSSGAGTRTRARCAKACDTGTYTTVIISFLRGFGHGAAYYSLDLSGHPLAGVGADVKHCQAKGILVLLSIGGPPNTNTGAGAGYSLPSARAAADLAAYLWDAYLGGSRAGLRRPFGDAALDGVDLYIDQGGAGVDGHYDELARRLYAYNRSYRGRLGVTLTATVRCAYPDPRAQAALATGLVSRVHVRL

SEQ ID NO: 5005 - DNA, 905 bp, Zea mays subsp. mays
  misc_feature (1)..(905): Ceres Seq. ID no. 12434941
  misc_feature: MA Experiment ID: 108534 Result: Up-regulated in Transcription
  misc_feature: MA Experiment 108534 PARAMETER Experiment Name: Zm_4deg_Cold_P Parameter: Age (hr) Value: 8
  misc_feature: MA Experiment 108534 PARAMETER Experiment Name: Zm_4deg_Cold_P Parameter: Organism Value: Zea mays
  misc_feature: MA Experiment 108534 PARAMETER Experiment Name: Zm_4deg_Cold_P Parameter: Plant Line Value: 35A19
  misc_feature: MA Experiment 108534 PARAMETER Experiment Name: Zm_4deg_Cold_P Parameter: Temperature (deg C) Value: 4 vs. 22
  misc_feature: MA Experiment 108534 PARAMETER Experiment Name: Zm_4deg_Cold_P Parameter: Timepoint (hr) Value: 6
  misc_feature: MA Experiment 108534 PARAMETER Experiment Name: Zm_4deg_Cold_P Parameter: Tissue Value: Aerial
  misc_feature: MA Experiment ID: 108599 Result: Down-regulated in Transcription
  misc_feature: MA Experiment 108599 PARAMETER Experiment Name: Zm_RT1_P Parameter: Age (day) Value: 11
  misc_feature: MA Experiment 108599 PARAMETER Experiment Name: Zm_RT1_P Parameter: Organism Value: Zea mays
  misc_feature: MA Experiment 108599 PARAMETER Experiment Name: Zm_RT1_P Parameter: Plant Line Value: rt1 mut vs. rt1 wt
  misc_feature: MA Experiment 108599 PARAMETER Experiment Name: Zm_RT1_P Parameter: Tissue Value: Roots
  misc_feature: MA Experiment ID: 20000534 Result: Up-regulated in Transcription
  misc_feature: MA Experiment 20000534 PARAMETER Experiment Name: Zm_Hybrid_Pollen_P Parameter: Age (day) Value: 8
  misc_feature: MA Experiment 20000534 PARAMETER Experiment Name: Zm_Hybrid_Pollen_P Parameter: Organism Value: Zea mays
  misc_feature: MA Experiment 20000534 PARAMETER Experiment Name: Zm_Hybrid_Pollen_P Parameter: Plant Line Value: 35A19
  misc_feature: MA Experiment 20000534 PARAMETER Experiment Name: Zm_Hybrid_Pollen_P Parameter: Tissue Value: Pollen vs. Aerial
  misc_feature: MA Experiment ID: 20001610 Result: Up-regulated in Transcription
  misc_feature: MA Experiment 20001610 PARAMETER Experiment Name: Zm_50ppm_KNO3_L-to-H_P Parameter: Age (day) Value: 19
  misc_feature: MA Experiment 20001610 PARAMETER Experiment Name: Zm_50ppm_KNO3_L-to-H_P Parameter: Organism Value: Zea mays
  misc_feature: MA Experiment 20001610 PARAMETER Experiment Name: Zm_50ppm_KNO3_L-to-H_P Parameter: Plant Line Value: 35A19
  misc_feature: MA Experiment 20001610 PARAMETER Experiment Name: Zm_50ppm_KNO3_L-to-H_P Parameter: Timepoint (hr) Value: 2
  misc_feature: MA Experiment 20001610 PARAMETER Experiment Name: Zm_50ppm_KNO3_L-to-H_P Parameter: Tissue Value: Roots
  misc_feature: MA Experiment 20001610 PARAMETER Experiment Name: Zm_50ppm_KNO3_L-to-H_P Parameter: Treatment Value: 50ppm KNO3 vs. 50ppm KCl
aaatcgaaaaccactcgaacacaaactcaggcaaggcaaaaggaacccgcaccatccgaggctcaagcagggaagtgatcatcatcatcatcagaagaagatgtgcccaaccaagaaggggatgaccggagagccgagctcgccatgcagctcggcatcagcctcgaccttaccggagcaccaccagacggtgtggacgtcgccgccgaagcggccagcggggcggaccaagttccgggagacgcggcacccggtgttccgcggcgtccggcgccggggcagcgccgggcggtgggtgtgcgaggtgcgcgtgccggggaggcgcggctgcaggctctggctcggcaccttcgacacggccgaggcggcggcccgcgcgcacgacgccgccatgctcgccctcgccggcgcgggcgcctgctgcctcaacttcgccgactcggcctggctcctcgcggtcccggcctcgtgcgccagcctcgccgaggtccgccacgcggtcgcggacgccgtggaggacttcctccgccatcaggtggtcccggaggacgacgccctcgcggccacgccgtcgtcgccttccagcgaagacggcagcacctctgatggcggggagtcctcctctgattcctctccgcccacacggggcctcgccgttcgaattggatgtgttcaacgacatgagctgggacctgcactacgcgagcttggcgcagggattgctcgtggagccaccgtccgcggtcacggcgctcatggacgaaggcttcgccgatgtgccgctctggagctactagagactctgaaattttccgtttctttgcttggcctctggtgcctaattttggcagtgtaaaacggtttcttcttttggtaatgagatggaatcatggaacaagtttgcg

SEQ ID NO: 5006 - protein, 284 aa, Zea mays subsp. mays
  peptide (1)..(284): Ceres Seq. ID no. 12434942
  misc_feature (83)..(150): Pfam Name: AP2 domain Pfam Description: AP2 domain
  misc_feature (34)..(211): Homolog of NCBI NO: 22594969 NR Description: DRE-binding protein 1A [Oryza sativa]
  misc_feature (34)..(211): Homolog of NCBI NO: 33321848 NR Description: apetala2 domain-containing CBF1-like protein
  misc_feature (34)..(211): Homolog of NCBI NO: 33637698 NR Description: transcription factor RCBF3 [Oryza sativa]
  misc_feature (61)..(212): Homolog of NCBI NO: 27228310 NR Description: putative DRE-binding protein 1B [Oryza sativa
  misc_feature (61)..(212): Homolog of NCBI NO: 22594973 NR Description: putative DRE-binding protein 1B [Oryza sativa]
  misc_feature (61)..(212): Homolog of NCBI NO: 32480955 NR Description: Dre-binding protein [Oryza sativa]
  misc_feature (40)..(217): Homolog of NCBI NO: 12581489 NR Description: CRT/DRE-binding factor [Hordeum vulgare]
  misc_feature (40)..(217): Homolog of NCBI NO: 12658321 NR Description: CBF3-like protein BCBF3 [Hordeum vulgare]
  misc_feature (51)..(201): Homolog of NCBI NO: 17226801 NR Description: putative CRT/DRE-binding factor [Triticum
  misc_feature (42)..(211): Homolog of NCBI NO: 25991254 NR Description: DREB-like protein [Zea mays]
NRKPLEHKLRQGKRNPHHPRLKQGSDHHHHQKKMCPTKKGMTGEPSSPCSSASASTLPEHHQTVWTSPPKRPAGRTKFRETRHPVFRGVRRRGSAGRWVCEVRVPGRRGCRLWLGTFDTAEAAARAHDAAMLALAGAGACCLNFADSAWLLAVPASCASLAEVRHAVADAVEDFLRHQVVPEDDALAATPSSPSSEDGSTSDGGESSSDSSPPTRGLAVRIGCVQRHELGPALRELGAGIARGATVRGHGAHGRRLRRCAALELLETLKFSVSLLGLWCLILAV

SEQ ID NO: 5007 - protein, 251 aa, Zea mays subsp. mays
  peptide (1)..(251): Ceres Seq. ID no. 12434943
  misc_feature (50)..(117): Pfam Name: AP2 domain Pfam Description: AP2 domain
  misc_feature (1)..(178): Homolog of NCBI NO: 22594969 NR Description: DRE-binding protein 1A [Oryza sativa]
  misc_feature (1)..(178): Homolog of NCBI NO: 33321848 NR Description: apetala2 domain-containing CBF1-like protein
  misc_feature (1)..(178): Homolog of NCBI NO: 33637698 NR Description: transcription factor RCBF3 [Oryza sativa]
  misc_feature (28)..(179): Homolog of NCBI NO: 27228310 NR Description: putative DRE-binding protein 1B [Oryza sativa
  misc_feature (28)..(179): Homolog of NCBI NO: 22594973 NR Description: putative DRE-binding protein 1B [Oryza sativa]
  misc_feature (28)..(179): Homolog of NCBI NO: 32480955 NR Description: Dre-binding protein [Oryza sativa]
  misc_feature (7)..(184): Homolog of NCBI NO: 12581489 NR Description: CRT/DRE-binding factor [Hordeum vulgare]
  misc_feature (7)..(184): Homolog of NCBI NO: 12658321 NR Description: CBF3-like protein BCBF3 [Hordeum vulgare]
  misc_feature (18)..(168): Homolog of NCBI NO: 17226801 NR Description: putative CRT/DRE-binding factor [Triticum
  misc_feature (9)..(178): Homolog of NCBI NO: 25991254 NR Description: DREB-like protein [Zea mays]
MCPTKKGMTGEPSSPCSSASASTLPEHHQTVWTSPPKRPAGRTKFRETRHPVFRGVRRRGSAGRWVCEVRVPGRRGCRLWLGTFDTAEAAARAHDAAMLALAGAGACCLNFADSAWLLAVPASCASLAEVRHAVADAVEDFLRHQVVPEDDALAATPSSPSSEDGSTSDGGESSSDSSPPTRGLAVRIGCVQRHELGPALRELGAGIARGATVRGHGAHGRRLRRCAALELLETLKFSVSLLGLWCLILAV

SEQ ID NO: 5008 - protein, 244 aa, Zea mays subsp. mays
  peptide (1)..(244): Ceres Seq. ID no. 12434944
  misc_feature (43)..(110): Pfam Name: AP2 domain Pfam Description: AP2 domain
  misc_feature (1)..(171): Homolog of NCBI NO: 22594969 NR Description: DRE-binding protein 1A [Oryza sativa]
  misc_feature (1)..(171): Homolog of NCBI NO: 33321848 NR Description: apetala2 domain-containing CBF1-like protein
  misc_feature (1)..(171): Homolog of NCBI NO: 33637698 NR Description: transcription factor RCBF3 [Oryza sativa]
  misc_feature (21)..(172): Homolog of NCBI NO: 27228310 NR Description: putative DRE-binding protein 1B [Oryza sativa
  misc_feature (21)..(172): Homolog of NCBI NO: 22594973 NR Description: putative DRE-binding protein 1B [Oryza sativa]
  misc_feature (21)..(172): Homolog of NCBI NO: 32480955 NR Description: Dre-binding protein [Oryza sativa]
  misc_feature (1)..(177): Homolog of NCBI NO: 12581489 NR Description: CRT/DRE-binding factor [Hordeum vulgare]
  misc_feature (1)..(177): Homolog of NCBI NO: 12658321 NR Description: CBF3-like protein BCBF3 [Hordeum vulgare]
  misc_feature (11)..(161): Homolog of NCBI NO: 17226801 NR Description: putative CRT/DRE-binding factor [Triticum
  misc_feature (2)..(171): Homolog of NCBI NO: 25991254 NR Description: DREB-like protein [Zea mays]
MTGEPSSPCSSASASTLPEHHQTVWTSPPKRPAGRTKFRETRHPVFRGVRRRGSAGRWVCEVRVPGRRGCRLWLGTFDTAEAAARAHDAAMLALAGAGACCLNFADSAWLLAVPASCASLAEVRHAVADAVEDFLRHQVVPEDDALAATPSSPSSEDGSTSDGGESSSDSSPPTRGLAVRIGCVQRHELGPALRELGAGIARGATVRGHGAHGRRLRRCAALELLETLKFSVSLLGLWCLILAV

SEQ ID NO: 5009 - DNA, 1797 bp, Zea mays subsp. mays
  misc_feature (1)..(1797): Ceres Seq. ID no. 12349027
  misc_feature: MA Experiment ID: 108527 Result: Up-regulated in Transcription
  misc_feature: MA Experiment 108527 PARAMETER Experiment Name: Zm_5mM_NO_P Parameter: Age (day) Value: 8
  misc_feature: MA Experiment 108527 PARAMETER Experiment Name: Zm_5mM_NO_P Parameter: Organism Value: Zea mays
  misc_feature: MA Experiment 108527 PARAMETER Experiment Name: Zm_5mM_NO_P Parameter: Plant Line Value: 35A19
  misc_feature: MA Experiment 108527 PARAMETER Experiment Name: Zm_5mM_NO_P Parameter: Timepoint (hr) Value: 6
  misc_feature: MA Experiment 108527 PARAMETER Experiment Name: Zm_5mM_NO_P Parameter: Tissue Value: Aerial
  misc_feature: MA Experiment 108527 PARAMETER Experiment Name: Zm_5mM_NO_P Parameter: Treatment Value: 5mM NO vs. No Treatment
  misc_feature: MA Experiment ID: 108528 Result: Down-regulated in Transcription
  misc_feature: MA Experiment 108528 PARAMETER Experiment Name: Zm_Imbibed_Seeds_P Parameter: Age (day) Value: 5 vs. 2
  misc_feature: MA Experiment 108528 PARAMETER Experiment Name: Zm_Imbibed_Seeds_P Parameter: Organism Value: Zea mays
  misc_feature: MA Experiment 108528 PARAMETER Experiment Name: Zm_Imbibed_Seeds_P Parameter: Plant Line Value: 35A19
  misc_feature: MA Experiment 108528 PARAMETER Experiment Name: Zm_Imbibed_Seeds_P Parameter: Tissue Value: Aerial vs. Embryo
  misc_feature: MA Experiment ID: 108529 Result: Down-regulated in Transcription
  misc_feature: MA Experiment 108529 PARAMETER Experiment Name: Zm_Imbibed_Seeds_P Parameter: Age (day) Value: 5 vs. 2
  misc_feature: MA Experiment 108529 PARAMETER Experiment Name: Zm_Imbibed_Seeds_P Parameter: Organism Value: Zea mays
  misc_feature: MA Experiment 108529 PARAMETER Experiment Name: Zm_Imbibed_Seeds_P Parameter: Plant Line Value: 35A19
  misc_feature: MA Experiment 108529 PARAMETER Experiment Name: Zm_Imbibed_Seeds_P Parameter: Tissue Value: Roots vs. Embryo
  misc_feature: MA Experiment ID: 108530 Result: Down-regulated in Transcription
  misc_feature: MA Experiment 108530 PARAMETER Experiment Name: Zm_Imbibed_Seeds_P Parameter: Age (day) Value: 6 vs. 2
  misc_feature: MA Experiment 108530 PARAMETER Experiment Name: Zm_Imbibed_Seeds_P Parameter: Organism Value: Zea mays
  misc_feature: MA Experiment 108530 PARAMETER Experiment Name: Zm_Imbibed_Seeds_P Parameter: Plant Line Value: 35A19
  misc_feature: MA Experiment 108530 PARAMETER Experiment Name: Zm_Imbibed_Seeds_P Parameter: Tissue Value: Aerial vs. Embryo
  misc_feature: MA Experiment ID: 108543 Result: Down-regulated in Transcription
  misc_feature: MA Experiment ID: 108545 Result: Down-regulated in Transcription
  misc_feature: MA Experiment 108545 PARAMETER Experiment Name: Zm_Imbibed_Seeds_P Parameter: Age (day) Value: 3 vs. 2
  misc_feature: MA Experiment 108545 PARAMETER Experiment Name: Zm_Imbibed_Seeds_P Parameter: Organism Value: Zea mays
  misc_feature: MA Experiment 108545 PARAMETER Experiment Name: Zm_Imbibed_Seeds_P Parameter: Plant Line Value: 35A19
  misc_feature: MA Experiment 108545 PARAMETER Experiment Name: Zm_Imbibed_Seeds_P Parameter: Tissue Value: Aerial vs. Embryo
  misc_feature: MA Experiment ID: 108547 Result: Down-regulated in Transcription
  misc_feature: MA Experiment 108547 PARAMETER Experiment Name: Zm_Imbibed_Seeds_P Parameter: Age (day) Value: 4 vs. 2
  misc_feature: MA Experiment 108547 PARAMETER Experiment Name: Zm_Imbibed_Seeds_P Parameter: Organism Value: Zea mays
  misc_feature: MA Experiment 108547 PARAMETER Experiment Name: Zm_Imbibed_Seeds_P Parameter: Plant Line Value: 35A19
  misc_feature: MA Experiment 108547 PARAMETER Experiment Name: Zm_Imbibed_Seeds_P Parameter: Tissue Value: Aerial vs. Embryo
  misc_feature: MA Experiment ID: 108559 Result: Up-regulated in Transcription
  misc_feature: MA Experiment 108559 PARAMETER Experiment Name: Zm_5mM_NO_P Parameter: Age (day) Value: 8
  misc_feature: MA Experiment 108559 PARAMETER Experiment Name: Zm_5mM_NO_P Parameter: Organism Value: Zea mays
  misc_feature: MA Experiment 108559 PARAMETER Experiment Name: Zm_5mM_NO_P Parameter: Plant Line Value: 35A19
  misc_feature: MA Experiment 108559 PARAMETER Experiment Name: Zm_5mM_NO_P Parameter: Timepoint (hr) Value: 12
  misc_feature: MA Experiment 108559 PARAMETER Experiment Name: Zm_5mM_NO_P Parameter: Tissue Value: Aerial
  misc_feature: MA Experiment 108559 PARAMETER Experiment Name: Zm_5mM_NO_P Parameter: Treatment Value: 5mM NO vs. No Treatment
  misc_feature: MA Experiment ID: 20000477 Result: Up-regulated in Transcription
  misc_feature: MA Experiment 20000477 PARAMETER Experiment Name: Zm_5mM_SA_P Parameter: Age (day) Value: 10
  misc_feature: MA Experiment 20000477 PARAMETER Experiment Name: Zm_5mM_SA_P Parameter: Organism Value: Zea mays
  misc_feature: MA Experiment 20000477 PARAMETER Experiment Name: Zm_5mM_SA_P Parameter: Plant Line Value: 35A19
  misc_feature: MA Experiment 20000477 PARAMETER Experiment Name: Zm_5mM_SA_P Parameter: Timepoint (hr) Value: 48
  misc_feature: MA Experiment 20000477 PARAMETER Experiment Name: Zm_5mM_SA_P Parameter: Tissue Value: Aerial
  misc_feature: MA Experiment 20000477 PARAMETER Experiment Name: Zm_5mM_SA_P Parameter: Treatment Value: 5mM SA vs. No Treatment
actagagggtcatggcatggggcatggatggactggtgcgtgtgatcctgatcttgccgagtgcaatcgagatccgtgccagcccgtccatactgcggtggcgtggcggtgacgtgccggcgcggcgcggcgcggcgccgataagaggtagagagaggaaaaaaaagaacaatcaattctccagaccctccccggcaaccgcgtccggccgtccgcttccgtttccttggataaccacgacgcccgccggcaagcgaaagcgaagcgagccaacccagccatggagaaggcgatcgatcggcagcgggtcctcctggcgcacctcctcccctccccctccgccgcctcctcgcagcctcaccttgcggcgtcggcgtgcgcggccggggacagcgccgcctaccagaggtcctcctccttcggggacgatgtcgtcgtcgtcgctgcctacaggacgccgatatgcaaggccaagcgaggaggcttcaaggacacctacccagaggacctcctcactgttgttctcaaggctgttctggacaacactagaatcaatccagctgacatcggtgacatcgtcgttgggacggtgctcggccctggttcccagcgtgcaaacgagtgcaggatggctgcgttgtttgctggcttccctgaaaccgtccctgttagaactgtcaaccgccagtgttcatctgggctacaggcagtagccgatgtcgcagctgctataaaggctggttactatgacatagggattggtgctggtttggaatccatgtccataaattccattgcttgggaaggacaagttaacccaaaaataagcgcattccagaaagcacaggattgtcttctgcccatgggaattacgtctgaaaatgttgcccatcgatatggtgtaaccaggcaagagcaagatcaggccgccgctgagtctcataggagagctgctgcagccacggcctctggaaaattcaaggatgagatcgtcccggtgccaacaaagatcgttgatcctaaaactggagaggagaaggaagttgtgatatcagttgatgatgggattaggccagggaccacagcatctggattggcgaaactgaaaccagtttttaaaaaggatggaactacaactgcaggcaattccagtcaagtgagtgatggtgctggagctgttcttctcatgaaaagatctgtggctctgaagaaagggctgcccattcttggtgttttcaggagctttgcggctgttggagtggatccagctgttatgggtgttggtcctgctgtggccattcctgctgctgtgaagtctgcaggccttgagattggcgacattgatctgtttgaactgaatgaggccttcgcctctcagtttgtctattgctgcaacaagttggggctggaccgttctaaagtaaatgtaaatggaggcgcgattgcccttggacaccctctgggtgcaacaggtgcccggtgtgtggctactcttctaaatgaaatgaagcgccggggcagagactgcagatttggtgttgtcaccatgtgtatcggatctggaatgggggcagcagctgtgttcgagcggggagacgcggtggatggactctccaacgtgagggacatgcaggcacataattttctgtctaaggatgcgaagtagaggcgcagaaaaaccatccatcctagagcagcataagcctgctgcatttgtaatatattcgaaatccgtatcttttttcttcacaagcactactctatatacgatgaataaaagggcgacaatacagtgtc

SEQ ID NO: 5010 - protein, 461 aa, Zea mays subsp. mays
  peptide (1)..(461): Ceres Seq. ID no. 12349028
  misc_feature (48)..(306): Pfam Name: Thiolase, N-terminal domain Pfam Description: Thiolase, N-terminal domain
  misc_feature (1)..(448): Homolog of NCBI NO: 29367431 NR Description: 3-ketoacyl-CoA thiolase-like protein [Oryza
  misc_feature (1)..(461): Homolog of NCBI NO: 15225798 NR Description: 3-ketoacyl-CoA thiolase; protein id: At2g33150.1, by cDNA: 36488., supported by cDNA: gi_11993852, supported by
  misc_feature (1)..(461): Homolog of NCBI NO: 7433647 NR Description: acetyl-CoA C-acyltransferase (EC 2.3.1.16)
  misc_feature (1)..(461): Homolog of NCBI NO: 393707 NR Description: 3-ketoacyl-CoA thiolase; acetyl-CoA
  misc_feature (1)..(461): Homolog of NCBI NO: 7433644 NR Description: acetyl-CoA C-acyltransferase (EC 2.3.1.16)
  misc_feature (1)..(460): Homolog of NCBI NO: 37535022 NR Description: putative thiolase [Oryza sativa (japonica
  misc_feature (1)..(461): Homolog of NCBI NO: 421810 NR Description: acetyl-CoA C-acyltransferase (EC 2.3.1.16)
  misc_feature (1)..(448): Homolog of NCBI NO: 15219797 NR Description: putative acetyl-CoA acyltransferase; protein id:
  misc_feature (1)..(448): Homolog of NCBI NO: 21537268 NR Description: putative acetyl-CoA acyltransferase [Arabidopsis
  misc_feature (1)..(425): Homolog of NCBI NO: 1129145 NR Description: 3-ketoacyl-CoA thiolase B; acetyl-CoA
MEKAIDRQRVLLAHLLPSPSAASSQPHLAASACAAGDSAAYQRSSSFGDDVVVVAAYRTPICKAKRGGFKDTYPEDLLTVVLKAVLDNTRINPADIGDIVVGTVLGPGSQRANECRMAALFAGFPETVPVRTVNRQCSSGLQAVADVAAAIKAGYYDIGIGAGLESMSINSIAWEGQVNPKISAFQKAQDCLLPMGITSENVAHRYGVTRQEQDQAAAESHRRAAAATASGKFKDEIVPVPTKIVDPKTGEEKEVVISVDDGIRPGTTASGLAKLKPVFKKDGTTTAGNSSQVSDGAGAVLLMKRSVALKKGLPILGVFRSFAAVGVDPAVMGVGPAVAIPAAVKSAGLEIGDIDLFELNEAFASQFVYCCNKLGLDRSKVNVNGGAIALGHPLGATGARCVATLLNEMKRRGRDCRFGVVTMCIGSGMGAAAVFERGDAVDGLSNVRDMQAHNFLSKDAK

SEQ ID NO: 5011 - protein, 345 aa, Zea mays subsp. mays
  peptide (1)..(345): Ceres Seq. ID no. 12349029
  misc_feature (1)..(190): Pfam Name: Thiolase, N-terminal domain Pfam Description: Thiolase, N-terminal domain
  misc_feature (1)..(332): Homolog of NCBI NO: 29367431 NR Description: 3-ketoacyl-CoA thiolase-like protein [Oryza
  misc_feature (1)..(345): Homolog of NCBI NO: 15225798 NR Description: 3-ketoacyl-CoA thiolase; protein id: At2g33150.1, by cDNA: 36488., supported by cDNA: gi_11993852, supported by
  misc_feature (1)..(345): Homolog of NCBI NO: 7433647 NR Description: acetyl-CoA C-acyltransferase (EC 2.3.1.16)
  misc_feature (1)..(345): Homolog of NCBI NO: 393707 NR Description: 3-ketoacyl-CoA thiolase; acetyl-CoA
  misc_feature (1)..(345): Homolog of NCBI NO: 7433644 NR Description: acetyl-CoA C-acyltransferase (EC 2.3.1.16)
  misc_feature (1)..(344): Homolog of NCBI NO: 37535022 NR Description: putative thiolase [Oryza sativa (japonica
  misc_feature (1)..(345): Homolog of NCBI NO: 421810 NR Description: acetyl-CoA C-acyltransferase (EC 2.3.1.16)
  misc_feature (1)..(332): Homolog of NCBI NO: 15219797 NR Description: putative acetyl-CoA acyltransferase; protein id:
  misc_feature (1)..(332): Homolog of NCBI NO: 21537268 NR Description: putative acetyl-CoA acyltransferase [Arabidopsis
  misc_feature (1)..(309): Homolog of NCBI NO: 1129145 NR Description: 3-ketoacyl-CoA thiolase B; acetyl-CoA
MAALFAGFPETVPVRTVNRQCSSGLQAVADVAAAIKAGYYDIGIGAGLESMSINSIAWEGQVNPKISAFQKAQDCLLPMGITSENVAHRYGVTRQEQDQAAAESHRRAAAATASGKFKDEIVPVPTKIVDPKTGEEKEVVISVDDGIRPGTTASGLAKLKPVFKKDGTTTAGNSSQVSDGAGAVLLMKRSVALKKGLPILGVFRSFAAVGVDPAVMGVGPAVAIPAAVKSAGLEIGDIDLFELNEAFASQFVYCCNKLGLDRSKVNVNGGAIALGHPLGATGARCVATLLNEMKRRGRDCRFGVVTMCIGSGMGAAAVFERGDAVDGLSNVRDMQAHNFLSKDAK

SEQ ID NO: 5012 - protein, 295 aa, Zea mays subsp. mays
  peptide (1)..(295): Ceres Seq. ID no. 12349030
  misc_feature (1)..(140): Pfam Name: Thiolase, N-terminal domain Pfam Description: Thiolase, N-terminal domain
  misc_feature (1)..(259): Homolog of NCBI NO: 1129145 NR Description: 3-ketoacyl-CoA thiolase B; acetyl-CoA
  misc_feature (1)..(282): Homolog of NCBI NO: 29367431 NR Description: 3-ketoacyl-CoA thiolase-like protein [Oryza
  misc_feature (1)..(295): Homolog of NCBI NO: 15225798 NR Description: 3-ketoacyl-CoA thiolase; protein id: At2g33150.1, by cDNA: 36488., supported by cDNA: gi_11993852, supported by
  misc_feature (1)..(295): Homolog of NCBI NO: 7433647 NR Description: acetyl-CoA C-acyltransferase (EC 2.3.1.16)
  misc_feature (1)..(295): Homolog of NCBI NO: 393707 NR Description: 3-ketoacyl-CoA thiolase; acetyl-CoA
  misc_feature (1)..(295): Homolog of NCBI NO: 7433644 NR Description: acetyl-CoA C-acyltransferase (EC 2.3.1.16)
  misc_feature (1)..(294): Homolog of NCBI NO: 37535022 NR Description: putative thiolase [Oryza sativa (japonica
  misc_feature (1)..(295): Homolog of NCBI NO: 421810 NR Description: acetyl-CoA C-acyltransferase (EC 2.3.1.16)
  misc_feature (1)..(282): Homolog of NCBI NO: 15219797 NR Description: putative acetyl-CoA acyltransferase; protein id:
  misc_feature (1)..(282): Homolog of NCBI NO: 21537268 NR Description: putative acetyl-CoA acyltransferase [Arabidopsis
MSINSIAWEGQVNPKISAFQKAQDCLLPMGITSENVAHRYGVTRQEQDQAAAESHRRAAAATASGKFKDEIVPVPTKIVDPKTGEEKEVVISVDDGIRPGTTASGLAKLKPVFKKDGTTTAGNSSQVSDGAGAVLLMKRSVALKKGLPILGVFRSFAAVGVDPAVMGVGPAVAIPAAVKSAGLEIGDIDLFELNEAFASQFVYCCNKLGLDRSKVNVNGGAIALGHPLGATGARCVATLLNEMKRRGRDCRFGVVTMCIGSGMGAAAVFERGDAVDGLSNVRDMQAHNFLSKDAK

SEQ ID NO: 5013 - DNA, 1269 bp, Zea mays subsp. mays
  misc_feature (1)..(1269): Ceres Seq. ID no. 12406782
  misc_feature: MA Experiment ID: 108527 Result: Up-regulated in Transcription
  misc_feature: MA Experiment 108527 PARAMETER Experiment Name: Zm_5mM_NO_P Parameter: Age (day) Value: 8
  misc_feature: MA Experiment 108527 PARAMETER Experiment Name: Zm_5mM_NO_P Parameter: Organism Value: Zea mays
  misc_feature: MA Experiment 108527 PARAMETER Experiment Name: Zm_5mM_NO_P Parameter: Plant Line Value: 35A19
  misc_feature: MA Experiment 108527 PARAMETER Experiment Name: Zm_5mM_NO_P Parameter: Timepoint (hr) Value: 6
  misc_feature: MA Experiment 108527 PARAMETER Experiment Name: Zm_5mM_NO_P Parameter: Tissue Value: Aerial
  misc_feature: MA Experiment 108527 PARAMETER Experiment Name: Zm_5mM_NO_P Parameter: Treatment Value: 5mM NO vs. No Treatment
  misc_feature: MA Experiment ID: 108543 Result: Down-regulated in Transcription
  misc_feature: MA Experiment ID: 108544 Result: Up-regulated in Transcription
  misc_feature: MA Experiment ID: 20000479 Result: Up-regulated in Transcription
  misc_feature: MA Experiment 20000479 PARAMETER Experiment Name: Zm_Drought_P Parameter: Age (day) Value: 10
  misc_feature: MA Experiment 20000479 PARAMETER Experiment Name: Zm_Drought_P Parameter: Organism Value: Zea mays
  misc_feature: MA Experiment 20000479 PARAMETER Experiment Name: Zm_Drought_P Parameter: Plant Line Value: 35A19
  misc_feature: MA Experiment 20000479 PARAMETER Experiment Name: Zm_Drought_P Parameter: Timepoint (hr) Value: 48
  misc_feature: MA Experiment 20000479 PARAMETER Experiment Name: Zm_Drought_P Parameter: Tissue Value: Aerial
  misc_feature: MA Experiment 20000479 PARAMETER Experiment Name: Zm_Drought_P Parameter: Treatment Value: Drought vs. No Drought
  misc_feature: MA Experiment ID: 20000480 Result: Up-regulated in Transcription
  misc_feature: MA Experiment 20000480 PARAMETER Experiment Name: Zm_Drought_P Parameter: Age (day) Value: 11
  misc_feature: MA Experiment 20000480 PARAMETER Experiment Name: Zm_Drought_P Parameter: Organism Value: Zea mays
  misc_feature: MA Experiment 20000480 PARAMETER Experiment Name: Zm_Drought_P Parameter: Plant Line Value: 35A19
  misc_feature: MA Experiment 20000480 PARAMETER Experiment Name: Zm_Drought_P Parameter: Timepoint (hr) Value: 72
  misc_feature: MA Experiment 20000480 PARAMETER Experiment Name: Zm_Drought_P Parameter: Tissue Value: Aerial
  misc_feature: MA Experiment 20000480 PARAMETER Experiment Name: Zm_Drought_P Parameter: Treatment Value: Drought vs. No Drought
  misc_feature: MA Experiment ID: 20000630 Result: Up-regulated in Transcription
  misc_feature: MA Experiment 20000630 PARAMETER Experiment Name: Zm_Herbicide-Treatments_P Parameter: Timepoint (hr) Value: 4
  misc_feature: MA Experiment 20000630 PARAMETER Experiment Name: Zm_Herbicide-Treatments_P Parameter: Tissue Value: Aerial
  misc_feature: MA Experiment 20000630 PARAMETER Experiment Name: Zm_Herbicide-Treatments_P Parameter: Treatment Value: Roundup vs. No Treatment
accattccgattcggcgatttgattcccagccttccccctgctctgcccacctcccatttcccgcccctctttcctactacaataaaaatatccaaaattcccgaacagagtcacccccgcttctcagaaacccaattcccgttcccgatcctcacctcaaccccgcgccgccccctccccaccaccctcgccatggtcagcgccgccgcctcgccgccgccgtccgggaagccgacgcaggacgagctgaagcgcttggcggcgcaccgcgcggtggagctcgtggagccctgcatgacgctgggcctgggcacgggctccacggcggcgcacgcgctggaccgcctgggcgacctcctccgcgcgggcgcgctgccgggggtgtccggcgtgccgacctcgctcaagacggaggcgcacgcggcgcgcgtcggcatcccgctgctcccgctcgacgccgccagcatcgcgctgtccatcgacggcgccgacgaggtcgacccggacctcaacctcgtcaagggccgcggcggctcgctgctccgcgagaagatggtcgagggcgccggcgcccgcttcgccgtcatcgtcgacgagtccaagctcgtgccgcgcctcggctgcaccggcgccgtccccgtcgaggtcgtcccgttcggcgcgccccacacgctgggcctcatccgcggcctcttccacggcctgcccggcttccacgccaggctcaggaccaccaccgtccccgagggggagcaaggctccgagcagcagcccttcgtcaccgacaacggcaactacatcgtcgagatgttcttcgacggcggcatccgcggcgacctgcgcgacatcagcgaccgcctgctccgcataaccggcgtcgtcgagcacggcatgttcctgggcatggccaccgtcgccattgtcgccaagaaggacggcacggtcgcagtcatggaaaggaagtagttagtctacaattcatcgaagcagccatcgcctgctccccatcaacagcgtgttcctctacgtggccatcatcaccaccgtcgccaacggcgacgacaataagtaataattctgcatgtagcctgtgtctgtgcaatatccagctactcttatctaaagttggagctgttgtcgtgtccgtgcgtcatcctcccatactatactgagtgtctgctgattactatggagtatgttaatcatcatcatcatccttatgttatcatcacaaaccttgttatcagtgattctcacgctattttact

SEQ ID NO: 5014 - protein, 390 aa, Zea mays subsp. mays
  peptide (1)..(390): Ceres Seq. ID no. 12406783
  misc_feature (122)..(321): Pfam Name: HlyD family secretion protein Pfam Description: HlyD family secretion protein
  misc_feature (43)..(357): Homolog of NCBI NO: 29247944 NR Description: GLP_26_54603_52153 [Giardia lamblia ATCC 50803]
  misc_feature (3)..(362): Homolog of NCBI NO: 6649242 NR Description: splicing coactivator subunit SRm300 [Homo sapiens]
  misc_feature (65)..(339): Homolog of NCBI NO: 29247944 NR Description: GLP_26_54603_52153 [Giardia lamblia ATCC 50803]
TIPIRRFDSQPSPCSAHLPFPAPLSYYNKNIQNSRTESPPLLRNPIPVPDPHLNPAPPPPHHPRHGQRRRLAAAVREADAGRAEALGGAPRGGARGALHDAGPGHGLHGGARAGPPGRPPPRGRAAGGVRRADLAQDGGARGARRHPAAPARRRQHRAVHRRRRRGRPGPQPRQGPRRLAAPREDGRGRRRPLRRHRRRVQARAAPRLHRRRPRRGRPVRRAPHAGPHPRPLPRPARLPRQAQDHHRPRGGARLRAAALRHRQRQLHRRDVLRRRHPRRPARHQRPPAPHNRRRRARHVPGHGHRRHCRQEGRHGRSHGKEVVSLQFIEAAIACSPSTACSSTWPSSPPSPTATTISNNSACSLCLCNIQLLLSKVGAVVVSVRHPPILY

SEQ ID NO: 5015 - protein, 321 aa, Zea mays subsp. mays
  peptide (1)..(321): Ceres Seq. ID no. 12406784
  misc_feature (128)..(313): Pfam Name: Ribose 5-phosphate isomerase A (phosphoriboisomerase A) Pfam Description: Ribose 5-phosphate isomerase A
  misc_feature (58)..(321): Homolog of NCBI NO: 38347196 NR Description: OSJNBa0023J03.8 [Oryza sativa (japonica
  misc_feature (58)..(320): Homolog of NCBI NO: 21592672 NR Description: putative ribose 5-phosphate isomerase
  misc_feature (58)..(320): Homolog of NCBI NO: 15223936 NR Description: putative ribose 5-phosphate isomerase; protein At1g71100.1, supported by cDNA: 3116., supported by cDNA: [Arabidopsis thaliana] >gi|25329397|pir||E96735 hypothetical
  misc_feature (58)..(320): Homolog of NCBI NO: 13430836 NR Description: putative ribose 5-phosphate isomerase
  misc_feature (62)..(313): Homolog of NCBI NO: 15226223 NR Description: putative ribose 5-phosphate isomerase; protein At2g01290.1, supported by cDNA: gi_15809809, supported by cDNA:
  misc_feature (57)..(313): Homolog of NCBI NO: 18654317 NR Description: ribose-5-phosphate isomerase [Spinacia oleracea]
  misc_feature (63)..(313): Homolog of NCBI NO: 34393835 NR Description: putative ribose-5-phosphate isomerase [Oryza
  misc_feature (67)..(313): Homolog of NCBI NO: 34393836 NR Description: putative ribose-5-phosphate isomerase [Oryza
  misc_feature (79)..(320): Homolog of NCBI NO: 15229349 NR Description: putative ribose 5-phosphate isomerase; protein At3g04790.1, supported by cDNA: 6349., supported by cDNA:
  misc_feature (79)..(320): Homolog of NCBI NO: 21594002 NR Description: putative ribose 5-phosphate isomerase
PFRFGDLIPSLPPALPTSHFPPLFPTTIKISKIPEQSHPRFSETQFPFPILTSTPRRPLPTTLAMVSAAASPPPSGKPTQDELKRLAAHRAVELVEPCMTLGLGTGSTAAHALDRLGDLLRAGALPGVSGVPTSLKTEAHAARVGIPLLPLDAASIALSIDGADEVDPDLNLVKGRGGSLLREKMVEGAGARFAVIVDESKLVPRLGCTGAVPVEVVPFGAPHTLGLIRGLFHGLPGFHARLRTTTVPEGEQGSEQQPFVTDNGNYIVEMFFDGGIRGDLRDISDRLLRITGVVEHGMFLGMATVAIVAKKDGTVAVMERK

SEQ ID NO: 5016 - protein, 257 aa, Zea mays subsp. mays
  peptide (1)..(257): Ceres Seq. ID no. 12406785
  misc_feature (64)..(249): Pfam Name: Ribose 5-phosphate isomerase A (phosphoriboisomerase A) Pfam Description: Ribose 5-phosphate isomerase A
  misc_feature (1)..(257): Homolog of NCBI NO: 38347196 NR Description: OSJNBa0023J03.8 [Oryza sativa (japonica
  misc_feature (1)..(256): Homolog of NCBI NO: 21592672 NR Description: putative ribose 5-phosphate isomerase
  misc_feature (1)..(256): Homolog of NCBI NO: 15223936 NR Description: putative ribose 5-phosphate isomerase; protein At1g71100.1, supported by cDNA: 3116., supported by cDNA: [Arabidopsis thaliana] >gi|25329397|pir||E96735 hypothetical
  misc_feature (1)..(256): Homolog of NCBI NO: 13430836 NR Description: putative ribose 5-phosphate isomerase
  misc_feature (1)..(249): Homolog of NCBI NO: 15226223 NR Description: putative ribose 5-phosphate isomerase; protein At2g01290.1, supported by cDNA: gi_15809809, supported by cDNA:
  misc_feature (1)..(249): Homolog of NCBI NO: 18654317 NR Description: ribose-5-phosphate isomerase [Spinacia oleracea]
  misc_feature (1)..(249): Homolog of NCBI NO: 34393835 NR Description: putative ribose-5-phosphate isomerase [Oryza
  misc_feature (3)..(249): Homolog of NCBI NO: 34393836 NR Description: putative ribose-5-phosphate isomerase [Oryza
  misc_feature (15)..(256): Homolog of NCBI NO: 15229349 NR Description: putative ribose 5-phosphate isomerase; protein At3g04790.1, supported by cDNA: 6349., supported by cDNA:
  misc_feature (15)..(256): Homolog of NCBI NO: 21594002 NR Description: putative ribose 5-phosphate isomerase
MVSAAASPPPSGKPTQDELKRLAAHRAVELVEPCMTLGLGTGSTAAHALDRLGDLLRAGALPGVSGVPTSLKTEAHAARVGIPLLPLDAASIALSIDGADEVDPDLNLVKGRGGSLLREKMVEGAGARFAVIVDESKLVPRLGCTGAVPVEVVPFGAPHTLGLIRGLFHGLPGFHARLRTTTVPEGEQGSEQQPFVTDNGNYIVEMFFDGGIRGDLRDISDRLLRITGVVEHGMFLGMATVAIVAKKDGTVAVMERK

SEQ ID NO: 5017 - DNA, 1482 bp, Zea mays subsp. mays
  misc_feature (1)..(1482): Ceres Seq. ID no. 12409738
  misc_feature: MA Experiment ID: 108535 Result: Up-regulated in Transcription
  misc_feature: MA Experiment 108535 PARAMETER Experiment Name: Zm_Meristem_P Parameter: Age (day) Value: 8
  misc_feature: MA Experiment 108535 PARAMETER Experiment Name: Zm_Meristem_P Parameter: Organism Value: Zea mays
  misc_feature: MA Experiment 108535 PARAMETER Experiment Name: Zm_Meristem_P Parameter: Plant Line Value: 35A19
  misc_feature: MA Experiment 108535 PARAMETER Experiment Name: Zm_Meristem_P Parameter: Tissue Value: Root Meristem vs. Above Root Meristem
  misc_feature: MA Experiment ID: 20000108 Result: Up-regulated in Transcription
  misc_feature: MA Experiment 20000108 PARAMETER Experiment Name: Zm_Root-Tips_P Parameter: Age (day) Value: 12
  misc_feature: MA Experiment 20000108 PARAMETER Experiment Name: Zm_Root-Tips_P Parameter: Organism Value: Zea mays
  misc_feature: MA Experiment 20000108 PARAMETER Experiment Name: Zm_Root-Tips_P Parameter: Tissue Value: Root tips vs. Root mid region    35
  misc_feature: MA Experiment 20000108 PARAMETER Experiment Name: Zm_Root-Tips_P Parameter: Tissue Value: Root tips vs. Root mid region   Sequence Listing-Misc Features (4)
  misc_feature: MA Experiment ID: 20000487 Result: Up-regulated in Transcription
  misc_feature: MA Experiment 20000487 PARAMETER Experiment Name: Zm_50mM_NH4NO3_L_to_H_P Parameter: Organism Value: Zea mays
  misc_feature: MA Experiment 20000487 PARAMETER Experiment Name: Zm_50mM_NH4NO3_L_to_H_P Parameter: Timepoint (hr) Value: 4
  misc_feature: MA Experiment 20000487 PARAMETER Experiment Name: Zm_50mM_NH4NO3_L_to_H_P Parameter: Tissue Value: Leaves
  misc_feature: MA Experiment 20000487 PARAMETER Experiment Name: Zm_50mM_NH4NO3_L_to_H_P Parameter: Treatment Value: 50mM NH4NO3 vs. 100mM Mannitol
  misc_feature: MA Experiment ID: 20000488 Result: Up-regulated in Transcription
  misc_feature: MA Experiment 20000488 PARAMETER Experiment Name: Zm_50mM_NH4NO3_L_to_H_P Parameter: Organism Value: Zea mays
  misc_feature: MA Experiment 20000488 PARAMETER Experiment Name: Zm_50mM_NH4NO3_L_to_H_P Parameter: Timepoint (hr) Value: 8
  misc_feature: MA Experiment 20000488 PARAMETER Experiment Name: Zm_50mM_NH4NO3_L_to_H_P Parameter: Tissue Value: Leaves
  misc_feature: MA Experiment 20000488 PARAMETER Experiment Name: Zm_50mM_NH4NO3_L_to_H_P Parameter: Treatment Value: 50mM NH4NO3 vs. 100mM Mannitol
  misc_feature: MA Experiment ID: 20000492 Result: Up-regulated in Transcription
  misc_feature: MA Experiment 20000492 PARAMETER Experiment Name: Zm_Hybrid_Seed_Dev_P Parameter: DAP Value: 12
  misc_feature: MA Experiment 20000492 PARAMETER Experiment Name: Zm_Hybrid_Seed_Dev_P Parameter: Organism Value: Zea mays
  misc_feature: MA Experiment 20000492 PARAMETER Experiment Name: Zm_Hybrid_Seed_Dev_P Parameter: Plant Line Value: 35A19
  misc_feature: MA Experiment 20000492 PARAMETER Experiment Name: Zm_Hybrid_Seed_Dev_P Parameter: Tissue Value: Fert Kernel vs. Unfert Floret
cccaatccaagcatccattcctgaattcctccctggccagcggcgccgccaccgccatgaaccgcgttcacagcgaggctgccgctgctgcgaaggagcagcgcaagaacgacaagagggagaagaggaagaagcacaaggatgccaaggaggatgactgcggcgcctcgatggccgaggaagaagcacccaaagagaagaagcagaagcagaagcagaggaaggataaggacgagcgggaggagaagaaaaagctgaagccgacggttagcatagccgttgccggctccatcattgacaacgcccagtccctcgagctcgccaccctcctggctggtcagatcgctcgcgccgccaccgtctttcgcatagacgaggtcgtcgtctttgacagtactcccgcggcggagaacggcagcgccggtgatggtgaagagagcggcgcgcggttccttgttcggattttggagtatctggaaactccacagtacctccgccgccgcctctttccgatgcacaagaacctgaagtttgtgggactgcttccaccgctcgatgcaccacaccatgtgcgcaagcacgaatggtccgagtttcgtgaaggtgtaacattggaaagtgatccctcaaaggggactcttgttgatgtcggattaagtaagaatgttctggttgaacaaaaactagaaccaggcaaaagagttactgtagccatgggaacaaaccgtgacctaacgacagcttgcataaggaaagtcgtccccccttcgacacccagggaacagatgggatcttattggggctacaaagtccgttatacttcaaatttaagtggtgttttcaaaaattccccattcaaggaagaatacgaccacatcattggcacctcagagcatggacaaatagttaattcttccgagcttaccttacctacttttaggcacctactgattgcatttggtggacttgctggtttggaagaaagcattgaagaagatacaaacttgaagggtaaacgtgcagatgatgtattcacatcttatttcaatacatgccccaaccaagggagcagaacaataagaacagaggaggcacttctcatttcccttcaatacttccaagatcccattaggcgagcggaacagaaattgtagaagggaatacagaaaactgcaaatctagccatggccaacaagttccagttgtaatagtggagttttctcactgagtatcttgacccttcatgtatgcgttggtgtcattggagccaagaggttgtgagccatcgaggacattttgacacaaccatttcagtttagaaaatttgatgcggagctgacttcagtggaagagtgttagcttgccatttcagtgtatccaattgttgtccactgtagtctatatcggtgtttcatacctttgaccctgtactagaacgacacggaggatcactgttaacaccagagcgtcatgcatgccttg

SEQ ID NO: 5018 - protein, 383 aa, Zea mays subsp. mays
  peptide (1)..(383): Ceres Seq. ID no. 12409739
  misc_feature (88)..(373): Pfam Name: Uncharacterized ACR, COG2106 Pfam Description: Uncharacterized ACR, COG2106
  misc_feature (52)..(362): Homolog of NCBI NO: 38346841 NR Description: OSJNBa0091C12.1 [Oryza sativa (japonica
  misc_feature (98)..(383): Homolog of NCBI NO: 15239710 NR Description: putative protein; protein id: At5g19300.1
  misc_feature (33)..(108): Homolog of NCBI NO: 15239710 NR Description: putative protein; protein id: At5g19300.1
  misc_feature (12)..(379): Homolog of NCBI NO: 34783965 NR Description: Unknown (protein for IMAGE:6142267) [Homo sapiens]
  misc_feature (35)..(379): Homolog of NCBI NO: 7512808 NR Description: hypothetical protein DKFZp566D143.1 - human
  misc_feature (35)..(379): Homolog of NCBI NO: 38679912 NR Description: hypothetical protein HSPC109 [Homo sapiens]
  misc_feature (35)..(379): Homolog of NCBI NO: 39794258 NR Description: Unknown (protein for MGC:75017) [Homo sapiens]
  misc_feature (59)..(373): Homolog of NCBI NO: 27369948 NR Description: DNA segment, Chr 2, Wayne State University 81, [Mus musculus] >gi|26337855|dbj|BAC32613.1| unnamed protein
  misc_feature (32)..(377): Homolog of NCBI NO: 21428350 NR Description: GM02932p [Drosophila melanogaster]
  misc_feature (32)..(377): Homolog of NCBI NO: 20129839 NR Description: CG12128-PA [Drosophila melanogaster]
QSKHPFLNSSLASGAATAMNRVHSEAAAAAKEQRKNDKREKRKKHKDAKEDDCGASMAEEEAPKEKKQKQKQRKDKDEREEKKKLKPTVSIAVAGSIIDNAQSLELATLLAGQIARAATVFRIDEVVVFDSTPAAENGSAGDGEESGARFLVRILEYLETPQYLRRRLFPMHKNLKFVGLLPPLDAPHHVRKHEWSEFREGVTLESDPSKGTLVDVGLSKNVLVEQKLEPGKRVTVAMGTNRDLTTACIRKVVPPSTPREQMGSYWGYKVRYTSNLSGVFKNSPFKEEYDHIIGTSEHGQIVNSSELTLPTFRHLLIAFGGLAGLEESIEEDTNLKGKRADDVFTSYFNTCPNQGSRTIRTEEALLISLQYFQDPIRRAEQKL

SEQ ID NO: 5019 - protein, 365 aa, Zea mays subsp. mays
  peptide (1)..(365): Ceres Seq. ID no. 12409740
  misc_feature (70)..(355): Pfam Name: Uncharacterized ACR, COG2106 Pfam Description: Uncharacterized ACR, COG2106
  misc_feature (34)..(344): Homolog of NCBI NO: 38346841 NR Description: OSJNBa0091C12.1 [Oryza sativa (japonica
  misc_feature (80)..(365): Homolog of NCBI NO: 15239710 NR Description: putative protein; protein id: At5g19300.1
  misc_feature (15)..(90): Homolog of NCBI NO: 15239710 NR Description: putative protein; protein id: At5g19300.1
  misc_feature (1)..(361): Homolog of NCBI NO: 34783965 NR Description: Unknown (protein for IMAGE:6142267) [Homo sapiens]
  misc_feature (17)..(361): Homolog of NCBI NO: 7512808 NR Description: hypothetical protein DKFZp566D143.1 - human
  misc_feature (17)..(361): Homolog of NCBI NO: 38679912 NR Description: hypothetical protein HSPC109 [Homo sapiens]
  misc_feature (17)..(361): Homolog of NCBI NO: 39794258 NR Description: Unknown (protein for MGC:75017) [Homo sapiens]
  misc_feature (41)..(355): Homolog of NCBI NO: 27369948 NR Description: DNA segment, Chr 2, Wayne State University 81, [Mus musculus] >gi|26337855|dbj|BAC32613.1| unnamed protein
  misc_feature (14)..(359): Homolog of NCBI NO: 21428350 NR Description: GM02932p [Drosophila melanogaster]
  misc_feature (14)..(359): Homolog of NCBI NO: 20129839 NR Description: CG12128-PA [Drosophila melanogaster]
MNRVHSEAAAAAKEQRKNDKREKRKKHKDAKEDDCGASMAEEEAPKEKKQKQKQRKDKDEREEKKKLKPTVSIAVAGSIIDNAQSLELATLLAGQIARAATVFRIDEVVVFDSTPAAENGSAGDGEESGARFLVRILEYLETPQYLRRRLFPMHKNLKFVGLLPPLDAPHHVRKHEWSEFREGVTLESDPSKGTLVDVGLSKNVLVEQKLEPGKRVTVAMGTNRDLTTACIRKVVPPSTPREQMGSYWGYKVRYTSNLSGVFKNSPFKEEYDHIIGTSEHGQIVNSSELTLPTFRHLLIAFGGLAGLEESIEEDTNLKGKRADDVFTSYFNTCPNQGSRTIRTEEALLISLQYFQDPIRRAEQKL

SEQ ID NO: 5020 - protein, 327 aa, Zea mays subsp. mays
  peptide (1)..(327): Ceres Seq. ID no. 12409741
  misc_feature (32)..(317): Pfam Name: Uncharacterized ACR, COG2106 Pfam Description: Uncharacterized ACR, COG2106
  misc_feature (1)..(306): Homolog of NCBI NO: 38346841 NR Description: OSJNBa0091C12.1 [Oryza sativa (japonica
  misc_feature (42)..(327): Homolog of NCBI NO: 15239710 NR Description: putative protein; protein id: At5g19300.1
  misc_feature (1)..(52): Homolog of NCBI NO: 15239710 NR Description: putative protein; protein id: At5g19300.1
  misc_feature (1)..(323): Homolog of NCBI NO: 34783965 NR Description: Unknown (protein for IMAGE:6142267) [Homo sapiens]
  misc_feature (1)..(323): Homolog of NCBI NO: 7512808 NR Description: hypothetical protein DKFZp566D143.1 - human
  misc_feature (1)..(323): Homolog of NCBI NO: 38679912 NR Description: hypothetical protein HSPC109 [Homo sapiens]
  misc_feature (1)..(323): Homolog of NCBI NO: 39794258 NR Description: Unknown (protein for MGC:75017) [Homo sapiens]
  misc_feature (3)..(317): Homolog of NCBI NO: 27369948 NR Description: DNA segment, Chr 2, Wayne State University 81, [Mus musculus] >gi|26337855|dbj|BAC32613.1| unnamed protein
  misc_feature (1)..(321): Homolog of NCBI NO: 21428350 NR Description: GM02932p [Drosophila melanogaster]
  misc_feature (1)..(321): Homolog of NCBI NO: 20129839 NR Description: CG12128-PA [Drosophila melanogaster]
MAEEEAPKEKKQKQKQRKDKDEREEKKKLKPTVSIAVAGSIIDNAQSLELATLLAGQIARAATVFRIDEVVVFDSTPAAENGSAGDGEESGARFLVRILEYLETPQYLRRRLFPMHKNLKFVGLLPPLDAPHHVRKHEWSEFREGVTLESDPSKGTLVDVGLSKNVLVEQKLEPGKRVTVAMGTNRDLTTACIRKVVPPSTPREQMGSYWGYKVRYTSNLSGVFKNSPFKEEYDHIIGTSEHGQIVNSSELTLPTFRHLLIAFGGLAGLEESIEEDTNLKGKRADDVFTSYFNTCPNQGSRTIRTEEALLISLQYFQDPIRRAEQKL

SEQ ID NO: 5021 - DNA, 1426 bp, Zea mays subsp. mays
  misc_feature (1)..(1426): Ceres Seq. ID no. 12358815
  misc_feature: MA Experiment ID: 108536 Result: Down-regulated in Transcription
  misc_feature: MA Experiment 108536 PARAMETER Experiment Name: Zm_Meristem_P Parameter: Age (day) Value: 8
  misc_feature: MA Experiment 108536 PARAMETER Experiment Name: Zm_Meristem_P Parameter: Organism Value: Zea mays
  misc_feature: MA Experiment 108536 PARAMETER Experiment Name: Zm_Meristem_P Parameter: Plant Line Value: 35A19
  misc_feature: MA Experiment 108536 PARAMETER Experiment Name: Zm_Meristem_P Parameter: Tissue Value: Shoot Meristem vs. Above Shoot Meristem
  misc_feature: MA Experiment ID: 108543 Result: Up-regulated in Transcription
  misc_feature: MA Experiment ID: 108544 Result: Up-regulated in Transcription
  misc_feature: MA Experiment ID: 108689 Result: Up-regulated in Transcription
  misc_feature: MA Experiment 108689 PARAMETER Experiment Name: Zm_Drought_Roots_P Parameter: Age (day) Value: 9
  misc_feature: MA Experiment 108689 PARAMETER Experiment Name: Zm_Drought_Roots_P Parameter: Organism Value: Zea mays
  misc_feature: MA Experiment 108689 PARAMETER Experiment Name: Zm_Drought_Roots_P Parameter: Plant Line Value: 35A19
  misc_feature: MA Experiment 108689 PARAMETER Experiment Name: Zm_Drought_Roots_P Parameter: Timepoint (hr) Value: 24
  misc_feature: MA Experiment 108689 PARAMETER Experiment Name: Zm_Drought_Roots_P Parameter: Tissue Value: Roots
  misc_feature: MA Experiment 108689 PARAMETER Experiment Name: Zm_Drought_Roots_P Parameter: Treatment Value: Drought vs. No Drought
aagacatcagcctctgttatcctggcccacacatcagcctccctggagtaagcgtggtagttgccactgccgtcccctccagaagtgcgatacagttcggattcagatcgcggccggtgcgaacccacgaaggcacgaacggtagaacccgaccgagcgcggcagcgcaaacctccgatccctgctgcgagcaagggatggcggcggcatgggcagtgctggcggcggtcctcgtcgcggcgcaggtggcgtctgcggcgccggtcacggcgccagcgttcctctgggcgcctaagaactacggattccgctctgatgatgctaaggaggtagtccattatcaaacaatctcaccaaagaacttagctaaatctgttcttgaggaaggtggctggtcaacctttatgtgttcaagggaggatactgagaagcatgttgatgttgccattgtttttattggctcaaagctacaatcatcagacatatcgaaagataagcaagttgatccagctttagcagatacattgaagctctccttcacagaatcagagttttctatggcattcccctacgtttccacatcagacgatgagaaactggaggagtcattgctatcaggcttcactgagaactgtaaaagtggttttggaagaaaccgtatcacctacacagacacgtgcgccgtgagtggccaagatctgaagacgtatcacaacatggatgctatcaatgacttggtagtgtcaggaagaaccaacccgagtggacagactgatgtaatcgtcttctgcagcggcgggttcgagaagttaggcaccacggaatcggaaggggagctgctttcccagcttgtcgacttgctgaagctgtctggggctagacacacgattctctacgcttcccagccatctggttatctactggagaacccttccggctcgccagtggctaggcaccttgcggagaggactaacggtacaaaaactggcctactgagcaaatgtgacggagagtgcctagtcaaatcaactcttcttgaaggaacctttgtcggaatagtgctccttatcatcttgatatcagggctcatgtgtatgatgggaatcgatactccctccaagtttgaagctccccaggagtcttgatctcccttcgaagcagaacccttgttttgttggtctgcactgtggatagatattattcagtttccccctttgaaagcgcctttcgtataattattattatttttttactgagccatctgttatttacgatgtgctcaaacttttgacaccaaacgaatgcatgtgtgtgaggcttgtgctgtgaccagacatagcattgcctccaggtgttttctgtgaataacctggaatttcaggtgggtactgtgcatcaaataaaaaagatgaaatcttgctgttgc

SEQ ID NO: 5022 - protein, 380 aa, Zea mays subsp. mays
  peptide (1)..(380): Ceres Seq. ID no. 12358816
  misc_feature (67)..(380): Homolog of NCBI NO: 24417230 NR Description: unknown [Arabidopsis thaliana]
  misc_feature (67)..(380): Homolog of NCBI NO: 30682651 NR Description: expressed protein [Arabidopsis thaliana] unknown protein [Arabidopsis thaliana] unknown protein [Arabidopsis thaliana]
  misc_feature (179)..(380): Homolog of NCBI NO: 21618303 NR Description: unknown [Arabidopsis thaliana]
  misc_feature (116)..(184): Homolog of NCBI NO: 25405838 NR Description: hypothetical protein T5A14.4 [imported] - thaliana >gi|4204260|gb|AAD10641.1| Hypothetical protein
DISLCYPGPHISLPGVSVVVATAVPSRSAIQFGFRSRPVRTHEGTNGRTRPSAAAQTSDPCCEQGMAAAWAVLAAVLVAAQVASAAPVTAPAFLWAPKNYGFRSDDAKEVVHYQTISPKNLAKSVLEEGGWSTFMCSREDTEKHVDVAIVFIGSKLQSSDISKDKQVDPALADTLKLSFTESEFSMAFPYVSTSDDEKLEESLLSGFTENCKSGFGRNRITYTDTCAVSGQDLKTYHNMDAINDLVVSGRTNPSGQTDVIVFCSGGFEKLGTTESEGELLSQLVDLLKLSGARHTILYASQPSGYLLENPSGSPVARHLAERTNGTKTGLLSKCDGECLVKSTLLEGTFVGIVLLIILISGLMCMMGIDTPSKFEAPQES

SEQ ID NO: 5023 - protein, 315 aa, Zea mays subsp. mays
  peptide (1)..(315): Ceres Seq. ID no. 12358817
  misc_feature (2)..(315): Homolog of NCBI NO: 24417230 NR Description: unknown [Arabidopsis thaliana]
  misc_feature (2)..(315): Homolog of NCBI NO: 30682651 NR Description: expressed protein [Arabidopsis thaliana] unknown protein [Arabidopsis thaliana] unknown protein [Arabidopsis thaliana]
  misc_feature (114)..(315): Homolog of NCBI NO: 21618303 NR Description: unknown [Arabidopsis thaliana]
  misc_feature (51)..(119): Homolog of NCBI NO: 25405838 NR Description: hypothetical protein T5A14.4 [imported] - thaliana >gi|4204260|gb|AAD10641.1| Hypothetical protein
MAAAWAVLAAVLVAAQVASAAPVTAPAFLWAPKNYGFRSDDAKEVVHYQTISPKNLAKSVLEEGGWSTFMCSREDTEKHVDVAIVFIGSKLQSSDISKDKQVDPALADTLKLSFTESEFSMAFPYVSTSDDEKLEESLLSGFTENCKSGFGRNRITYTDTCAVSGQDLKTYHNMDAINDLVVSGRTNPSGQTDVIVFCSGGFEKLGTTESEGELLSQLVDLLKLSGARHTILYASQPSGYLLENPSGSPVARHLAERTNGTKTGLLSKCDGECLVKSTLLEGTFVGIVLLIILISGLMCMMGIDTPSKFEAPQES

SEQ ID NO: 5024 - protein, 246 aa, Zea mays subsp. mays
  peptide (1)..(246): Ceres Seq. ID no. 12358818
  misc_feature (1)..(246): Homolog of NCBI NO: 24417230 NR Description: unknown [Arabidopsis thaliana]
  misc_feature (1)..(246): Homolog of NCBI NO: 30682651 NR Description: expressed protein [Arabidopsis thaliana] unknown protein [Arabidopsis thaliana] unknown protein [Arabidopsis thaliana]
  misc_feature (45)..(246): Homolog of NCBI NO: 21618303 NR Description: unknown [Arabidopsis thaliana]
  misc_feature (1)..(50): Homolog of NCBI NO: 25405838 NR Description: hypothetical protein T5A14.4 [imported] - thaliana >gi|4204260|gb|AAD10641.1| Hypothetical protein
MCSREDTEKHVDVAIVFIGSKLQSSDISKDKQVDPALADTLKLSFTESEFSMAFPYVSTSDDEKLEESLLSGFTENCKSGFGRNRITYTDTCAVSGQDLKTYHNMDAINDLVVSGRTNPSGQTDVIVFCSGGFEKLGTTESEGELLSQLVDLLKLSGARHTILYASQPSGYLLENPSGSPVARHLAERTNGTKTGLLSKCDGECLVKSTLLEGTFVGIVLLIILISGLMCMMGIDTPSKFEAPQES

SEQ ID NO: 5025 - DNA, 1323 bp, Zea mays subsp. mays
  misc_feature (1)..(1323): Ceres Seq. ID no. 12406959
  misc_feature: MA Experiment ID: 108528 Result: Up-regulated in Transcription
  misc_feature: MA Experiment 108528 PARAMETER Experiment Name: Zm_Imbibed_Seeds_P Parameter: Age (day) Value: 5 vs. 2
  misc_feature: MA Experiment 108528 PARAMETER Experiment Name: Zm_Imbibed_Seeds_P Parameter: Organism Value: Zea mays
  misc_feature: MA Experiment 108528 PARAMETER Experiment Name: Zm_Imbibed_Seeds_P Parameter: Plant Line Value: 35A19
  misc_feature: MA Experiment 108528 PARAMETER Experiment Name: Zm_Imbibed_Seeds_P Parameter: Tissue Value: Aerial vs. Embryo
  misc_feature: MA Experiment ID: 108530 Result: Up-regulated in Transcription
  misc_feature: MA Experiment 108530 PARAMETER Experiment Name: Zm_Imbibed_Seeds_P Parameter: Age (day) Value: 6 vs. 2
  misc_feature: MA Experiment 108530 PARAMETER Experiment Name: Zm_Imbibed_Seeds_P Parameter: Organism Value: Zea mays
  misc_feature: MA Experiment 108530 PARAMETER Experiment Name: Zm_Imbibed_Seeds_P Parameter: Plant Line Value: 35A19
  misc_feature: MA Experiment 108530 PARAMETER Experiment Name: Zm_Imbibed_Seeds_P Parameter: Tissue Value: Aerial vs. Embryo
  misc_feature: MA Experiment ID: 108534 Result: Up-regulated in Transcription
  misc_feature: MA Experiment 108534 PARAMETER Experiment Name: Zm_4deg_Cold_P Parameter: Age (hr) Value: 8
  misc_feature: MA Experiment 108534 PARAMETER Experiment Name: Zm_4deg_Cold_P Parameter: Organism Value: Zea mays
  misc_feature: MA Experiment 108534 PARAMETER Experiment Name: Zm_4deg_Cold_P Parameter: Plant Line Value: 35A19
  misc_feature: MA Experiment 108534 PARAMETER Experiment Name: Zm_4deg_Cold_P Parameter: Temperature (deg C) Value: 4 vs. 22
  misc_feature: MA Experiment 108534 PARAMETER Experiment Name: Zm_4deg_Cold_P Parameter: Timepoint (hr) Value: 6
  misc_feature: MA Experiment 108534 PARAMETER Experiment Name: Zm_4deg_Cold_P Parameter: Tissue Value: Aerial
  misc_feature: MA Experiment ID: 108545 Result: Up-regulated in Transcription
  misc_feature: MA Experiment 108545 PARAMETER Experiment Name: Zm_Imbibed_Seeds_P Parameter: Age (day) Value: 3 vs. 2
  misc_feature: MA Experiment 108545 PARAMETER Experiment Name: Zm_Imbibed_Seeds_P Parameter: Organism Value: Zea mays
  misc_feature: MA Experiment 108545 PARAMETER Experiment Name: Zm_Imbibed_Seeds_P Parameter: Plant Line Value: 35A19
  misc_feature: MA Experiment 108545 PARAMETER Experiment Name: Zm_Imbibed_Seeds_P Parameter: Tissue Value: Aerial vs. Embryo
  misc_feature: MA Experiment ID: 108547 Result: Up-regulated in Transcription
  misc_feature: MA Experiment 108547 PARAMETER Experiment Name: Zm_Imbibed_Seeds_P Parameter: Age (day) Value: 4 vs. 2
  misc_feature: MA Experiment 108547 PARAMETER Experiment Name: Zm_Imbibed_Seeds_P Parameter: Organism Value: Zea mays
  misc_feature: MA Experiment 108547 PARAMETER Experiment Name: Zm_Imbibed_Seeds_P Parameter: Plant Line Value: 35A19
  misc_feature: MA Experiment 108547 PARAMETER Experiment Name: Zm_Imbibed_Seeds_P Parameter: Tissue Value: Aerial vs. Embryo
  misc_feature: MA Experiment ID: 20001608 Result: Up-regulated in Transcription
  misc_feature: MA Experiment 20001608 PARAMETER Experiment Name: Zm_50ppm_KNO3_L-to-H_P Parameter: Age (day) Value: 21
  misc_feature: MA Experiment 20001608 PARAMETER Experiment Name: Zm_50ppm_KNO3_L-to-H_P Parameter: Organism Value: Zea mays
  misc_feature: MA Experiment 20001608 PARAMETER Experiment Name: Zm_50ppm_KNO3_L-to-H_P Parameter: Plant Line Value: 35A19
  misc_feature: MA Experiment 20001608 PARAMETER Experiment Name: Zm_50ppm_KNO3_L-to-H_P Parameter: Timepoint (hr) Value: 48
  misc_feature: MA Experiment 20001608 PARAMETER Experiment Name: Zm_50ppm_KNO3_L-to-H_P Parameter: Tissue Value: Shoots
  misc_feature: MA Experiment 20001608 PARAMETER Experiment Name: Zm_50ppm_KNO3_L-to-H_P Parameter: Treatment Value: 50ppm KNO3 vs. 50ppm KCl
ctcccgcggcctcggctgcaccgctctgcatactctccggtgaatcgctcccagtcccaagtccggatcgcaccgccaagcgttcagccatgagctccgctgcagccgccgccaatgtcgccgtcatcggaggcggaatatccggctccgtgtgcgcgtcgctcctcgccgcgcggggcgtggccgtgacgctcttcgactccggccgcggcgccggcggccgcatggcgcagcggagggaggtgatggaggatggctcggagctgcggttcgaccacggtgcgccctacttcaccgtcaccaacggcgaggttgcccgggtcgttggtgggtgggaggcgcgggggatcgtcgccgagtggaaggcaacgttcgcgtgcttcgatctggccaccggaaaatttacggacttcgagaaggagggaacagctaaaaagtatgtgggagtgccagccatgaactcgatatgcaaatcactctgtctagaggatggtgtggtggccaaatttggtgtcactgtgggcaagatggattggcttcaagatcggagttcgtggtcactagctagcctggatgggaaagatctaggctattttgattatgttgtggcgacagataagaacatagcgtcaccagcattttctgggttgactggaagaccgccacctcttgatttgtcgtcatttccacgcctgcctacagcacttcaagatatcccagttcgtccatgttttgctcttatggtagcattctcggagccattggctacggtacctgttcatggtttctctttcaacaattccaattctctgagctgggccttctgtaacagcagtaagccagggcgtgcttgcgtgcctcctaacagacaatcttgggtgctgcattcgacaactgagtacgcttccaaggtaataaataatattggtccacgcaaaccttcggcggaggcgcttgctaaggtggcagaggaattgttcagagaattccaggcgactggattaagcattccacggccaatttttatgaaagctcacagatggggtgctgctttcccagccattgcaattagtggagatgataagtgcgtttgggacaagagcacgaacttggcgatttgtggagatttctgtacaagcccaagtgtcgaaggagcagtccttagtgctacgagaggggtttccaaaatccttgaatgtttaaggtgcccctcaagtatctaacgttattgttaccatccccagggcccccctctctgtgattggttgtatttatgcctgcattctcttacacaaataaacaattcaagccttatttggaggc

SEQ ID NO: 5026 - protein, 406 aa, Zea mays subsp. mays
  peptide (1)..(406): Ceres Seq. ID no. 12406960
  misc_feature (2)..(303): Homolog of NCBI NO: 34897122 NR Description: hypothetical protein [Oryza sativa]
  misc_feature (25)..(402): Homolog of NCBI NO: 22330276 NR Description: hypothetical protein; protein id: At1g56000.1, by cDNA: gi_17978975 [Arabidopsis thaliana] T6H22.19/T6H22.19 [Arabidopsis thaliana]
  misc_feature (25)..(402): Homolog of NCBI NO: 25404082 NR Description: hypothetical protein T6H22.20 [imported] - thaliana >gi|6056384|gb|AAF02848.1|AC009894_19 Hypothetical
  misc_feature (25)..(223): Homolog of NCBI NO: 8778316 NR Description: F14J16.31 [Arabidopsis thaliana]
  misc_feature (224)..(402): Homolog of NCBI NO: 8778316 NR Description: F14J16.31 [Arabidopsis thaliana]
  misc_feature (25)..(347): Homolog of NCBI NO: 15222815 NR Description: hypothetical protein; protein id: At1g55980.1
  misc_feature (25)..(223): Homolog of NCBI NO: 8778321 NR Description: F14J16.28 [Arabidopsis thaliana]
  misc_feature (224)..(347): Homolog of NCBI NO: 8778321 NR Description: F14J16.28 [Arabidopsis thaliana]
  misc_feature (44)..(347): Homolog of NCBI NO: 25404080 NR Description: hypothetical protein T6H22.21 [imported] - thaliana >gi|6056386|gb|AAF02850.1|AC009894_21 Hypothetical
  misc_feature (38)..(401): Homolog of NCBI NO: 18396966 NR Description: expressed protein; protein id: At3g04650.1, by cDNA: gi_15215627 [Arabidopsis thaliana] unknown protein [Arabidopsis thaliana]
PAASAAPLCILSGESLPVPSPDRTAKRSAMSSAAAAANVAVIGGGISGSVCASLLAARGVAVTLFDSGRGAGGRMAQRREVMEDGSELRFDHGAPYFTVTNGEVARVVGGWEARGIVAEWKATFACFDLATGKFTDFEKEGTAKKYVGVPAMNSICKSLCLEDGVVAKFGVTVGKMDWLQDRSSWSLASLDGKDLGYFDYVVATDKNIASPAFSGLTGRPPPLDLSSFPRLPTALQDIPVRPCFALMVAFSEPLATVPVHGFSFNNSNSLSWAFCNSSKPGRACVPPNRQSWVLHSTTEYASKVINNIGPRKPSAEALAKVAEELFREFQATGLSIPRPIFMKAHRWGAAFPAIAISGDDKCVWDKSTNLAICGDFCTSPSVEGAVLSATRGVSKILECLRCPSSI

SEQ ID NO: 5027 - protein, 377 aa, Zea mays subsp. mays
  peptide (1)..(377): Ceres Seq. ID no. 12406961
  misc_feature (1)..(274): Homolog of NCBI NO: 34897122 NR Description: hypothetical protein [Oryza sativa]
  misc_feature (1)..(373): Homolog of NCBI NO: 22330276 NR Description: hypothetical protein; protein id: At1g56000.1, by cDNA: gi_17978975 [Arabidopsis thaliana] T6H22.19/T6H22.19 [Arabidopsis thaliana]
  misc_feature (1)..(373): Homolog of NCBI NO: 25404082 NR Description: hypothetical protein T6H22.20 [imported] - thaliana >gi|6056384|gb|AAF02848.1|AC009894_19 Hypothetical
  misc_feature (1)..(194): Homolog of NCBI NO: 8778316 NR Description: F14J16.31 [Arabidopsis thaliana]
  misc_feature (195)..(373): Homolog of NCBI NO: 8778316 NR Description: F14J16.31 [Arabidopsis thaliana]
  misc_feature (1)..(318): Homolog of NCBI NO: 15222815 NR Description: hypothetical protein; protein id: At1g55980.1
  misc_feature (1)..(194): Homolog of NCBI NO: 8778321 NR Description: F14J16.28 [Arabidopsis thaliana]
  misc_feature (195)..(318): Homolog of NCBI NO: 8778321 NR Description: F14J16.28 [Arabidopsis thaliana]
  misc_feature (15)..(318): Homolog of NCBI NO: 25404080 NR Description: hypothetical protein T6H22.21 [imported] - thaliana >gi|6056386|gb|AAF02850.1|AC009894_21 Hypothetical
  misc_feature (9)..(372): Homolog of NCBI NO: 18396966 NR Description: expressed protein; protein id: At3g04650.1, by cDNA: gi_15215627 [Arabidopsis thaliana] unknown protein [Arabidopsis thaliana]
MSSAAAAANVAVIGGGISGSVCASLLAARGVAVTLFDSGRGAGGRMAQRREVMEDGSELRFDHGAPYFTVTNGEVARVVGGWEARGIVAEWKATFACFDLATGKFTDFEKEGTAKKYVGVPAMNSICKSLCLEDGVVAKFGVTVGKMDWLQDRSSWSLASLDGKDLGYFDYVVATDKNIASPAFSGLTGRPPPLDLSSFPRLPTALQDIPVRPCFALMVAFSEPLATVPVHGFSFNNSNSLSWAFCNSSKPGRACVPPNRQSWVLHSTTEYASKVINNIGPRKPSAEALAKVAEELFREFQATGLSIPRPIFMKAHRWGAAFPAIAISGDDKCVWDKSTNLAICGDFCTSPSVEGAVLSATRGVSKILECLRCPSSI

SEQ ID NO: 5028 - protein, 332 aa, Zea mays subsp. mays
  peptide (1)..(332): Ceres Seq. ID no. 12406962
  misc_feature (1)..(229): Homolog of NCBI NO: 34897122 NR Description: hypothetical protein [Oryza sativa]
  misc_feature (1)..(328): Homolog of NCBI NO: 22330276 NR Description: hypothetical protein; protein id: At1g56000.1, by cDNA: gi_17978975 [Arabidopsis thaliana] T6H22.19/T6H22.19 [Arabidopsis thaliana]
  misc_feature (1)..(328): Homolog of NCBI NO: 25404082 NR Description: hypothetical protein T6H22.20 [imported] - thaliana >gi|6056384|gb|AAF02848.1|AC009894_19 Hypothetical
  misc_feature (1)..(149): Homolog of NCBI NO: 8778316 NR Description: F14J16.31 [Arabidopsis thaliana]
  misc_feature (150)..(328): Homolog of NCBI NO: 8778316 NR Description: F14J16.31 [Arabidopsis thaliana]
  misc_feature (1)..(273): Homolog of NCBI NO: 15222815 NR Description: hypothetical protein; protein id: At1g55980.1
  misc_feature (1)..(149): Homolog of NCBI NO: 8778321 NR Description: F14J16.28 [Arabidopsis thaliana]
  misc_feature (150)..(273): Homolog of NCBI NO: 8778321 NR Description: F14J16.28 [Arabidopsis thaliana]
  misc_feature (1)..(273): Homolog of NCBI NO: 25404080 NR Description: hypothetical protein T6H22.21 [imported] - thaliana >gi|6056386|gb|AAF02850.1|AC009894_21 Hypothetical
  misc_feature (1)..(327): Homolog of NCBI NO: 18396966 NR Description: expressed protein; protein id: At3g04650.1, by cDNA: gi_15215627 [Arabidopsis thaliana] unknown protein [Arabidopsis thaliana]
MAQRREVMEDGSELRFDHGAPYFTVTNGEVARVVGGWEARGIVAEWKATFACFDLATGKFTDFEKEGTAKKYVGVPAMNSICKSLCLEDGVVAKFGVTVGKMDWLQDRSSWSLASLDGKDLGYFDYVVATDKNIASPAFSGLTGRPPPLDLSSFPRLPTALQDIPVRPCFALMVAFSEPLATVPVHGFSFNNSNSLSWAFCNSSKPGRACVPPNRQSWVLHSTTEYASKVINNIGPRKPSAEALAKVAEELFREFQATGLSIPRPIFMKAHRWGAAFPAIAISGDDKCVWDKSTNLAICGDFCTSPSVEGAVLSATRGVSKILECLRCPSSI

SEQ ID NO: 5029 - DNA, 1624 bp, Zea mays subsp. mays
  misc_feature (1)..(1624): Ceres Seq. ID no. 12407075
  misc_feature: MA Experiment ID: 20000492 Result: Up-regulated in Transcription
  misc_feature: MA Experiment 20000492 PARAMETER Experiment Name: Zm_Hybrid_Seed_Dev_P Parameter: DAP Value: 12
  misc_feature: MA Experiment 20000492 PARAMETER Experiment Name: Zm_Hybrid_Seed_Dev_P Parameter: Organism Value: Zea mays
  misc_feature: MA Experiment 20000492 PARAMETER Experiment Name: Zm_Hybrid_Seed_Dev_P Parameter: Plant Line Value: 35A19
  misc_feature: MA Experiment 20000492 PARAMETER Experiment Name: Zm_Hybrid_Seed_Dev_P Parameter: Tissue Value: Fert Kernel vs. Unfert Floret
aaaaaatttccccatctccgacctcccccttcctctccccctgccgctccccgcgccgagaaggagaaccccagccgccgcgcagcgcgccgcccatggcctcctcgtcggagaacgcggctgtgccgccggaggaggagccccaggccccgccgccgccggacacagagcctaccgaggcggcgcccggcgaggcggaggatgagccgcaaaccctagagcgggcgcaggagctcttcgacaggggttccaaggccatcgaggatgaggacttcgtcgacgccgtagactgtctcagccgagcgctcgagatcagggcttcacattatggagatctcgcaccggagtgtgccagcacatacttcaaatatgcatgtgccctgctatacaaagctcaggaggagagtgatgttttgggaaatgttcccaagagcttgccaaatgaagactcagtgaagagtacagctactaaagatgacagtggaacctcaaaggtctctggtaccgatgcggaggatgctgcgtcatcagaaaaagttgatgctgaagaaggtcacaactcaaatggcaaaaatcaggagaatgggaatggtgaagttgagaaagatgatgacgacgtcgacgatgatgagaagatgggagatgaagaggataatgatttggatctttcttggaaaatgttggacattgctagggcaatagttgagaagagccaagataacactatggagaaagtaaaaatatattctgctcttgctgaagtggcaacggaaagagaggacatggacaactcactcagtgactatatgaaagctttatccatgttggagcatttggttgagcctgaccatcgtcgagttgtggaattaaacttccgcatttgtttggtttatgaactagtttccaagatcggagaagcaatttcatactgtgcaaaagcaatttcgctatgcaagtcacgcatacagagcctgaaaagttccaaggatgctttgttggctggtatagatggtgatgcatctgctgctgaagctgaaggaggctcagaaaaatctgccattgaaaaagagctagagcagcttactagcatattgcctgatcttgagaagaagcttgaggacctgtctgaagcaaacccaagcgctgacatggatgagatggtgaaggcaatcgtgtccagggtaactgatgtgatgccaaaagctgcatcttttacttcttcccagatggcaacctcaagcaatggattcgactcctcggttatgtctacggcagcgacaaccggaagctctggaagcaccgtgactgaccttggggttgtaggcagaggcgtcaaacgagctagcatcaagccgatctctgctgaacctgctgctaagaaacctgcacttgattcaccatctcaacaaggtgacagcagcatcaactctgaggttgttcctgcaacgcagactggagacgagtcagtatctaagtaaattacaatttcattagccctactgtaatgttaacttgctggaacatattagctgctatgtaaacgcttaagaagggactgctggggccatagactcatcgtgagctgaccattgaaatgttaaattgctgagatcatcatggcggt

SEQ ID NO: 5030 - protein, 491 aa, Zea mays subsp. mays
  peptide (1)..(491): Ceres Seq. ID no. 12407076
  misc_feature (75)..(108): Pfam Name: TPR Domain Pfam Description: TPR Domain
  misc_feature (32)..(491): Homolog of NCBI NO: 38175649 NR Description: tetratricopeptide repeat-containing protein-like
  misc_feature (140)..(491): Homolog of NCBI NO: 32352192 NR Description: hypothetical protein [Oryza sativa (japonica
  misc_feature (54)..(432): Homolog of NCBI NO: 18419996 NR Description: putative protein; protein id: At4g37210.1 thaliana] >gi|13877853|gb|AAK44004.1|AF370189_1 unknown protein thaliana] >gi|17065596|gb|AAL33778.1| unknown protein
  misc_feature (54)..(375): Homolog of NCBI NO: 25407799 NR Description: hypothetical protein AT4g37210 [imported] - thaliana >gi|4006859|emb|CAB16777.1| putative protein thaliana] >gi|7270704|emb|CAB80387.1| putative protein
  misc_feature (61)..(330): Homolog of NCBI NO: 4104353 NR Description: nuclear autoantigenic sperm protein autosomal
  misc_feature (59)..(136): Homolog of NCBI NO: 18129310 NR Description: hypothetical protein [Pinus pinaster]
  misc_feature (52)..(482): Homolog of NCBI NO: 123127 NR Description: HISTONE-BINDING PROTEIN N1/N2
  misc_feature (32)..(330): Homolog of NCBI NO: 13435642 NR Description: Unknown (protein for MGC:5829) [Mus musculus]
  misc_feature (61)..(330): Homolog of NCBI NO: 27262630 NR Description: nuclear autoantigenic sperm protein isoform 3;
  misc_feature (61)..(330): Homolog of NCBI NO: 30584691 NR Description: Homo sapiens nuclear autoantigenic sperm protein
KISPSPTSPFLSPCRSPRREGEPQPPRSAPPMASSSENAAVPPEEEPQAPPPPDTEPTEAAPGEAEDEPQTLERAQELFDRGSKAIEDEDFVDAVDCLSRALEIRASHYGDLAPECASTYFKYACALLYKAQEESDVLGNVPKSLPNEDSVKSTATKDDSGTSKVSGTDAEDAASSEKVDAEEGHNSNGKNQENGNGEVEKDDDDVDDDEKMGDEEDNDLDLSWKMLDIARAIVEKSQDNTMEKVKIYSALAEVATEREDMDNSLSDYMKALSMLEHLVEPDHRRVVELNFRICLVYELVSKIGEAISYCAKAISLCKSRIQSLKSSKDALLAGIDGDASAAEAEGGSEKSAIEKELEQLTSILPDLEKKLEDLSEANPSADMDEMVKAIVSRVTDVMPKAASFTSSQMATSSNGFDSSVMSTAATTGSSGSTVTDLGVVGRGVKRASIKPISAEPAAKKPALDSPSQQGDSSINSEVVPATQTGDESVSK

SEQ ID NO: 5031 - protein, 460 aa, Zea mays subsp. mays
  peptide (1)..(460): Ceres Seq. ID no. 12407077
  misc_feature (44)..(77): Pfam Name: TPR Domain Pfam Description: TPR Domain
  misc_feature (23)..(344): Homolog of NCBI NO: 25407799 NR Description: hypothetical protein AT4g37210 [imported] - thaliana >gi|4006859|emb|CAB16777.1| putative protein thaliana] >gi|7270704|emb|CAB80387.1| putative protein
  misc_feature (30)..(299): Homolog of NCBI NO: 4104353 NR Description: nuclear autoantigenic sperm protein autosomal
  misc_feature (28)..(105): Homolog of NCBI NO: 18129310 NR Description: hypothetical protein [Pinus pinaster]
  misc_feature (21)..(451): Homolog of NCBI NO: 123127 NR Description: HISTONE-BINDING PROTEIN N1/N2
  misc_feature (109)..(460): Homolog of NCBI NO: 32352192 NR Description: hypothetical protein [Oryza sativa (japonica
  misc_feature (23)..(401): Homolog of NCBI NO: 18419996 NR Description: putative protein; protein id: At4g37210.1 thaliana] >gi|13877853|gb|AAK44004.1|AF370189_1 unknown protein thaliana] >gi|17065596|gb|AAL33778.1| unknown protein
  misc_feature (1)..(460): Homolog of NCBI NO: 38175649 NR Description: tetratricopeptide repeat-containing protein-like
  misc_feature (1)..(299): Homolog of NCBI NO: 13435642 NR Description: Unknown (protein for MGC:5829) [Mus musculus]
  misc_feature (30)..(299): Homolog of NCBI NO: 27262630 NR Description: nuclear autoantigenic sperm protein isoform 3;
  misc_feature (30)..(299): Homolog of NCBI NO: 30584691 NR Description: Homo sapiens nuclear autoantigenic sperm protein
MASSSENAAVPPEEEPQAPPPPDTEPTEAAPGEAEDEPQTLERAQELFDRGSKAIEDEDFVDAVDCLSRALEIRASHYGDLAPECASTYFKYACALLYKAQEESDVLGNVPKSLPNEDSVKSTATKDDSGTSKVSGTDAEDAASSEKVDAEEGHNSNGKNQENGNGEVEKDDDDVDDDEKMGDEEDNDLDLSWKMLDIARAIVEKSQDNTMEKVKIYSALAEVATEREDMDNSLSDYMKALSMLEHLVEPDHRRVVELNFRICLVYELVSKIGEAISYCAKAISLCKSRIQSLKSSKDALLAGIDGDASAAEAEGGSEKSAIEKELEQLTSILPDLEKKLEDLSEANPSADMDEMVKAIVSRVTDVMPKAASFTSSQMATSSNGFDSSVMSTAATTGSSGSTVTDLGVVGRGVKRASIKPISAEPAAKKPALDSPSQQGDSSINSEVVPATQTGDESVSK

SEQ ID NO: 5032 - protein, 280 aa, Zea mays subsp. mays; identical to SEQ ID NO: 2639
  peptide (1)..(280): Ceres Seq. ID no. 12407078
  misc_feature (1)..(280): Homolog of NCBI NO: 38175649 NR Description: tetratricopeptide repeat-containing protein-like
  misc_feature (1)..(280): Homolog of NCBI NO: 32352192 NR Description: hypothetical protein [Oryza sativa (japonica
  misc_feature (1)..(221): Homolog of NCBI NO: 18419996 NR Description: putative protein; protein id: At4g37210.1 thaliana] >gi|13877853|gb|AAK44004.1|AF370189_1 unknown protein thaliana] >gi|17065596|gb|AAL33778.1| unknown protein
  misc_feature (1)..(164): Homolog of NCBI NO: 25407799 NR Description: hypothetical protein AT4g37210 [imported] - thaliana >gi|4006859|emb|CAB16777.1| putative protein thaliana] >gi|7270704|emb|CAB80387.1| putative protein
  misc_feature (1)..(119): Homolog of NCBI NO: 4104353 NR Description: nuclear autoantigenic sperm protein autosomal
  misc_feature (1)..(271): Homolog of NCBI NO: 123127 NR Description: HISTONE-BINDING PROTEIN N1/N2
  misc_feature (1)..(119): Homolog of NCBI NO: 13435642 NR Description: Unknown (protein for MGC:5829) [Mus musculus]
  misc_feature (1)..(119): Homolog of NCBI NO: 27262630 NR Description: nuclear autoantigenic sperm protein isoform 3;
  misc_feature (1)..(119): Homolog of NCBI NO: 30584691 NR Description: Homo sapiens nuclear autoantigenic sperm protein
  misc_feature (1)..(268): Homolog of NCBI NO: 28277791 NR Description: Unknown (protein for MGC:56007) [Danio rerio]

SEQ ID NO: 5033 - DNA, 1249 bp, Zea mays subsp. mays
  misc_feature (1)..(1249): Ceres Seq. ID no. 12343376
  misc_feature: MA Experiment ID: 108527 Result: Up-regulated in Transcription
  misc_feature: MA Experiment 108527 PARAMETER Experiment Name: Zm_5mM_NO_P Parameter: Age (day) Value: 8
  misc_feature: MA Experiment 108527 PARAMETER Experiment Name: Zm_5mM_NO_P Parameter: Organism Value: Zea mays
  misc_feature: MA Experiment 108527 PARAMETER Experiment Name: Zm_5mM_NO_P Parameter: Plant Line Value: 35A19
  misc_feature: MA Experiment 108527 PARAMETER Experiment Name: Zm_5mM_NO_P Parameter: Timepoint (hr) Value: 6
  misc_feature: MA Experiment 108527 PARAMETER Experiment Name: Zm_5mM_NO_P Parameter: Tissue Value: Aerial
  misc_feature: MA Experiment 108527 PARAMETER Experiment Name: Zm_5mM_NO_P Parameter: Treatment Value: 5mM NO vs. No Treatment
  misc_feature: MA Experiment ID: 108529 Result: Up-regulated in Transcription
  misc_feature: MA Experiment 108529 PARAMETER Experiment Name: Zm_Imbibed_Seeds_P Parameter: Age (day) Value: 5 vs. 2
  misc_feature: MA Experiment 108529 PARAMETER Experiment Name: Zm_Imbibed_Seeds_P Parameter: Organism Value: Zea mays
  misc_feature: MA Experiment 108529 PARAMETER Experiment Name: Zm_Imbibed_Seeds_P Parameter: Plant Line Value: 35A19
  misc_feature: MA Experiment 108529 PARAMETER Experiment Name: Zm_Imbibed_Seeds_P Parameter: Tissue Value: Roots vs. Embryo
  misc_feature: MA Experiment ID: 108540 Result: Down-regulated in Transcription
  misc_feature: MA Experiment 108540 PARAMETER Experiment Name: Zm_20percent_PEG_P Parameter: Age (day) Value: 8
  misc_feature: MA Experiment 108540 PARAMETER Experiment Name: Zm_20percent_PEG_P Parameter: Organism Value: Zea mays
  misc_feature: MA Experiment 108540 PARAMETER Experiment Name: Zm_20percent_PEG_P Parameter: Plant Line Value: 35A19
  misc_feature: MA Experiment 108540 PARAMETER Experiment Name: Zm_20percent_PEG_P Parameter: Timepoint (hr) Value: 6
  misc_feature: MA Experiment 108540 PARAMETER Experiment Name: Zm_20percent_PEG_P Parameter: Tissue Value: Aerial
  misc_feature: MA Experiment 108540 PARAMETER Experiment Name: Zm_20percent_PEG_P Parameter: Treatment Value: 20percent PEG vs. No Treatment
  misc_feature: MA Experiment ID: 108556 Result: Down-regulated in Transcription
  misc_feature: MA Experiment 108556 PARAMETER Experiment Name: Zm_Drought_P Parameter: Age (day) Value: 9
  misc_feature: MA Experiment 108556 PARAMETER Experiment Name: Zm_Drought_P Parameter: Organism Value: Zea mays
  misc_feature: MA Experiment 108556 PARAMETER Experiment Name: Zm_Drought_P Parameter: Plant Line Value: 35A19
  misc_feature: MA Experiment 108556 PARAMETER Experiment Name: Zm_Drought_P Parameter: Timepoint (hr) Value: 24
  misc_feature: MA Experiment 108556 PARAMETER Experiment Name: Zm_Drought_P Parameter: Tissue Value: Aerial
  misc_feature: MA Experiment 108556 PARAMETER Experiment Name: Zm_Drought_P Parameter: Treatment Value: Drought vs. No Drought
  misc_feature: MA Experiment ID: 108687 Result: Down-regulated in Transcription
  misc_feature: MA Experiment 108687 PARAMETER Experiment Name: Zm_Embryos-Flowers__P Parameter: Tissue Value: Embryo vs. Aerial+
  misc_feature: MA Experiment ID: 20000535 Result: Down-regulated in Transcription
  misc_feature: MA Experiment 20000535 PARAMETER Experiment Name: Zm_Hybrid_Seed_Dev_P Parameter: DAP Value: 30 vs. 12
  misc_feature: MA Experiment 20000535 PARAMETER Experiment Name: Zm_Hybrid_Seed_Dev_P Parameter: Organism Value: Zea mays
  misc_feature: MA Experiment 20000535 PARAMETER Experiment Name: Zm_Hybrid_Seed_Dev_P Parameter: Plant Line Value: 35A19
  misc_feature: MA Experiment 20000535 PARAMETER Experiment Name: Zm_Hybrid_Seed_Dev_P Parameter: Tissue Value: Embryo vs. Unfert Floret
aaccccagcgtagcggagccggcagccaagcagaaaaatacgagtatcgcacgcgcaaggcgattccgtccccattctccacccaatagggagctagagctacgagagggggaaacggggggacgggaataggcgtcgtcggccatgtcgtcgtcgtggaactcggtgggtctggcgatcctgtaccaggtgctgggctgggtcgccttcgccgcgtggtccttcagcttctacccgcaggtcctcctcaactacaagcgcaagagtgttgtgggcctgaatttcgattttctggtgttgaacttgacaaagcactcgtcctacctcatatacaatgctgctctcttcttcagcccattcattcagcaacagtatcatgacaaatatggtgacaaagagatgattccagttgctgcaaatgatgttgctttttcactgcatgctgtagcattgacagcctttaccgtttttcaagtattcatatatgagcgaggaacacagaaagtctccaaagtttgcatatcaatttctgctattgtctggatcgcggctcttgtttgcctcattattgcttggccaaaaagtgactggctttggcttattgatgtattcaattcaatacaagttggcatgacagcaatcaagtacatccctcaggccatcatgaacttcaggcggaagagcacaattggttggagcgttggcaatatattacttgatctcacaggaggggtgctgaatttttgtcagatgggtgtgcagtctatagatcaacatactttggtgaatttctatggaaacattgggaaaacccttctttcattggagacggttttctttgatgtcctgttcattatccaacactacgtgttgtaccctgtcaagaaggacgagaatggtaaggcaatcatttctgaaagggtagccccccttatcaggccttcggacaagcctgaagaagataacgtatgatctagctgtagttatattgcgcacattgcattcacgcgctgtttgcacacaggccacacacgcatgcgaattatttgttcaaaaggaattgctagcgcgtcttgattatattgctacttataacttttactacttggtgcactggcgagagatgtctcatataccaggttgcgggtttcaagtggccccgtttttattatcgtgatttgtgaaggttattagatatcatctcggccaacatttacgatcaatgctcatgtaaatatttggttgcatt

SEQ ID NO: 5034 - protein, 275 aa, Zea mays subsp. mays
  peptide (1)..(275): Ceres Seq. ID no. 12343377
  misc_feature (10)..(76): Pfam Name: PQ loop repeat Pfam Description: PQ loop repeat
  misc_feature (3)..(267): Homolog of NCBI NO: 15237468 NR Description: putative protein; protein id: At5g40670.1, by cDNA: 18435., supported by cDNA: gi_15529265, supported by gi_16974418 [Arabidopsis thaliana]
  misc_feature (3)..(267): Homolog of NCBI NO: 21553944 NR Description: unknown [Arabidopsis thaliana]
  misc_feature (6)..(244): Homolog of NCBI NO: 31208055 NR Description: ENSANGP00000020402 [Anopheles gambiae]
  misc_feature (7)..(275): Homolog of NCBI NO: 23273064 NR Description: cystinosis, nephropathic [Homo sapiens]
  misc_feature (10)..(247): Homolog of NCBI NO: 34872731 NR Description: similar to cystinosin [Rattus norvegicus]
  misc_feature (10)..(247): Homolog of NCBI NO: 13752577 NR Description: cystinosis, nephropathic [Mus musculus] Cystinosin >gi|11967808|emb|CAC19455.1| cystinosin [Mus musculus]
  misc_feature (7)..(244): Homolog of NCBI NO: 4826682 NR Description: cystinosis, nephropathic; Cystinosis [Homo >gi|13124047|sp|O60931|CTNS_HUMAN Cystinosin cystinosin [Homo sapiens] >gi|3036851|emb|CAA75882.1| cystinosin
  misc_feature (1)..(244): Homolog of NCBI NO: 31208053 NR Description: ENSANGP00000020331 [Anopheles gambiae]
  misc_feature (10)..(245): Homolog of NCBI NO: 17532373 NR Description: Cystinosis nephropathic (45.4 kD) [Caenorhabditis >gi|13124063|sp|Q09500|CTNS_CAEEL Cystinosin homolog
  misc_feature (10)..(245): Homolog of NCBI NO: 32565006 NR Description: Cystinosin/ERS1p repeat (42.2 kD) (2I426) elegans] >gi|25004913|emb|CAD56564.1| Hypothetical protein
MSSSWNSVGLAILYQVLGWVAFAAWSFSFYPQVLLNYKRKSVVGLNFDFLVLNLTKHSSYLIYNAALFFSPFIQQQYHDKYGDKEMIPVAANDVAFSLHAVALTAFTVFQVFIYERGTQKVSKVCISISAIVWIAALVCLIIAWPKSDWLWLIDVFNSIQVGMTAIKYIPQAIMNFRRKSTIGWSVGNILLDLTGGVLNFCQMGVQSIDQHTLVNFYGNIGKTLLSLETVFFDVLFIIQHYVLYPVKKDENGKAIISERVAPLIRPSDKPEEDNV

SEQ ID NO: 5035 - protein, 190 aa, Zea mays subsp. mays
  peptide (1)..(190): Ceres Seq. ID no. 12343378
  misc_feature (1)..(182): Homolog of NCBI NO: 15237468 NR Description: putative protein; protein id: At5g40670.1, by cDNA: 18435., supported by cDNA: gi_15529265, supported by gi_16974418 [Arabidopsis thaliana]
  misc_feature (1)..(182): Homolog of NCBI NO: 21553944 NR Description: unknown [Arabidopsis thaliana]
  misc_feature (1)..(159): Homolog of NCBI NO: 31208055 NR Description: ENSANGP00000020402 [Anopheles gambiae]
  misc_feature (1)..(190): Homolog of NCBI NO: 23273064 NR Description: cystinosis, nephropathic [Homo sapiens]
  misc_feature (1)..(162): Homolog of NCBI NO: 34872731 NR Description: similar to cystinosin [Rattus norvegicus]
  misc_feature (1)..(162): Homolog of NCBI NO: 13752577 NR Description: cystinosis, nephropathic [Mus musculus] Cystinosin >gi|11967808|emb|CAC19455.1| cystinosin [Mus musculus]
  misc_feature (1)..(159): Homolog of NCBI NO: 4826682 NR Description: cystinosis, nephropathic; Cystinosis [Homo >gi|13124047|sp|O60931|CTNS_HUMAN Cystinosin cystinosin [Homo sapiens] >gi|3036851|emb|CAA75882.1| cystinosin
  misc_feature (1)..(159): Homolog of NCBI NO: 31208053 NR Description: ENSANGP00000020331 [Anopheles gambiae]
  misc_feature (1)..(160): Homolog of NCBI NO: 17532373 NR Description: Cystinosis nephropathic (45.4 kD) [Caenorhabditis >gi|13124063|sp|Q09500|CTNS_CAEEL Cystinosin homolog
  misc_feature (1)..(160): Homolog of NCBI NO: 32565006 NR Description: Cystinosin/ERS1p repeat (42.2 kD) (2I426) elegans] >gi|25004913|emb|CAD56564.1| Hypothetical protein
MIPVAANDVAFSLHAVALTAFTVFQVFIYERGTQKVSKVCISISAIVWIAALVCLIIAWPKSDWLWLIDVFNSIQVGMTAIKYIPQAIMNFRRKSTIGWSVGNILLDLTGGVLNFCQMGVQSIDQHTLVNFYGNIGKTLLSLETVFFDVLFIIQHYVLYPVKKDENGKAIISERVAPLIRPSDKPEEDNV

SEQ ID NO: 5036 - DNA, 1567 bp, Zea mays subsp. mays
  misc_feature (1)..(1567): Ceres Seq. ID no. 12373692
  misc_feature: MA Experiment ID: 108522 Result: Down-regulated in Transcription
  misc_feature: MA Experiment 108522 PARAMETER Experiment Name: Zm_42deg_Heat_P Parameter: Age (day) Value: 8
  misc_feature: MA Experiment 108522 PARAMETER Experiment Name: Zm_42deg_Heat_P Parameter: Organism Value: Zea mays
  misc_feature: MA Experiment 108522 PARAMETER Experiment Name: Zm_42deg_Heat_P Parameter: Plant Line Value: 35A19
  misc_feature: MA Experiment 108522 PARAMETER Experiment Name: Zm_42deg_Heat_P Parameter: Temperature (deg C) Value: 42 vs. 22
  misc_feature: MA Experiment 108522 PARAMETER Experiment Name: Zm_42deg_Heat_P Parameter: Timepoint (hr) Value: 1
  misc_feature: MA Experiment 108522 PARAMETER Experiment Name: Zm_42deg_Heat_P Parameter: Tissue Value: Aerial
  misc_feature: MA Experiment ID: 108523 Result: Down-regulated in Transcription
  misc_feature: MA Experiment 108523 PARAMETER Experiment Name: Zm_42deg_Heat_P Parameter: Age (day) Value: 8
  misc_feature: MA Experiment 108523 PARAMETER Experiment Name: Zm_42deg_Heat_P Parameter: Organism Value: Zea mays
  misc_feature: MA Experiment 108523 PARAMETER Experiment Name: Zm_42deg_Heat_P Parameter: Plant Line Value: 35A19
  misc_feature: MA Experiment 108523 PARAMETER Experiment Name: Zm_42deg_Heat_P Parameter: Temperature (deg C) Value: 42 vs. 22
  misc_feature: MA Experiment 108523 PARAMETER Experiment Name: Zm_42deg_Heat_P Parameter: Timepoint (hr) Value: 6
  misc_feature: MA Experiment 108523 PARAMETER Experiment Name: Zm_42deg_Heat_P Parameter: Tissue Value: Aerial
  misc_feature: MA Experiment ID: 108527 Result: Down-regulated in Transcription
  misc_feature: MA Experiment 108527 PARAMETER Experiment Name: Zm_5mM_NO_P Parameter: Age (day) Value: 8
  misc_feature: MA Experiment 108527 PARAMETER Experiment Name: Zm_5mM_NO_P Parameter: Organism Value: Zea mays
  misc_feature: MA Experiment 108527 PARAMETER Experiment Name: Zm_5mM_NO_P Parameter: Plant Line Value: 35A19
  misc_feature: MA Experiment 108527 PARAMETER Experiment Name: Zm_5mM_NO_P Parameter: Timepoint (hr) Value: 6
  misc_feature: MA Experiment 108527 PARAMETER Experiment Name: Zm_5mM_NO_P Parameter: Tissue Value: Aerial
  misc_feature: MA Experiment 108527 PARAMETER Experiment Name: Zm_5mM_NO_P Parameter: Treatment Value: 5mM NO vs. No Treatment
  misc_feature: MA Experiment ID: 108528 Result: Down-regulated in Transcription
  misc_feature: MA Experiment 108528 PARAMETER Experiment Name: Zm_Imbibed_Seeds_P Parameter: Age (day) Value: 5 vs. 2
  misc_feature: MA Experiment 108528 PARAMETER Experiment Name: Zm_Imbibed_Seeds_P Parameter: Organism Value: Zea mays
  misc_feature: MA Experiment 108528 PARAMETER Experiment Name: Zm_Imbibed_Seeds_P Parameter: Plant Line Value: 35A19
  misc_feature: MA Experiment 108528 PARAMETER Experiment Name: Zm_Imbibed_Seeds_P Parameter: Tissue Value: Aerial vs. Embryo
  misc_feature: MA Experiment ID: 108534 Result: Down-regulated in Transcription
  misc_feature: MA Experiment 108534 PARAMETER Experiment Name: Zm_4deg_Cold_P Parameter: Age (hr) Value: 8
  misc_feature: MA Experiment 108534 PARAMETER Experiment Name: Zm_4deg_Cold_P Parameter: Organism Value: Zea mays
  misc_feature: MA Experiment 108534 PARAMETER Experiment Name: Zm_4deg_Cold_P Parameter: Plant Line Value: 35A19
  misc_feature: MA Experiment 108534 PARAMETER Experiment Name: Zm_4deg_Cold_P Parameter: Temperature (deg C) Value: 4 vs. 22
  misc_feature: MA Experiment 108534 PARAMETER Experiment Name: Zm_4deg_Cold_P Parameter: Timepoint (hr) Value: 6
  misc_feature: MA Experiment 108534 PARAMETER Experiment Name: Zm_4deg_Cold_P Parameter: Tissue Value: Aerial
  misc_feature: MA Experiment ID: 108535 Result: Down-regulated in Transcription
  misc_feature: MA Experiment 108535 PARAMETER Experiment Name: Zm_Meristem_P Parameter: Age (day) Value: 8
  misc_feature: MA Experiment 108535 PARAMETER Experiment Name: Zm_Meristem_P Parameter: Organism Value: Zea mays
  misc_feature: MA Experiment 108535 PARAMETER Experiment Name: Zm_Meristem_P Parameter: Plant Line Value: 35A19
  misc_feature: MA Experiment 108535 PARAMETER Experiment Name: Zm_Meristem_P Parameter: Tissue Value: Root Meristem vs. Above Root Meristem
  misc_feature: MA Experiment ID: 108547 Result: Down-regulated in Transcription
  misc_feature: MA Experiment 108547 PARAMETER Experiment Name: Zm_Imbibed_Seeds_P Parameter: Age (day) Value: 4 vs. 2
  misc_feature: MA Experiment 108547 PARAMETER Experiment Name: Zm_Imbibed_Seeds_P Parameter: Organism Value: Zea mays
  misc_feature: MA Experiment 108547 PARAMETER Experiment Name: Zm_Imbibed_Seeds_P Parameter: Plant Line Value: 35A19
  misc_feature: MA Experiment 108547 PARAMETER Experiment Name: Zm_Imbibed_Seeds_P Parameter: Tissue Value: Aerial vs. Embryo
  misc_feature: MA Experiment ID: 108597 Result: Up-regulated in Transcription
  misc_feature: MA Experiment 108597 PARAMETER Experiment Name: Zm_100uM_ABA_P Parameter: Age (day) Value: 9
  misc_feature: MA Experiment 108597 PARAMETER Experiment Name: Zm_100uM_ABA_P Parameter: Organism Value: Zea mays
  misc_feature: MA Experiment 108597 PARAMETER Experiment Name: Zm_100uM_ABA_P Parameter: Plant Line Value: 35A19
  misc_feature: MA Experiment 108597 PARAMETER Experiment Name: Zm_100uM_ABA_P Parameter: Timepoint (hr) Value: 24
  misc_feature: MA Experiment 108597 PARAMETER Experiment Name: Zm_100uM_ABA_P Parameter: Tissue Value: Aerial
  misc_feature: MA Experiment 108597 PARAMETER Experiment Name: Zm_100uM_ABA_P Parameter: Treatment Value: 100uM ABA vs. No Treatment
  misc_feature: MA Experiment ID: 20000478 Result: Down-regulated in Transcription
  misc_feature: MA Experiment 20000478 PARAMETER Experiment Name: Zm_5mM_SA_P Parameter: Age (day) Value: 11
  misc_feature: MA Experiment 20000478 PARAMETER Experiment Name: Zm_5mM_SA_P Parameter: Organism Value: Zea mays
  misc_feature: MA Experiment 20000478 PARAMETER Experiment Name: Zm_5mM_SA_P Parameter: Plant Line Value: 35A19
  misc_feature: MA Experiment 20000478 PARAMETER Experiment Name: Zm_5mM_SA_P Parameter: Timepoint (hr) Value: 72
  misc_feature: MA Experiment 20000478 PARAMETER Experiment Name: Zm_5mM_SA_P Parameter: Tissue Value: Aerial
  misc_feature: MA Experiment 20000478 PARAMETER Experiment Name: Zm_5mM_SA_P Parameter: Treatment Value: 5mM SA vs. No Treatment
  misc_feature: MA Experiment ID: 20000480 Result: Down-regulated in Transcription
  misc_feature: MA Experiment 20000480 PARAMETER Experiment Name: Zm_Drought_P Parameter: Age (day) Value: 11
  misc_feature: MA Experiment 20000480 PARAMETER Experiment Name: Zm_Drought_P Parameter: Organism Value: Zea mays
  misc_feature: MA Experiment 20000480 PARAMETER Experiment Name: Zm_Drought_P Parameter: Plant Line Value: 35A19
  misc_feature: MA Experiment 20000480 PARAMETER Experiment Name: Zm_Drought_P Parameter: Timepoint (hr) Value: 72
  misc_feature: MA Experiment 20000480 PARAMETER Experiment Name: Zm_Drought_P Parameter: Tissue Value: Aerial
  misc_feature: MA Experiment 20000480 PARAMETER Experiment Name: Zm_Drought_P Parameter: Treatment Value: Drought vs. No Drought
  misc_feature: MA Experiment ID: 20000532 Result: Up-regulated in Transcription
  misc_feature: MA Experiment 20000532 PARAMETER Experiment Name: Zm_0.001percent_MeJA_P Parameter: Age (day) Value: 10
  misc_feature: MA Experiment 20000532 PARAMETER Experiment Name: Zm_0.001percent_MeJA_P Parameter: Organism Value: Zea mays
  misc_feature: MA Experiment 20000532 PARAMETER Experiment Name: Zm_0.001percent_MeJA_P Parameter: Plant Line Value: 35A19
  misc_feature: MA Experiment 20000532 PARAMETER Experiment Name: Zm_0.001percent_MeJA_P Parameter: Timepoint (hr) Value: 48
  misc_feature: MA Experiment 20000532 PARAMETER Experiment Name: Zm_0.001percent_MeJA_P Parameter: Tissue Value: Aerial
  misc_feature: MA Experiment 20000532 PARAMETER Experiment Name: Zm_0.001percent_MeJA_P Parameter: Treatment Value: 0.001percent MeJA vs. No Treatment
  misc_feature: MA Experiment ID: 20000535 Result: Down-regulated in Transcription
  misc_feature: MA Experiment 20000535 PARAMETER Experiment Name: Zm_Hybrid_Seed_Dev_P Parameter: DAP Value: 30 vs. 12
  misc_feature: MA Experiment 20000535 PARAMETER Experiment Name: Zm_Hybrid_Seed_Dev_P Parameter: Organism Value: Zea mays
  misc_feature: MA Experiment 20000535 PARAMETER Experiment Name: Zm_Hybrid_Seed_Dev_P Parameter: Plant Line Value: 35A19
  misc_feature: MA Experiment 20000535 PARAMETER Experiment Name: Zm_Hybrid_Seed_Dev_P Parameter: Tissue Value: Embryo vs. Unfert Floret
  misc_feature: MA Experiment ID: 20000626 Result: Up-regulated in Transcription
  misc_feature: MA Experiment 20000626 PARAMETER Experiment Name: Zm_Herbicide-Treatments_P Parameter: Timepoint (hr) Value: 12
  misc_feature: MA Experiment 20000626 PARAMETER Experiment Name: Zm_Herbicide-Treatments_P Parameter: Tissue Value: Aerial
  misc_feature: MA Experiment 20000626 PARAMETER Experiment Name: Zm_Herbicide-Treatments_P Parameter: Treatment Value: Roundup vs. No Treatment
  misc_feature: MA Experiment ID: 20000627 Result: Up-regulated in Transcription
  misc_feature: MA Experiment 20000627 PARAMETER Experiment Name: Zm_Herbicide-Treatments_P Parameter: Timepoint (hr) Value: 12
  misc_feature: MA Experiment 20000627 PARAMETER Experiment Name: Zm_Herbicide-Treatments_P Parameter: Tissue Value: Aerial
  misc_feature: MA Experiment 20000627 PARAMETER Experiment Name: Zm_Herbicide-Treatments_P Parameter: Treatment Value: Finale vs. No Treatment
  misc_feature: MA Experiment ID: 20000630 Result: Up-regulated in Transcription
  misc_feature: MA Experiment 20000630 PARAMETER Experiment Name: Zm_Herbicide-Treatments_P Parameter: Timepoint (hr) Value: 4
  misc_feature: MA Experiment 20000630 PARAMETER Experiment Name: Zm_Herbicide-Treatments_P Parameter: Tissue Value: Aerial
  misc_feature: MA Experiment 20000630 PARAMETER Experiment Name: Zm_Herbicide-Treatments_P Parameter: Treatment Value: Roundup vs. No Treatment
  misc_feature: MA Experiment ID: 20001610 Result: Down-regulated in Transcription
  misc_feature: MA Experiment 20001610 PARAMETER Experiment Name: Zm_50ppm_KNO3_L-to-H_P Parameter: Age (day) Value: 19
  misc_feature: MA Experiment 20001610 PARAMETER Experiment Name: Zm_50ppm_KNO3_L-to-H_P Parameter: Organism Value: Zea mays
  misc_feature: MA Experiment 20001610 PARAMETER Experiment Name: Zm_50ppm_KNO3_L-to-H_P Parameter: Plant Line Value: 35A19
  misc_feature: MA Experiment 20001610 PARAMETER Experiment Name: Zm_50ppm_KNO3_L-to-H_P Parameter: Timepoint (hr) Value: 2
  misc_feature: MA Experiment 20001610 PARAMETER Experiment Name: Zm_50ppm_KNO3_L-to-H_P Parameter: Tissue Value: Roots
  misc_feature: MA Experiment 20001610 PARAMETER Experiment Name: Zm_50ppm_KNO3_L-to-H_P Parameter: Treatment Value: 50ppm KNO3 vs. 50ppm KCl
accagttccgcagaataaacgagcgtgcaagcgctgctgggctggtgtcagtcacctgagcaaggaagagagatggccacgctgcctcgcgagggcgccgcggcggcggactccgaccagcttttggtagaagcacatggctctacacgaacgctgattttgaataggccaaagcagctcaatgcactctcctctgaaatgattaaaggtctcctatggtatttcacagcttttgagaaagatgatggagtcagattgttgattatgaaggggaatagaagagtattttgctctggaggtgatattgctcaatgtgcccggtgtttatataatggaaactggaaatgggtcgatgatttcttccaaaatgaatatttgctaaattacatcattgcgacttacataaaacctcaggtttccattcttagtggaattgtcatgggtggaggagctggtgtttcaatacatggaagatttcgagttgccactgataacacgatttttgcaatgccagaaacagctctaggcctctttccagatgtaggggcctcttattttctatctcggctaccagggttctatggagaatatgttggtctaactggtgccagattggatggtgcggaaatgcttgcctgtggcctggcaactcattttgtcccgtcaaagaggttgccattgcttgaggaatcgcttaaaaagctggacacgtccagtacttttgctgtgtcgggtattatcgaccagttttcacagaggccattagtgaaagatagcagctctttaaataggatggaaaccatcaacaaatgcttctccaaaaggacagttgaagaaatcatagatgctcttgaacaagaaatctcaaatgtttcagacaaatgggttgctgcaacaatcaagtccctgaaaaaggcttcccccaccagcctaaaaatttctctgagatcgataagagaagggagaacacaaactcttggggagtgcctgcgtcgggaatatagagtggtttgccatgtcctgcgtggcaccttcagccgagacttgtctgagggatttagggctgtgctactagaaaaagacaacaagccagagtggattcctccaaggttggaacaagttcctgacgaggcagttgagcaatatttcttgagaattgatgatccccagtgcaagatctgaacctgcctgcgagacttccccaccgaagaaatattgagtccaagatttgattgaggtcttggacgaagagtgagcctcggtcaggataactcgtcaactcatgtttgaagttgtgtgcggaatgttgacgacgattgataaataataaacgcggactgaatatatgtcttataagttcacatttatcgctaaataatttttgttgcttttgtgtgaagttgtacctgttagccttgttcggttacagggatgaaattctaccatagatataattcgggtctagattggatgaatcgatacctcacccaatcatatggtaagattaaatccatcatttaatacatacacctcccaaaactagttattcttttcatttatggattcc

SEQ ID NO: 5037 - protein, 369 aa, Zea mays subsp. mays
  peptide (1)..(369): Ceres Seq. ID no. 12373693
  misc_feature (26)..(197): Pfam Name: Enoyl-CoA hydratase/isomerase family Pfam Description: Enoyl-CoA hydratase/isomerase family
  misc_feature (12)..(363): Homolog of NCBI NO: 15239206 NR Description: 3-hydroxyisobutyryl-coenzyme A hydrolase; protein
  misc_feature (12)..(366): Homolog of NCBI NO: 15224549 NR Description: 3-hydroxyisobutyryl-coenzyme A hydrolase; protein
  misc_feature (43)..(364): Homolog of NCBI NO: 6014701 NR Description: enoyl-CoA-hydratase [Avicennia marina]
  misc_feature (16)..(366): Homolog of NCBI NO: 15224539 NR Description: 3-hydroxyisobutyryl-coenzyme A hydrolase; protein
  misc_feature (1)..(369): Homolog of NCBI NO: 22329062 NR Description: enoyl-CoA hydratase - like protein; protein id: supported by cDNA: gi_19424018, supported by cDNA: gi_21281144
  misc_feature (9)..(359): Homolog of NCBI NO: 37536724 NR Description: putative enoyl-CoA-hydratase [Oryza sativa
  misc_feature (113)..(369): Homolog of NCBI NO: 2688820 NR Description: enoyl-CoA hydratase [Prunus armeniaca]
  misc_feature (13)..(369): Homolog of NCBI NO: 30679729 NR Description: 3-hydroxyisobutyryl-coenzyme A hydrolase
  misc_feature (1)..(369): Homolog of NCBI NO: 7484947 NR Description: enoyl-CoA hydratase homolog F11C18.10 -
  misc_feature (13)..(368): Homolog of NCBI NO: 22122625 NR Description: RIKEN cDNA 2610509I15 [Mus musculus]
MATLPREGAAAADSDQLLVEAHGSTRTLILNRPKQLNALSSEMIKGLLWYFTAFEKDDGVRLLIMKGNRRVFCSGGDIAQCARCLYNGNWKWVDDFFQNEYLLNYIIATYIKPQVSILSGIVMGGGAGVSIHGRFRVATDNTIFAMPETALGLFPDVGASYFLSRLPGFYGEYVGLTGARLDGAEMLACGLATHFVPSKRLPLLEESLKKLDTSSTFAVSGIIDQFSQRPLVKDSSSLNRMETINKCFSKRTVEEIIDALEQEISNVSDKWVAATIKSLKKASPTSLKISLRSIREGRTQTLGECLRREYRVVCHVLRGTFSRDLSEGFRAVLLEKDNKPEWIPPRLEQVPDEAVEQYFLRIDDPQCKI

SEQ ID NO: 5038 - protein, 327 aa, Zea mays subsp. mays
  peptide (1)..(327): Ceres Seq. ID no. 12373694
  misc_feature (1)..(155): Pfam Name: Enoyl-CoA hydratase/isomerase family Pfam Description: Enoyl-CoA hydratase/isomerase family
  misc_feature (1)..(321): Homolog of NCBI NO: 15239206 NR Description: 3-hydroxyisobutyryl-coenzyme A hydrolase; protein
  misc_feature (1)..(324): Homolog of NCBI NO: 15224549 NR Description: 3-hydroxyisobutyryl-coenzyme A hydrolase; protein
  misc_feature (1)..(322): Homolog of NCBI NO: 6014701 NR Description: enoyl-CoA-hydratase [Avicennia marina]
  misc_feature (1)..(324): Homolog of NCBI NO: 15224539 NR Description: 3-hydroxyisobutyryl-coenzyme A hydrolase; protein
  misc_feature (1)..(327): Homolog of NCBI NO: 22329062 NR Description: enoyl-CoA hydratase - like protein; protein id: supported by cDNA: gi_19424018, supported by cDNA: gi_21281144
  misc_feature (1)..(317): Homolog of NCBI NO: 37536724 NR Description: putative enoyl-CoA-hydratase [Oryza sativa
  misc_feature (71)..(327): Homolog of NCBI NO: 2688820 NR Description: enoyl-CoA hydratase [Prunus armeniaca]
  misc_feature (1)..(327): Homolog of NCBI NO: 30679729 NR Description: 3-hydroxyisobutyryl-coenzyme A hydrolase
  misc_feature (1)..(327): Homolog of NCBI NO: 7484947 NR Description: enoyl-CoA hydratase homolog F11C18.10 -
  misc_feature (1)..(326): Homolog of NCBI NO: 22122625 NR Description: RIKEN cDNA 2610509I15 [Mus musculus]
MIKGLLWYFTAFEKDDGVRLLIMKGNRRVFCSGGDIAQCARCLYNGNWKWVDDFFQNEYLLNYIIATYIKPQVSILSGIVMGGGAGVSIHGRFRVATDNTIFAMPETALGLFPDVGASYFLSRLPGFYGEYVGLTGARLDGAEMLACGLATHFVPSKRLPLLEESLKKLDTSSTFAVSGIIDQFSQRPLVKDSSSLNRMETINKCFSKRTVEEIIDALEQEISNVSDKWVAATIKSLKKASPTSLKISLRSIREGRTQTLGECLRREYRVVCHVLRGTFSRDLSEGFRAVLLEKDNKPEWIPPRLEQVPDEAVEQYFLRIDDPQCKI

SEQ ID NO: 5039 - protein, 305 aa, Zea mays subsp. mays
  peptide (1)..(305): Ceres Seq. ID no. 12373695
  misc_feature (1)..(133): Pfam Name: Enoyl-CoA hydratase/isomerase family Pfam Description: Enoyl-CoA hydratase/isomerase family
  misc_feature (1)..(299): Homolog of NCBI NO: 15239206 NR Description: 3-hydroxyisobutyryl-coenzyme A hydrolase; protein
  misc_feature (1)..(302): Homolog of NCBI NO: 15224549 NR Description: 3-hydroxyisobutyryl-coenzyme A hydrolase; protein
  misc_feature (1)..(300): Homolog of NCBI NO: 6014701 NR Description: enoyl-CoA-hydratase [Avicennia marina]
  misc_feature (1)..(302): Homolog of NCBI NO: 15224539 NR Description: 3-hydroxyisobutyryl-coenzyme A hydrolase; protein
  misc_feature (1)..(305): Homolog of NCBI NO: 22329062 NR Description: enoyl-CoA hydratase - like protein; protein id: supported by cDNA: gi_19424018, supported by cDNA: gi_21281144
  misc_feature (1)..(295): Homolog of NCBI NO: 37536724 NR Description: putative enoyl-CoA-hydratase [Oryza sativa
  misc_feature (49)..(305): Homolog of NCBI NO: 2688820 NR Description: enoyl-CoA hydratase [Prunus armeniaca]
  misc_feature (1)..(305): Homolog of NCBI NO: 30679729 NR Description: 3-hydroxyisobutyryl-coenzyme A hydrolase
  misc_feature (1)..(305): Homolog of NCBI NO: 7484947 NR Description: enoyl-CoA hydratase homolog F11C18.10 -
  misc_feature (1)..(304): Homolog of NCBI NO: 22122625 NR Description: RIKEN cDNA 2610509I15 [Mus musculus]
MKGNRRVFCSGGDIAQCARCLYNGNWKWVDDFFQNEYLLNYIIATYIKPQVSILSGIVMGGGAGVSIHGRFRVATDNTIFAMPETALGLFPDVGASYFLSRLPGFYGEYVGLTGARLDGAEMLACGLATHFVPSKRLPLLEESLKKLDTSSTFAVSGIIDQFSQRPLVKDSSSLNRMETINKCFSKRTVEEIIDALEQEISNVSDKWVAATIKSLKKASPTSLKISLRSIREGRTQTLGECLRREYRVVCHVLRGTFSRDLSEGFRAVLLEKDNKPEWIPPRLEQVPDEAVEQYFLRIDDPQCKI

SEQ ID NO: 5040 - DNA, 1317 bp, Zea mays subsp. mays
  misc_feature (1)..(1317): Ceres Seq. ID no. 12349036
  misc_feature: MA Experiment ID: 108523 Result: Down-regulated in Transcription
  misc_feature: MA Experiment 108523 PARAMETER Experiment Name: Zm_42deg_Heat_P Parameter: Age (day) Value: 8
  misc_feature: MA Experiment 108523 PARAMETER Experiment Name: Zm_42deg_Heat_P Parameter: Organism Value: Zea mays
  misc_feature: MA Experiment 108523 PARAMETER Experiment Name: Zm_42deg_Heat_P Parameter: Plant Line Value: 35A19
  misc_feature: MA Experiment 108523 PARAMETER Experiment Name: Zm_42deg_Heat_P Parameter: Temperature (deg C) Value: 42 vs. 22
  misc_feature: MA Experiment 108523 PARAMETER Experiment Name: Zm_42deg_Heat_P Parameter: Timepoint (hr) Value: 6
  misc_feature: MA Experiment 108523 PARAMETER Experiment Name: Zm_42deg_Heat_P Parameter: Tissue Value: Aerial
  misc_feature: MA Experiment ID: 108527 Result: Down-regulated in Transcription
  misc_feature: MA Experiment 108527 PARAMETER Experiment Name: Zm_5mM_NO_P Parameter: Age (day) Value: 8
  misc_feature: MA Experiment 108527 PARAMETER Experiment Name: Zm_5mM_NO_P Parameter: Organism Value: Zea mays
  misc_feature: MA Experiment 108527 PARAMETER Experiment Name: Zm_5mM_NO_P Parameter: Plant Line Value: 35A19
  misc_feature: MA Experiment 108527 PARAMETER Experiment Name: Zm_5mM_NO_P Parameter: Timepoint (hr) Value: 6
  misc_feature: MA Experiment 108527 PARAMETER Experiment Name: Zm_5mM_NO_P Parameter: Tissue Value: Aerial
  misc_feature: MA Experiment 108527 PARAMETER Experiment Name: Zm_5mM_NO_P Parameter: Treatment Value: 5mM NO vs. No Treatment
  misc_feature: MA Experiment ID: 108528 Result: Up-regulated in Transcription
  misc_feature: MA Experiment 108528 PARAMETER Experiment Name: Zm_Imbibed_Seeds_P Parameter: Age (day) Value: 5 vs. 2
  misc_feature: MA Experiment 108528 PARAMETER Experiment Name: Zm_Imbibed_Seeds_P Parameter: Organism Value: Zea mays
  misc_feature: MA Experiment 108528 PARAMETER Experiment Name: Zm_Imbibed_Seeds_P Parameter: Plant Line Value: 35A19
  misc_feature: MA Experiment 108528 PARAMETER Experiment Name: Zm_Imbibed_Seeds_P Parameter: Tissue Value: Aerial vs. Embryo
  misc_feature: MA Experiment ID: 108529 Result: Down-regulated in Transcription
  misc_feature: MA Experiment 108529 PARAMETER Experiment Name: Zm_Imbibed_Seeds_P Parameter: Age (day) Value: 5 vs. 2
  misc_feature: MA Experiment 108529 PARAMETER Experiment Name: Zm_Imbibed_Seeds_P Parameter: Organism Value: Zea mays
  misc_feature: MA Experiment 108529 PARAMETER Experiment Name: Zm_Imbibed_Seeds_P Parameter: Plant Line Value: 35A19
  misc_feature: MA Experiment 108529 PARAMETER Experiment Name: Zm_Imbibed_Seeds_P Parameter: Tissue Value: Roots vs. Embryo
  misc_feature: MA Experiment ID: 108530 Result: Up-regulated in Transcription
  misc_feature: MA Experiment 108530 PARAMETER Experiment Name: Zm_Imbibed_Seeds_P Parameter: Age (day) Value: 6 vs. 2
  misc_feature: MA Experiment 108530 PARAMETER Experiment Name: Zm_Imbibed_Seeds_P Parameter: Organism Value: Zea mays
  misc_feature: MA Experiment 108530 PARAMETER Experiment Name: Zm_Imbibed_Seeds_P Parameter: Plant Line Value: 35A19
  misc_feature: MA Experiment 108530 PARAMETER Experiment Name: Zm_Imbibed_Seeds_P Parameter: Tissue Value: Aerial vs. Embryo
  misc_feature: MA Experiment ID: 108545 Result: Up-regulated in Transcription
  misc_feature: MA Experiment 108545 PARAMETER Experiment Name: Zm_Imbibed_Seeds_P Parameter: Age (day) Value: 3 vs. 2
  misc_feature: MA Experiment 108545 PARAMETER Experiment Name: Zm_Imbibed_Seeds_P Parameter: Organism Value: Zea mays
  misc_feature: MA Experiment 108545 PARAMETER Experiment Name: Zm_Imbibed_Seeds_P Parameter: Plant Line Value: 35A19
  misc_feature: MA Experiment 108545 PARAMETER Experiment Name: Zm_Imbibed_Seeds_P Parameter: Tissue Value: Aerial vs. Embryo
  misc_feature: MA Experiment ID: 108546 Result: Down-regulated in Transcription
  misc_feature: MA Experiment 108546 PARAMETER Experiment Name: Zm_Imbibed_Seeds_P Parameter: Age (day) Value: 3 vs. 2
  misc_feature: MA Experiment 108546 PARAMETER Experiment Name: Zm_Imbibed_Seeds_P Parameter: Organism Value: Zea mays
  misc_feature: MA Experiment 108546 PARAMETER Experiment Name: Zm_Imbibed_Seeds_P Parameter: Plant Line Value: 35A19
  misc_feature: MA Experiment 108546 PARAMETER Experiment Name: Zm_Imbibed_Seeds_P Parameter: Tissue Value: Roots vs. Embryo
  misc_feature: MA Experiment ID: 108547 Result: Up-regulated in Transcription
  misc_feature: MA Experiment 108547 PARAMETER Experiment Name: Zm_Imbibed_Seeds_P Parameter: Age (day) Value: 4 vs. 2
  misc_feature: MA Experiment 108547 PARAMETER Experiment Name: Zm_Imbibed_Seeds_P Parameter: Organism Value: Zea mays
  misc_feature: MA Experiment 108547 PARAMETER Experiment Name: Zm_Imbibed_Seeds_P Parameter: Plant Line Value: 35A19
  misc_feature: MA Experiment 108547 PARAMETER Experiment Name: Zm_Imbibed_Seeds_P Parameter: Tissue Value: Aerial vs. Embryo
  misc_feature: MA Experiment ID: 20000487 Result: Up-regulated in Transcription
  misc_feature: MA Experiment 20000487 PARAMETER Experiment Name: Zm_50mM_NH4NO3_L_to_H_P Parameter: Organism Value: Zea mays
  misc_feature: MA Experiment 20000487 PARAMETER Experiment Name: Zm_50mM_NH4NO3_L_to_H_P Parameter: Timepoint (hr) Value: 4
  misc_feature: MA Experiment 20000487 PARAMETER Experiment Name: Zm_50mM_NH4NO3_L_to_H_P Parameter: Tissue Value: Leaves
  misc_feature: MA Experiment 20000487 PARAMETER Experiment Name: Zm_50mM_NH4NO3_L_to_H_P Parameter: Treatment Value: 50mM NH4NO3 vs. 100mM Mannitol
  misc_feature: MA Experiment ID: 20000534 Result: Down-regulated in Transcription
  misc_feature: MA Experiment 20000534 PARAMETER Experiment Name: Zm_Hybrid_Pollen_P Parameter: Age (day) Value: 8
  misc_feature: MA Experiment 20000534 PARAMETER Experiment Name: Zm_Hybrid_Pollen_P Parameter: Organism Value: Zea mays
  misc_feature: MA Experiment 20000534 PARAMETER Experiment Name: Zm_Hybrid_Pollen_P Parameter: Plant Line Value: 35A19
  misc_feature: MA Experiment 20000534 PARAMETER Experiment Name: Zm_Hybrid_Pollen_P Parameter: Tissue Value: Pollen vs. Aerial
aatttttcctcacgtattatcctcttgcttgttcgtccggttcttcgccctcgccgcgcgggactaccaatccaaactggcgacgaccctgctgccaccccacagcagatttgaggagcggacgcccgtttaaatggctattggagtcccatccatggagctccaccgctcctcaccgttgctctcgggtggccgaggaggaaatacatgcctacagaagaagcccttctttgtccaagcaaagagactagtggggatggagaaagcaagtacgaggccaggaacacaagagtctggacagacaaagaaaagagcacccctggttcgtggaactgttagcccacctcttccagtaccaggaaacatacctcggcctccttatgtcggcacagaatatgtaccagagatagcaaaagagatacaaatgcatgacaaagagggcattgtccacatgagagctgcttgcgagctcgcggctcgtgttcttgactatgcaggaacgttagtgaaaccctctgtaacaacagacgaaattgataaagcagtgcacaagatgatcatcgatgctggagcctatccatcaccacttggatatggtgggtttccaaaaagtgtatgcacctcagtgaatgagtgcatgtgccatggaattcctgattcacgcgagctacaggatggagacataattaacattgatgtcactgtctacttgaatggttatcatggggatacctcaaaaacatttctttgtggagaagtcgatgaagccagtaaacgacttgtgaaggttactgaagagtgcttgctcaggggcatatcaacatgcaaacatggtaccagctttaagaagattggcagaagaataagtgagcatgctgagaggaacggttttggtgttgtggagtgttttgttgggcatggagtcggcagggtatttcactcagaaccaattatctatcaccagaggaacaacagaccgggccagatgattgaagggcagactttcacaatagagccgatcatatcgatggggagcatcgagtgcgacatgtgggacgacggctggactgccgtgacgacggacggcagcttggcggcgcagttcgagcacaccatactgatcaccaggaccggagccgagatcctcaccaagtgctaggaggaaaggaaatcgcatgtgcccgatagccgacggtaggtaatctgtattcgtgaggtggtgaggatgcttgaggtgacctattttgtctcgcaaaatgggcgtgctacagaatagtgaagaaaagggttgagagattgcaaatggcaggtttggcc

SEQ ID NO: 5041 - protein, 341 aa, Zea mays subsp. mays
  peptide (1)..(341): Ceres Seq. ID no. 12349037
  misc_feature (8)..(341): Homolog of NCBI NO: 38345794 NR Description: OSJNBa0085I10.11 [Oryza sativa (japonica
  misc_feature (13)..(341): Homolog of NCBI NO: 15222218 NR Description: methionine aminopeptidase I (MAP1), putative; id: At1g13270.1, supported by cDNA: gi_11320955 [Arabidopsis
  misc_feature (3)..(341): Homolog of NCBI NO: 11320956 NR Description: methionine aminopeptidase-like protein
  misc_feature (14)..(340): Homolog of NCBI NO: 34394646 NR Description: putative methionine aminopeptidase I (MAP1)
  misc_feature (52)..(339): Homolog of NCBI NO: 7939560 NR Description: methionine aminopeptidase-like protein
  misc_feature (59)..(341): Homolog of NCBI NO: 18419957 NR Description: methionyl aminopeptidase-like protein; protein At4g37040.1 [Arabidopsis thaliana]
  misc_feature (59)..(341): Homolog of NCBI NO: 25289731 NR Description: methionyl aminopeptidase-like protein [imported] -
  misc_feature (52)..(339): Homolog of NCBI NO: 15230872 NR Description: methionine aminopeptidase, putative; protein id:
  misc_feature (52)..(339): Homolog of NCBI NO: 11320958 NR Description: methionine aminopeptidase-like protein
  misc_feature (62)..(339): Homolog of NCBI NO: 23018702 NR Description: hypothetical protein [Thermobifida fusca]
MAIGVPSMELHRSSPLLSGGRGGNTCLQKKPFFVQAKRLVGMEKASTRPGTQESGQTKKRAPLVRGTVSPPLPVPGNIPRPPYVGTEYVPEIAKEIQMHDKEGIVHMRAACELAARVLDYAGTLVKPSVTTDEIDKAVHKMIIDAGAYPSPLGYGGFPKSVCTSVNECMCHGIPDSRELQDGDIINIDVTVYLNGYHGDTSKTFLCGEVDEASKRLVKVTEECLLRGISTCKHGTSFKKIGRRISEHAERNGFGVVECFVGHGVGRVFHSEPIIYHQRNNRPGQMIEGQTFTIEPIISMGSIECDMWDDGWTAVTTDGSLAAQFEHTILITRTGAEILTKC

SEQ ID NO: 5042 - protein, 334 aa, Zea mays subsp. mays
  peptide (1)..(334): Ceres Seq. ID no. 12349038
  misc_feature (1)..(334): Homolog of NCBI NO: 38345794 NR Description: OSJNBa0085I10.11 [Oryza sativa (japonica
  misc_feature (6)..(334): Homolog of NCBI NO: 15222218 NR Description: methionine aminopeptidase I (MAP1), putative; id: At1g13270.1, supported by cDNA: gi_11320955 [Arabidopsis
  misc_feature (1)..(334): Homolog of NCBI NO: 11320956 NR Description: methionine aminopeptidase-like protein
  misc_feature (7)..(333): Homolog of NCBI NO: 34394646 NR Description: putative methionine aminopeptidase I (MAP1)
  misc_feature (45)..(332): Homolog of NCBI NO: 7939560 NR Description: methionine aminopeptidase-like protein
  misc_feature (52)..(334): Homolog of NCBI NO: 18419957 NR Description: methionyl aminopeptidase-like protein; protein At4g37040.1 [Arabidopsis thaliana]
  misc_feature (52)..(334): Homolog of NCBI NO: 25289731 NR Description: methionyl aminopeptidase-like protein [imported] -
  misc_feature (45)..(332): Homolog of NCBI NO: 15230872 NR Description: methionine aminopeptidase, putative; protein id:
  misc_feature (45)..(332): Homolog of NCBI NO: 11320958 NR Description: methionine aminopeptidase-like protein
  misc_feature (55)..(332): Homolog of NCBI NO: 23018702 NR Description: hypothetical protein [Thermobifida fusca]
MELHRSSPLLSGGRGGNTCLQKKPFFVQAKRLVGMEKASTRPGTQESGQTKKRAPLVRGTVSPPLPVPGNIPRPPYVGTEYVPEIAKEIQMHDKEGIVHMRAACELAARVLDYAGTLVKPSVTTDEIDKAVHKMIIDAGAYPSPLGYGGFPKSVCTSVNECMCHGIPDSRELQDGDIINIDVTVYLNGYHGDTSKTFLCGEVDEASKRLVKVTEECLLRGISTCKHGTSFKKIGRRISEHAERNGFGVVECFVGHGVGRVFHSEPIIYHQRNNRPGQMIEGQTFTIEPIISMGSIECDMWDDGWTAVTTDGSLAAQFEHTILITRTGAEILTKC

SEQ ID NO: 5043 - protein, 300 aa, Zea mays subsp. mays
  peptide (1)..(300): Ceres Seq. ID no. 12349039
  misc_feature (1)..(300): Homolog of NCBI NO: 38345794 NR Description: OSJNBa0085I10.11 [Oryza sativa (japonica
  misc_feature (1)..(300): Homolog of NCBI NO: 15222218 NR Description: methionine aminopeptidase I (MAP1), putative; id: At1g13270.1, supported by cDNA: gi_11320955 [Arabidopsis
  misc_feature (1)..(300): Homolog of NCBI NO: 11320956 NR Description: methionine aminopeptidase-like protein
  misc_feature (1)..(299): Homolog of NCBI NO: 34394646 NR Description: putative methionine aminopeptidase I (MAP1)
  misc_feature (11)..(298): Homolog of NCBI NO: 7939560 NR Description: methionine aminopeptidase-like protein
  misc_feature (18)..(300): Homolog of NCBI NO: 18419957 NR Description: methionyl aminopeptidase-like protein; protein At4g37040.1 [Arabidopsis thaliana]
  misc_feature (18)..(300): Homolog of NCBI NO: 25289731 NR Description: methionyl aminopeptidase-like protein [imported] -
  misc_feature (11)..(298): Homolog of NCBI NO: 15230872 NR Description: methionine aminopeptidase, putative; protein id:
  misc_feature (11)..(298): Homolog of NCBI NO: 11320958 NR Description: methionine aminopeptidase-like protein
  misc_feature (21)..(298): Homolog of NCBI NO: 23018702 NR Description: hypothetical protein [Thermobifida fusca]
MEKASTRPGTQESGQTKKRAPLVRGTVSPPLPVPGNIPRPPYVGTEYVPEIAKEIQMHDKEGIVHMRAACELAARVLDYAGTLVKPSVTTDEIDKAVHKMIIDAGAYPSPLGYGGFPKSVCTSVNECMCHGIPDSRELQDGDIINIDVTVYLNGYHGDTSKTFLCGEVDEASKRLVKVTEECLLRGISTCKHGTSFKKIGRRISEHAERNGFGVVECFVGHGVGRVFHSEPIIYHQRNNRPGQMIEGQTFTIEPIISMGSIECDMWDDGWTAVTTDGSLAAQFEHTILITRTGAEILTKC

SEQ ID NO: 5044 - DNA, 717 bp, Zea mays subsp. mays
  misc_feature (1)..(717): Ceres Seq. ID no. 13493634
  misc_feature: MA Experiment ID: 108504 Result: Down-regulated in Transcription
  misc_feature: MA Experiment 108504 PARAMETER Experiment Name: Zm_Drought_P Parameter: Age (day) Value: 8
  misc_feature: MA Experiment 108504 PARAMETER Experiment Name: Zm_Drought_P Parameter: Organism Value: Zea mays
  misc_feature: MA Experiment 108504 PARAMETER Experiment Name: Zm_Drought_P Parameter: Plant Line Value: 35A19
  misc_feature: MA Experiment 108504 PARAMETER Experiment Name: Zm_Drought_P Parameter: Timepoint (hr) Value: 12
  misc_feature: MA Experiment 108504 PARAMETER Experiment Name: Zm_Drought_P Parameter: Tissue Value: Aerial
  misc_feature: MA Experiment 108504 PARAMETER Experiment Name: Zm_Drought_P Parameter: Treatment Value: Drought vs. No Drought
  misc_feature: MA Experiment ID: 108515 Result: Down-regulated in Transcription
  misc_feature: MA Experiment 108515 PARAMETER Experiment Name: Zm_2mM_SA_P Parameter: Age (day) Value: 8
  misc_feature: MA Experiment 108515 PARAMETER Experiment Name: Zm_2mM_SA_P Parameter: Organism Value: Zea mays
  misc_feature: MA Experiment 108515 PARAMETER Experiment Name: Zm_2mM_SA_P Parameter: Plant Line Value: 35A19
  misc_feature: MA Experiment 108515 PARAMETER Experiment Name: Zm_2mM_SA_P Parameter: Timepoint (hr) Value: 12
  misc_feature: MA Experiment 108515 PARAMETER Experiment Name: Zm_2mM_SA_P Parameter: Tissue Value: Aerial
  misc_feature: MA Experiment 108515 PARAMETER Experiment Name: Zm_2mM_SA_P Parameter: Treatment Value: 2mM SA vs. No Treatment
  misc_feature: MA Experiment ID: 108522 Result: Down-regulated in Transcription
  misc_feature: MA Experiment 108522 PARAMETER Experiment Name: Zm_42deg_Heat_P Parameter: Age (day) Value: 8
  misc_feature: MA Experiment 108522 PARAMETER Experiment Name: Zm_42deg_Heat_P Parameter: Organism Value: Zea mays
  misc_feature: MA Experiment 108522 PARAMETER Experiment Name: Zm_42deg_Heat_P Parameter: Plant Line Value: 35A19
  misc_feature: MA Experiment 108522 PARAMETER Experiment Name: Zm_42deg_Heat_P Parameter: Temperature (deg C) Value: 42 vs. 22
  misc_feature: MA Experiment 108522 PARAMETER Experiment Name: Zm_42deg_Heat_P Parameter: Timepoint (hr) Value: 1
  misc_feature: MA Experiment 108522 PARAMETER Experiment Name: Zm_42deg_Heat_P Parameter: Tissue Value: Aerial
  misc_feature: MA Experiment ID: 108523 Result: Down-regulated in Transcription
  misc_feature: MA Experiment 108523 PARAMETER Experiment Name: Zm_42deg_Heat_P Parameter: Age (day) Value: 8
  misc_feature: MA Experiment 108523 PARAMETER Experiment Name: Zm_42deg_Heat_P Parameter: Organism Value: Zea mays
  misc_feature: MA Experiment 108523 PARAMETER Experiment Name: Zm_42deg_Heat_P Parameter: Plant Line Value: 35A19
  misc_feature: MA Experiment 108523 PARAMETER Experiment Name: Zm_42deg_Heat_P Parameter: Temperature (deg C) Value: 42 vs. 22
  misc_feature: MA Experiment 108523 PARAMETER Experiment Name: Zm_42deg_Heat_P Parameter: Timepoint (hr) Value: 6
  misc_feature: MA Experiment 108523 PARAMETER Experiment Name: Zm_42deg_Heat_P Parameter: Tissue Value: Aerial
  misc_feature: MA Experiment ID: 108526 Result: Down-regulated in Transcription
  misc_feature: MA Experiment 108526 PARAMETER Experiment Name: Zm_5mM_NO_P Parameter: Age (day) Value: 8
  misc_feature: MA Experiment 108526 PARAMETER Experiment Name: Zm_5mM_NO_P Parameter: Organism Value: Zea mays
  misc_feature: MA Experiment 108526 PARAMETER Experiment Name: Zm_5mM_NO_P Parameter: Plant Line Value: 35A19
  misc_feature: MA Experiment 108526 PARAMETER Experiment Name: Zm_5mM_NO_P Parameter: Timepoint (hr) Value: 1
  misc_feature: MA Experiment 108526 PARAMETER Experiment Name: Zm_5mM_NO_P Parameter: Tissue Value: Aerial
  misc_feature: MA Experiment 108526 PARAMETER Experiment Name: Zm_5mM_NO_P Parameter: Treatment Value: 5mM NO vs. No Treatment
  misc_feature: MA Experiment ID: 108527 Result: Down-regulated in Transcription
  misc_feature: MA Experiment 108527 PARAMETER Experiment Name: Zm_5mM_NO_P Parameter: Age (day) Value: 8
  misc_feature: MA Experiment 108527 PARAMETER Experiment Name: Zm_5mM_NO_P Parameter: Organism Value: Zea mays
  misc_feature: MA Experiment 108527 PARAMETER Experiment Name: Zm_5mM_NO_P Parameter: Plant Line Value: 35A19
  misc_feature: MA Experiment 108527 PARAMETER Experiment Name: Zm_5mM_NO_P Parameter: Timepoint (hr) Value: 6
  misc_feature: MA Experiment 108527 PARAMETER Experiment Name: Zm_5mM_NO_P Parameter: Tissue Value: Aerial
  misc_feature: MA Experiment 108527 PARAMETER Experiment Name: Zm_5mM_NO_P Parameter: Treatment Value: 5mM NO vs. No Treatment
  misc_feature: MA Experiment ID: 108540 Result: Down-regulated in Transcription
  misc_feature: MA Experiment 108540 PARAMETER Experiment Name: Zm_20percent_PEG_P Parameter: Age (day) Value: 8
  misc_feature: MA Experiment 108540 PARAMETER Experiment Name: Zm_20percent_PEG_P Parameter: Organism Value: Zea mays
  misc_feature: MA Experiment 108540 PARAMETER Experiment Name: Zm_20percent_PEG_P Parameter: Plant Line Value: 35A19
  misc_feature: MA Experiment 108540 PARAMETER Experiment Name: Zm_20percent_PEG_P Parameter: Timepoint (hr) Value: 6
  misc_feature: MA Experiment 108540 PARAMETER Experiment Name: Zm_20percent_PEG_P Parameter: Tissue Value: Aerial
  misc_feature: MA Experiment 108540 PARAMETER Experiment Name: Zm_20percent_PEG_P Parameter: Treatment Value: 20percent PEG vs. No Treatment
  misc_feature: MA Experiment ID: 108559 Result: Down-regulated in Transcription
  misc_feature: MA Experiment 108559 PARAMETER Experiment Name: Zm_5mM_NO_P Parameter: Age (day) Value: 8
  misc_feature: MA Experiment 108559 PARAMETER Experiment Name: Zm_5mM_NO_P Parameter: Organism Value: Zea mays
  misc_feature: MA Experiment 108559 PARAMETER Experiment Name: Zm_5mM_NO_P Parameter: Plant Line Value: 35A19
  misc_feature: MA Experiment 108559 PARAMETER Experiment Name: Zm_5mM_NO_P Parameter: Timepoint (hr) Value: 12
  misc_feature: MA Experiment 108559 PARAMETER Experiment Name: Zm_5mM_NO_P Parameter: Tissue Value: Aerial
  misc_feature: MA Experiment 108559 PARAMETER Experiment Name: Zm_5mM_NO_P Parameter: Treatment Value: 5mM NO vs. No Treatment
  misc_feature: MA Experiment ID: 20000478 Result: Down-regulated in Transcription
  misc_feature: MA Experiment 20000478 PARAMETER Experiment Name: Zm_5mM_SA_P Parameter: Age (day) Value: 11
  misc_feature: MA Experiment 20000478 PARAMETER Experiment Name: Zm_5mM_SA_P Parameter: Organism Value: Zea mays
  misc_feature: MA Experiment 20000478 PARAMETER Experiment Name: Zm_5mM_SA_P Parameter: Plant Line Value: 35A19
  misc_feature: MA Experiment 20000478 PARAMETER Experiment Name: Zm_5mM_SA_P Parameter: Timepoint (hr) Value: 72
  misc_feature: MA Experiment 20000478 PARAMETER Experiment Name: Zm_5mM_SA_P Parameter: Tissue Value: Aerial
  misc_feature: MA Experiment 20000478 PARAMETER Experiment Name: Zm_5mM_SA_P Parameter: Treatment Value: 5mM SA vs. No Treatment
  misc_feature: MA Experiment ID: 20000479 Result: Down-regulated in Transcription
  misc_feature: MA Experiment 20000479 PARAMETER Experiment Name: Zm_Drought_P Parameter: Age (day) Value: 10
  misc_feature: MA Experiment 20000479 PARAMETER Experiment Name: Zm_Drought_P Parameter: Organism Value: Zea mays
  misc_feature: MA Experiment 20000479 PARAMETER Experiment Name: Zm_Drought_P Parameter: Plant Line Value: 35A19
  misc_feature: MA Experiment 20000479 PARAMETER Experiment Name: Zm_Drought_P Parameter: Timepoint (hr) Value: 48
  misc_feature: MA Experiment 20000479 PARAMETER Experiment Name: Zm_Drought_P Parameter: Tissue Value: Aerial
  misc_feature: MA Experiment 20000479 PARAMETER Experiment Name: Zm_Drought_P Parameter: Treatment Value: Drought vs. No Drought
  misc_feature: MA Experiment ID: 20000480 Result: Down-regulated in Transcription
  misc_feature: MA Experiment 20000480 PARAMETER Experiment Name: Zm_Drought_P Parameter: Age (day) Value: 11
  misc_feature: MA Experiment 20000480 PARAMETER Experiment Name: Zm_Drought_P Parameter: Organism Value: Zea mays
  misc_feature: MA Experiment 20000480 PARAMETER Experiment Name: Zm_Drought_P Parameter: Plant Line Value: 35A19
  misc_feature: MA Experiment 20000480 PARAMETER Experiment Name: Zm_Drought_P Parameter: Timepoint (hr) Value: 72
  misc_feature: MA Experiment 20000480 PARAMETER Experiment Name: Zm_Drought_P Parameter: Tissue Value: Aerial
  misc_feature: MA Experiment 20000480 PARAMETER Experiment Name: Zm_Drought_P Parameter: Treatment Value: Drought vs. No Drought
  misc_feature: MA Experiment ID: 20001610 Result: Down-regulated in Transcription
  misc_feature: MA Experiment 20001610 PARAMETER Experiment Name: Zm_50ppm_KNO3_L-to-H_P Parameter: Age (day) Value: 19
  misc_feature: MA Experiment 20001610 PARAMETER Experiment Name: Zm_50ppm_KNO3_L-to-H_P Parameter: Organism Value: Zea mays
  misc_feature: MA Experiment 20001610 PARAMETER Experiment Name: Zm_50ppm_KNO3_L-to-H_P Parameter: Plant Line Value: 35A19
  misc_feature: MA Experiment 20001610 PARAMETER Experiment Name: Zm_50ppm_KNO3_L-to-H_P Parameter: Timepoint (hr) Value: 2
  misc_feature: MA Experiment 20001610 PARAMETER Experiment Name: Zm_50ppm_KNO3_L-to-H_P Parameter: Tissue Value: Roots
  misc_feature: MA Experiment 20001610 PARAMETER Experiment Name: Zm_50ppm_KNO3_L-to-H_P Parameter: Treatment Value: 50ppm KNO3 vs. 50ppm KCl
  misc_feature: MA Experiment ID: 20001613 Result: Down-regulated in Transcription
  misc_feature: MA Experiment 20001613 PARAMETER Experiment Name: Zm_50ppm_KNO3_L-to-H_P Parameter: Age (day) Value: 20
  misc_feature: MA Experiment 20001613 PARAMETER Experiment Name: Zm_50ppm_KNO3_L-to-H_P Parameter: Organism Value: Zea mays
  misc_feature: MA Experiment 20001613 PARAMETER Experiment Name: Zm_50ppm_KNO3_L-to-H_P Parameter: Plant Line Value: 35A19
  misc_feature: MA Experiment 20001613 PARAMETER Experiment Name: Zm_50ppm_KNO3_L-to-H_P Parameter: Timepoint (hr) Value: 24
  misc_feature: MA Experiment 20001613 PARAMETER Experiment Name: Zm_50ppm_KNO3_L-to-H_P Parameter: Tissue Value: Roots
  misc_feature: MA Experiment 20001613 PARAMETER Experiment Name: Zm_50ppm_KNO3_L-to-H_P Parameter: Treatment Value: 50ppm KNO3 vs. 50ppm KCl
taatcgaaaagcacacactactacactaggctacacactgtacgtacacttctctccctcccctccccctttcccggagcctttgcttcactcgcgtcgccgagctggctagcgacaagcgcgacaccgtcggcggcggcgacgccggcccgcgcctcgatgacggcgaggactcgtccgccgtgagcagcaaggcggtggtcgaggagctgtaccgcgcgctggagcgcggcgacgtggacgccgtgcgccgcctgctgaacccggacgtggactggtggttccacggcccgcgcgcgcaccagcacctggtgctcatgcgcctgctcaccggcaccggcgccggcgccggcctcccgttcaagatccggtccctggacgccttcgggccgacggtgctggccgagggcgccgacgcgacgggcgcgctctactgggtgcacgcgtggaccgtgggccccggcggccgcgtcaccggggtgcgcgagtactgcaacaccgcgctcgtcgtcgccgtcgaagcaggtgtggcagagccggctgcccgaccgggctcgcaggaacctccctggcctcgtgcttgcgatctgaccggatcggatgcgaatcatgcgacatataggttgttgcccagccaactggcggtgtggcttattatgcttgtgcatgtctgcaatgtggttacaattggacatgaatgaatcaaatgcgccacac

SEQ ID NO: 5045 - protein, 127 aa, Zea mays subsp. mays
  peptide (1)..(127): Ceres Seq. ID no. 13493635
  misc_feature (1)..(89): Homolog of NCBI NO: 15228414 NR Description: expressed protein [Arabidopsis thaliana]
  misc_feature (1)..(65): Homolog of NCBI NO: 34898184 NR Description: P0034A04.2 [Oryza sativa (japonica
  misc_feature (1)..(65): Homolog of NCBI NO: 15241041 NR Description: expressed protein [Arabidopsis thaliana]
  misc_feature (1)..(65): Homolog of NCBI NO: 10241935 NR Description: elicitor inducible protein [Nicotiana tabacum]
  misc_feature (1)..(84): Homolog of NCBI NO: 4574320 NR Description: wound-induced protein WI12 [Mesembryanthemum
  misc_feature (1)..(65): Homolog of NCBI NO: 139780 NR Description: WOUND-INDUCED PROTEIN 1 >gi|82293|pir||JQ0398
  misc_feature (1)..(89): Homolog of NCBI NO: 15028339 NR Description: unknown protein [Arabidopsis thaliana]
MRLLTGTGAGAGLPFKIRSLDAFGPTVLAEGADATGALYWVHAWTVGPGGRVTGVREYCNTALVVAVEAGVAEPAARPGSQEPPWPRACDLTGSDANHATYRLLPSQLAVWLIMLVHVCNVVTIGHE

SEQ ID NO: 5046 - DNA, 1447 bp, Zea mays subsp. mays
  misc_feature (1)..(1447): Ceres Seq. ID no. 12407271
  misc_feature: MA Experiment ID: 108527 Result: Up-regulated in Transcription
  misc_feature: MA Experiment 108527 PARAMETER Experiment Name: Zm_5mM_NO_P Parameter: Age (day) Value: 8
  misc_feature: MA Experiment 108527 PARAMETER Experiment Name: Zm_5mM_NO_P Parameter: Organism Value: Zea mays
  misc_feature: MA Experiment 108527 PARAMETER Experiment Name: Zm_5mM_NO_P Parameter: Plant Line Value: 35A19
  misc_feature: MA Experiment 108527 PARAMETER Experiment Name: Zm_5mM_NO_P Parameter: Timepoint (hr) Value: 6
  misc_feature: MA Experiment 108527 PARAMETER Experiment Name: Zm_5mM_NO_P Parameter: Tissue Value: Aerial
  misc_feature: MA Experiment 108527 PARAMETER Experiment Name: Zm_5mM_NO_P Parameter: Treatment Value: 5mM NO vs. No Treatment
  misc_feature: MA Experiment ID: 108528 Result: Down-regulated in Transcription
  misc_feature: MA Experiment 108528 PARAMETER Experiment Name: Zm_Imbibed_Seeds_P Parameter: Age (day) Value: 5 vs. 2
  misc_feature: MA Experiment 108528 PARAMETER Experiment Name: Zm_Imbibed_Seeds_P Parameter: Organism Value: Zea mays
  misc_feature: MA Experiment 108528 PARAMETER Experiment Name: Zm_Imbibed_Seeds_P Parameter: Plant Line Value: 35A19
  misc_feature: MA Experiment 108528 PARAMETER Experiment Name: Zm_Imbibed_Seeds_P Parameter: Tissue Value: Aerial vs. Embryo
  misc_feature: MA Experiment ID: 108530 Result: Down-regulated in Transcription
  misc_feature: MA Experiment 108530 PARAMETER Experiment Name: Zm_Imbibed_Seeds_P Parameter: Age (day) Value: 6 vs. 2
  misc_feature: MA Experiment 108530 PARAMETER Experiment Name: Zm_Imbibed_Seeds_P Parameter: Organism Value: Zea mays
  misc_feature: MA Experiment 108530 PARAMETER Experiment Name: Zm_Imbibed_Seeds_P Parameter: Plant Line Value: 35A19
  misc_feature: MA Experiment 108530 PARAMETER Experiment Name: Zm_Imbibed_Seeds_P Parameter: Tissue Value: Aerial vs. Embryo
  misc_feature: MA Experiment ID: 108536 Result: Up-regulated in Transcription
  misc_feature: MA Experiment 108536 PARAMETER Experiment Name: Zm_Meristem_P Parameter: Age (day) Value: 8
  misc_feature: MA Experiment 108536 PARAMETER Experiment Name: Zm_Meristem_P Parameter: Organism Value: Zea mays
  misc_feature: MA Experiment 108536 PARAMETER Experiment Name: Zm_Meristem_P Parameter: Plant Line Value: 35A19
  misc_feature: MA Experiment 108536 PARAMETER Experiment Name: Zm_Meristem_P Parameter: Tissue Value: Shoot Meristem vs. Above Shoot Meristem
  misc_feature: MA Experiment ID: 108544 Result: Down-regulated in Transcription
  misc_feature: MA Experiment ID: 108547 Result: Down-regulated in Transcription
  misc_feature: MA Experiment 108547 PARAMETER Experiment Name: Zm_Imbibed_Seeds_P Parameter: Age (day) Value: 4 vs. 2
  misc_feature: MA Experiment 108547 PARAMETER Experiment Name: Zm_Imbibed_Seeds_P Parameter: Organism Value: Zea mays
  misc_feature: MA Experiment 108547 PARAMETER Experiment Name: Zm_Imbibed_Seeds_P Parameter: Plant Line Value: 35A19
  misc_feature: MA Experiment 108547 PARAMETER Experiment Name: Zm_Imbibed_Seeds_P Parameter: Tissue Value: Aerial vs. Embryo
  misc_feature: MA Experiment ID: 20000492 Result: Up-regulated in Transcription
  misc_feature: MA Experiment 20000492 PARAMETER Experiment Name: Zm_Hybrid_Seed_Dev_P Parameter: DAP Value: 12
  misc_feature: MA Experiment 20000492 PARAMETER Experiment Name: Zm_Hybrid_Seed_Dev_P Parameter: Organism Value: Zea mays
  misc_feature: MA Experiment 20000492 PARAMETER Experiment Name: Zm_Hybrid_Seed_Dev_P Parameter: Plant Line Value: 35A19
  misc_feature: MA Experiment 20000492 PARAMETER Experiment Name: Zm_Hybrid_Seed_Dev_P Parameter: Tissue Value: Fert Kernel vs. Unfert Floret
aagaactaaggcttgtccctttccctctcctctcctcccctcccctccgtctccaactcccatcttctctcctggaagccgcctcggtcggacccggacaagatggccgccttcttcggtgctgcaccgccgccggctctcgcttcgttccgccacgaggaggaggagcagcagcatcaggacgccgccgaggaggtgtaccacgtggacgatgtcgacgagggcagcggtgacggccgtggccacggcggcgccggccaggggaagctgtgcgccaggggccactggcgccccgccgaggacgccaagctcaaggagctcgtcgcgcagttcgggccccagaactggaacctcatcgccgagaggctggacggcagatcagggaagagctgccgcctgcggtggttcaaccagctggacccgcggatcaaccggcgcgccttctcggaggaggaggaggagcggctcctggcggcgcaccgcgcgtacggcaacaagtgggctctcatcgcgcgcctcttcccgggccgcaccgacaacgccgtcaagaaccactggcacgtcctcatggcgcgcaggcagcgggagcactcgggcgcgctccgccgccgcaagccctcctcgacctcgccctcgccggcgccggcgccggcgccgcacctggcgcccgtcgtcgtcctccaccaccaccaccactacgccggcggctcccctcccatgccgccgttgcacgccgccgacgcccacacgcagtacacggcagcggcggcggcagcggacacccgcgcgcacagcggcggcgagtccgacgagaccgcctccacgtgcaccaccgacctctccctcgcttccgccgccccctgcttctaccagagtggctacgacgtggccccgccgcgccgcggcgttcgcaccgagcgcgcgctccgccttctccgcgccgccggcgacggcgcgctccgacgacaaggtctcgctgcccttcttcgacttcctcggcgtcggcgcggcgtgatgggggggccggcccgggccggccaggcggcggtgtacaggagggcggaggcggtcaaaggacgagagccccggcggcggtgaatccgtgcccgcgcgtagtttagctttagagcccgagttaaatcatcgagaacagaacatggcctgagcctgagagaggaggagaatggcgatccaccattgaactggtgcccgtggcattgcagactaacagctccgcatccgttcggctgctgatgttgctagtagtaatggtacggtgattactctctgctttgggttgggagagacgagtttgcaagcaccaccagaccaagcaagggcgacgatgggtatgggtggatgtttgcagaagaagaaaaaaccgcttgtaacacaaactgcaggacaaaggcagatcagagatcctctgctaactctctttttaccc

SEQ ID NO: 5047 - protein, 337 aa, Zea mays subsp. mays
  peptide (1)..(337): Ceres Seq. ID no. 12407272
  misc_feature (67)..(307): Pfam Name: Equine herpesvirus glycoprotein gp2 Pfam Description: Equine herpesvirus glycoprotein gp2
  misc_feature (6)..(318): Homolog of NCBI NO: 11360318 NR Description: probable mucin DKFZp434C196.1 - human (fragment)
  misc_feature (67)..(337): Homolog of NCBI NO: 30313663 NR Description: sublingual apomucin [Mus musculus]
  misc_feature (2)..(337): Homolog of NCBI NO: 30313663 NR Description: sublingual apomucin [Mus musculus]
  misc_feature (12)..(337): Homolog of NCBI NO: 25408663 NR Description: En/Spm-like transposon protein [imported] -
  misc_feature (12)..(337): Homolog of NCBI NO: 30688133 NR Description: En/Spm-related transposon protein [Arabidopsis
  misc_feature (14)..(318): Homolog of NCBI NO: 11360318 NR Description: probable mucin DKFZp434C196.1 - human (fragment)
  misc_feature (23)..(319): Homolog of NCBI NO: 34868816 NR Description: similar to splicing coactivator subunit SRm300;
  misc_feature (2)..(325): Homolog of NCBI NO: 11360318 NR Description: probable mucin DKFZp434C196.1 - human (fragment)
  misc_feature (47)..(318): Homolog of NCBI NO: 30313663 NR Description: sublingual apomucin [Mus musculus]
  misc_feature (23)..(317): Homolog of NCBI NO: 34868816 NR Description: similar to splicing coactivator subunit SRm300;
RTKACPFPSPLLPSPPSPTPIFSPGSRLGRTRTRWPPSSVLHRRRLSLRSATRRRSSSIRTPPRRCTTWTMSTRAAVTAVATAAPARGSCAPGATGAPPRTPSSRSSSRSSGPRTGTSSPRGWTADQGRAAACGGSTSWTRGSTGAPSRRRRRSGSWRRTARTATSGLSSRASSRAAPTTPSRTTGTSSWRAGSGSTRARSAAASPPRPRPRRRRRRRRTWRPSSSSTTTTTTPAAPLPCRRCTPPTPTRSTRQRRRQRTPARTAAASPTRPPPRAPPTSPSLPPPPASTRVATTWPRRAAAFAPSARSAFSAPPATARSDDKVSLPFFDFLGVGAA

SEQ ID NO: 5048 - protein, 331 aa, Zea mays subsp. mays
  peptide (1)..(331): Ceres Seq. ID no. 12407273
  misc_feature (59)..(105): Pfam Name: Myb-like DNA-binding domain Pfam Description: Myb-like DNA-binding domain
  misc_feature (1)..(281): Homolog of NCBI NO: 34903242 NR Description: unnamed protein product [Oryza sativa (japonica group)] >gi|6539552|dbj|BAA88169.1| unnamed protein product
  misc_feature (18)..(196): Homolog of NCBI NO: 18396049 NR Description: myb-related protein, putative; protein id: supported by cDNA: gi_13430157 [Arabidopsis thaliana]
  misc_feature (18)..(196): Homolog of NCBI NO: 25403271 NR Description: protein T24P13.16 [imported] - Arabidopsis >gi|9295726|gb|AAF87032.1|AC006535_10 T24P13.16 [Arabidopsis
  misc_feature (58)..(187): Homolog of NCBI NO: 15222362 NR Description: MYB-family transcription factor, putative; id: At1g69560.1, supported by cDNA: gi_7644365 [Arabidopsis
  misc_feature (46)..(176): Homolog of NCBI NO: 9759057 NR Description: Myb-like transcription factor-like protein
  misc_feature (46)..(176): Homolog of NCBI NO: 15238028 NR Description: MYB56 R2R3-MYB factor family member; protein id:
  misc_feature (42)..(187): Homolog of NCBI NO: 6979341 NR Description: myb-like protein [Oryza sativa]
  misc_feature (56)..(178): Homolog of NCBI NO: 11358543 NR Description: myb-related transcription factor MYB54 [imported] Arabidopsis thaliana >gi|3941472|gb|AAC83612.1| putative
  misc_feature (56)..(178): Homolog of NCBI NO: 15219462 NR Description: myb family transcription factor(MYB54); protein
  misc_feature (56)..(170): Homolog of NCBI NO: 21321780 NR Description: putative Myb/Myb-related protein [Oryza sativa
MAAFFGAAPPPALASFRHEEEEQQHQDAAEEVYHVDDVDEGSGDGRGHGGAGQGKLCARGHWRPAEDAKLKELVAQFGPQNWNLIAERLDGRSGKSCRLRWFNQLDPRINRRAFSEEEEERLLAAHRAYGNKWALIARLFPGRTDNAVKNHWHVLMARRQREHSGALRRRKPSSTSPSPAPAPAPHLAPVVVLHHHHHYAGGSPPMPPLHAADAHTQYTAAAAAADTRAHSGGESDETASTCTTDLSLASAAPCFYQSGYDVAPPRRGVRTERALRLLRAAGDGALRRQGLAALLRLPRRRRGVMGGPARAGQAAVYRRAEAVKGREPRRR

SEQ ID NO: 5049 - protein, 267 aa, Zea mays subsp. mays
  peptide (1)..(267): Ceres Seq. ID no. 12407274
  misc_feature (1)..(237): Pfam Name: Equine herpesvirus glycoprotein gp2 Pfam Description: Equine herpesvirus glycoprotein gp2
  misc_feature (1)..(248): Homolog of NCBI NO: 11360318 NR Description: probable mucin DKFZp434C196.1 - human (fragment)
  misc_feature (1)..(267): Homolog of NCBI NO: 30313663 NR Description: sublingual apomucin [Mus musculus]
  misc_feature (1)..(267): Homolog of NCBI NO: 30313663 NR Description: sublingual apomucin [Mus musculus]
  misc_feature (1)..(267): Homolog of NCBI NO: 25408663 NR Description: En/Spm-like transposon protein [imported] -
  misc_feature (1)..(267): Homolog of NCBI NO: 30688133 NR Description: En/Spm-related transposon protein [Arabidopsis
  misc_feature (1)..(248): Homolog of NCBI NO: 11360318 NR Description: probable mucin DKFZp434C196.1 - human (fragment)
  misc_feature (1)..(249): Homolog of NCBI NO: 34868816 NR Description: similar to splicing coactivator subunit SRm300;
  misc_feature (1)..(255): Homolog of NCBI NO: 11360318 NR Description: probable mucin DKFZp434C196.1 - human (fragment)
  misc_feature (1)..(248): Homolog of NCBI NO: 30313663 NR Description: sublingual apomucin [Mus musculus]
  misc_feature (1)..(247): Homolog of NCBI NO: 34868816 NR Description: similar to splicing coactivator subunit SRm300;
MSTRAAVTAVATAAPARGSCAPGATGAPPRTPSSRSSSRSSGPRTGTSSPRGWTADQGRAAACGGSTSWTRGSTGAPSRRRRRSGSWRRTARTATSGLSSRASSRAAPTTPSRTTGTSSWRAGSGSTRARSAAASPPRPRPRRRRRRRRTWRPSSSSTTTTTTPAAPLPCRRCTPPTPTRSTRQRRRQRTPARTAAASPTRPPPRAPPTSPSLPPPPASTRVATTWPRRAAAFAPSARSAFSAPPATARSDDKVSLPFFDFLGVGAA

SEQ ID NO: 5050 - DNA, 1892 bp, Zea mays subsp. mays
  misc_feature (1)..(1892): Ceres Seq. ID no. 12344080
  misc_feature: MA Experiment ID: 108527 Result: Up-regulated in Transcription
  misc_feature: MA Experiment 108527 PARAMETER Experiment Name: Zm_5mM_NO_P Parameter: Age (day) Value: 8
  misc_feature: MA Experiment 108527 PARAMETER Experiment Name: Zm_5mM_NO_P Parameter: Organism Value: Zea mays
  misc_feature: MA Experiment 108527 PARAMETER Experiment Name: Zm_5mM_NO_P Parameter: Plant Line Value: 35A19
  misc_feature: MA Experiment 108527 PARAMETER Experiment Name: Zm_5mM_NO_P Parameter: Timepoint (hr) Value: 6
  misc_feature: MA Experiment 108527 PARAMETER Experiment Name: Zm_5mM_NO_P Parameter: Tissue Value: Aerial
  misc_feature: MA Experiment 108527 PARAMETER Experiment Name: Zm_5mM_NO_P Parameter: Treatment Value: 5mM NO vs. No Treatment
  misc_feature: MA Experiment ID: 108528 Result: Down-regulated in Transcription
  misc_feature: MA Experiment 108528 PARAMETER Experiment Name: Zm_Imbibed_Seeds_P Parameter: Age (day) Value: 5 vs. 2
  misc_feature: MA Experiment 108528 PARAMETER Experiment Name: Zm_Imbibed_Seeds_P Parameter: Organism Value: Zea mays
  misc_feature: MA Experiment 108528 PARAMETER Experiment Name: Zm_Imbibed_Seeds_P Parameter: Plant Line Value: 35A19
  misc_feature: MA Experiment 108528 PARAMETER Experiment Name: Zm_Imbibed_Seeds_P Parameter: Tissue Value: Aerial vs. Embryo
  misc_feature: MA Experiment ID: 108530 Result: Down-regulated in Transcription
  misc_feature: MA Experiment 108530 PARAMETER Experiment Name: Zm_Imbibed_Seeds_P Parameter: Age (day) Value: 6 vs. 2
  misc_feature: MA Experiment 108530 PARAMETER Experiment Name: Zm_Imbibed_Seeds_P Parameter: Organism Value: Zea mays
  misc_feature: MA Experiment 108530 PARAMETER Experiment Name: Zm_Imbibed_Seeds_P Parameter: Plant Line Value: 35A19
  misc_feature: MA Experiment 108530 PARAMETER Experiment Name: Zm_Imbibed_Seeds_P Parameter: Tissue Value: Aerial vs. Embryo
  misc_feature: MA Experiment ID: 108547 Result: Down-regulated in Transcription
  misc_feature: MA Experiment 108547 PARAMETER Experiment Name: Zm_Imbibed_Seeds_P Parameter: Age (day) Value: 4 vs. 2
  misc_feature: MA Experiment 108547 PARAMETER Experiment Name: Zm_Imbibed_Seeds_P Parameter: Organism Value: Zea mays
  misc_feature: MA Experiment 108547 PARAMETER Experiment Name: Zm_Imbibed_Seeds_P Parameter: Plant Line Value: 35A19
  misc_feature: MA Experiment 108547 PARAMETER Experiment Name: Zm_Imbibed_Seeds_P Parameter: Tissue Value: Aerial vs. Embryo
  misc_feature: MA Experiment ID: 108559 Result: Up-regulated in Transcription
  misc_feature: MA Experiment 108559 PARAMETER Experiment Name: Zm_5mM_NO_P Parameter: Age (day) Value: 8
  misc_feature: MA Experiment 108559 PARAMETER Experiment Name: Zm_5mM_NO_P Parameter: Organism Value: Zea mays
  misc_feature: MA Experiment 108559 PARAMETER Experiment Name: Zm_5mM_NO_P Parameter: Plant Line Value: 35A19
  misc_feature: MA Experiment 108559 PARAMETER Experiment Name: Zm_5mM_NO_P Parameter: Timepoint (hr) Value: 12
  misc_feature: MA Experiment 108559 PARAMETER Experiment Name: Zm_5mM_NO_P Parameter: Tissue Value: Aerial
  misc_feature: MA Experiment 108559 PARAMETER Experiment Name: Zm_5mM_NO_P Parameter: Treatment Value: 5mM NO vs. No Treatment
aaagcaacggacccccattcgcatccgcctccttttccttggagccgaagaagagggaaaggaagggaggacagccgccgccgccgccatcaccaccgtcaggatgcattccacgaacctcctgctcgaggagcccatccggatggcctccatcctcgagccctccaagcccagctacttcccggcgatgaccaagatcgtcggcactctcggccccaagtcgcgctccgtcgacacgatctccgcctgcctcaaggccggcatgtccgtcgcccggttcgatttctcgtggggggacgccgcgtaccaccaggagacgctggagaacctcaagctctccatcaagtccaccaagaagctctgcgcgtgtcatgctcgacaccgtgggcccggagctgcaggtggtgaacaagagcgagaccccgatctccctcgaggagaatggcacggtcgttctcacccctcaccgggggccaagacgcctcctccagcttgctgcccatcaacttctctggactcgccaaggcggtgacaccaggggcaacaatattcgtgggacaatacttgttcactggcagtgagaccacctcagtttggttggaggtttctgaagtgaaaggagatgatgtggtgtgtataatcaagaacacagccaccttggctgggtcactgttcacgctgcattgctcccagattcacattgacttgcccaccctgtctgatgaggataaggatgtcattagaaaatggggtactcccaataagattgacttcctttctctgtcctacacaagacatgcagaggatgtgcgccaggcacgggaattcctgtcaaaattgggcgatctaagccagactctgatttttgccaaaattgagaatgtcgagggcctgaaccaatttgatgaaatactggctgaggcagatggtatcattttatcaagagggaacctgggaattgatcttccacctgagaaggtctttttgtttcaaaaatctgctcttcacaagtgcaacatggctggaaagcctgctgttgtcactcgtgttgtggacagtatgactgacaacctcaggcctactcgggcggaggcaactgatgtggccaatgcagtacttgacgggagtgatgccattctccttggtgctgagactcttcgaggtttatatccagttgagactatttcgacagtgggcagaatttgtgctgaggctgagaaggtattcaaccaagatttatacttcaagcaaactgtgaaatatgtcggagaacccatgacccacttggagtccattgcttcctcagcggtgcgagctgctatcaaagttaaggcttcggtgatcatttgcttcacctcttctgggagggctgcaaggctcatcgccaagtacaggcccaccatgcctgttctttctgttgtcattcctcgtctgaagacaaaccaactgagatggagtttcactggtgcttttgaggcaagacagtcgctgatagttagaggcctctttccgatgcttgctgatcctcggcatccagccgaatcaaccagtaatacaaatgagtcagttctgaaggttgctctagaccatggcaaggcatgtggtgtgatcaagtcccatgaccgtgttgtcgtttgccagaaggtgggagattcatcggttgtgaagatcattgagctggacgactagggcatactttgccgattttttttttttgacgaggccggaatttgttggctatatgtataatcctatagctttctttacaaatgagcagtttttccctatggtgccatcataggacttgcttagcgatttaaaactcgattatgtgccacctaaaatgggcagatggaacaatgaaatcatactgtgccctttatccgttgctt

SEQ ID NO: 5051 - protein, 415 aa, Zea mays subsp. mays
  peptide (1)..(415): Ceres Seq. ID no. 12344081
  misc_feature (282)..(412): Pfam Name: Pyruvate kinase, alpha/beta domain Pfam Description: Pyruvate kinase, alpha/beta domain
  misc_feature (11)..(415): Homolog of NCBI NO: 20562907 NR Description: pyruvate kinase-like [Deschampsia antarctica]
  misc_feature (12)..(415): Homolog of NCBI NO: 18409740 NR Description: pyruvate kinase - like protein; protein id: supported by cDNA: 12298., supported by cDNA: gi_14194098 thaliana] >gi|14194099|gb|AAK56244.1|AF367255_1
  misc_feature (12)..(415): Homolog of NCBI NO: 18404169 NR Description: putative pyruvate kinase; protein id: supported by cDNA: 120685., supported by cDNA: gi_17978969 thaliana] >gi|17978970|gb|AAL47446.1| At2g36580/F1O11.21
  misc_feature (12)..(415): Homolog of NCBI NO: 21537122 NR Description: putative pyruvate kinase [Arabidopsis thaliana]
  misc_feature (12)..(415): Homolog of NCBI NO: 23308151 NR Description: At2g36580/F1O11.21 [Arabidopsis thaliana]
  misc_feature (12)..(415): Homolog of NCBI NO: 11260409 NR Description: pyruvate kinase-like protein - Arabidopsis
  misc_feature (12)..(415): Homolog of NCBI NO: 25287747 NR Description: probable pyruvate kinase [imported] - Arabidopsis
  misc_feature (17)..(411): Homolog of NCBI NO: 2497543 NR Description: Pyruvate kinase, cytosolic isozyme
  misc_feature (17)..(411): Homolog of NCBI NO: 34903274 NR Description: unnamed protein product [Oryza sativa (japonica group)] >gi|6539568|dbj|BAA88185.1| unnamed protein product
  misc_feature (15)..(410): Homolog of NCBI NO: 125606 NR Description: Pyruvate kinase, cytosolic isozyme
MARSFSPLTGGQDASSSLLPINFSGLAKAVTPGATIFVGQYLFTGSETTSVWLEVSEVKGDDVVCIIKNTATLAGSLFTLHCSQIHIDLPTLSDEDKDVIRKWGTPNKIDFLSLSYTRHAEDVRQAREFLSKLGDLSQTLIFAKIENVEGLNQFDEILAEADGIILSRGNLGIDLPPEKVFLFQKSALHKCNMAGKPAVVTRVVDSMTDNLRPTRAEATDVANAVLDGSDAILLGAETLRGLYPVETISTVGRICAEAEKVFNQDLYFKQTVKYVGEPMTHLESIASSAVRAAIKVKASVIICFTSSGRAARLIAKYRPTMPVLSVVIPRLKTNQLRWSFTGAFEARQSLIVRGLFPMLADPRHPAESTSNTNESVLKVALDHGKACGVIKSHDRVVVCQKVGDSSVVKIIELDD

SEQ ID NO: 5052 - protein, 223 aa, Zea mays subsp. mays
  peptide (1)..(223): Ceres Seq. ID no. 12344082
  misc_feature (90)..(220): Pfam Name: Pyruvate kinase, alpha/beta domain Pfam Description: Pyruvate kinase, alpha/beta domain
  misc_feature (1)..(223): Homolog of NCBI NO: 20562907 NR Description: pyruvate kinase-like [Deschampsia antarctica]
  misc_feature (1)..(223): Homolog of NCBI NO: 18409740 NR Description: pyruvate kinase - like protein; protein id: supported by cDNA: 12298., supported by cDNA: gi_14194098 thaliana] >gi|14194099|gb|AAK56244.1|AF367255_1
  misc_feature (1)..(223): Homolog of NCBI NO: 18404169 NR Description: putative pyruvate kinase; protein id: supported by cDNA: 120685., supported by cDNA: gi_17978969 thaliana] >gi|17978970|gb|AAL47446.1| At2g36580/F1O11.21
  misc_feature (1)..(223): Homolog of NCBI NO: 21537122 NR Description: putative pyruvate kinase [Arabidopsis thaliana]
  misc_feature (1)..(223): Homolog of NCBI NO: 23308151 NR Description: At2g36580/F1O11.21 [Arabidopsis thaliana]
  misc_feature (1)..(223): Homolog of NCBI NO: 11260409 NR Description: pyruvate kinase-like protein - Arabidopsis
  misc_feature (1)..(223): Homolog of NCBI NO: 25287747 NR Description: probable pyruvate kinase [imported] - Arabidopsis
  misc_feature (1)..(219): Homolog of NCBI NO: 2497543 NR Description: Pyruvate kinase, cytosolic isozyme
  misc_feature (1)..(219): Homolog of NCBI NO: 34903274 NR Description: unnamed protein product [Oryza sativa (japonica group)] >gi|6539568|dbj|BAA88185.1| unnamed protein product
  misc_feature (1)..(218): Homolog of NCBI NO: 125606 NR Description: Pyruvate kinase, cytosolic isozyme
MAGKPAVVTRVVDSMTDNLRPTRAEATDVANAVLDGSDAILLGAETLRGLYPVETISTVGRICAEAEKVFNQDLYFKQTVKYVGEPMTHLESIASSAVRAAIKVKASVIICFTSSGRAARLIAKYRPTMPVLSVVIPRLKTNQLRWSFTGAFEARQSLIVRGLFPMLADPRHPAESTSNTNESVLKVALDHGKACGVIKSHDRVVVCQKVGDSSVVKIIELDD

SEQ ID NO: 5053 - protein, 209 aa, Zea mays subsp. mays
  peptide (1)..(209): Ceres Seq. ID no. 12344083
  misc_feature (76)..(206): Pfam Name: Pyruvate kinase, alpha/beta domain Pfam Description: Pyruvate kinase, alpha/beta domain
  misc_feature (1)..(209): Homolog of NCBI NO: 20562907 NR Description: pyruvate kinase-like [Deschampsia antarctica]
  misc_feature (1)..(209): Homolog of NCBI NO: 18409740 NR Description: pyruvate kinase - like protein; protein id: supported by cDNA: 12298., supported by cDNA: gi_14194098 thaliana] >gi|14194099|gb|AAK56244.1|AF367255_1
  misc_feature (1)..(209): Homolog of NCBI NO: 18404169 NR Description: putative pyruvate kinase; protein id: supported by cDNA: 120685., supported by cDNA: gi_17978969 thaliana] >gi|17978970|gb|AAL47446.1| At2g36580/F1O11.21
  misc_feature (1)..(209): Homolog of NCBI NO: 21537122 NR Description: putative pyruvate kinase [Arabidopsis thaliana]
  misc_feature (1)..(209): Homolog of NCBI NO: 23308151 NR Description: At2g36580/F1O11.21 [Arabidopsis thaliana]
  misc_feature (1)..(209): Homolog of NCBI NO: 11260409 NR Description: pyruvate kinase-like protein - Arabidopsis
  misc_feature (1)..(209): Homolog of NCBI NO: 25287747 NR Description: probable pyruvate kinase [imported] - Arabidopsis
  misc_feature (1)..(205): Homolog of NCBI NO: 2497543 NR Description: Pyruvate kinase, cytosolic isozyme
  misc_feature (1)..(205): Homolog of NCBI NO: 34903274 NR Description: unnamed protein product [Oryza sativa (japonica group)] >gi|6539568|dbj|BAA88185.1| unnamed protein product
  misc_feature (1)..(204): Homolog of NCBI NO: 125606 NR Description: Pyruvate kinase, cytosolic isozyme
MTDNLRPTRAEATDVANAVLDGSDAILLGAETLRGLYPVETISTVGRICAEAEKVFNQDLYFKQTVKYVGEPMTHLESIASSAVRAAIKVKASVIICFTSSGRAARLIAKYRPTMPVLSVVIPRLKTNQLRWSFTGAFEARQSLIVRGLFPMLADPRHPAESTSNTNESVLKVALDHGKACGVIKSHDRVVVCQKVGDSSVVKIIELDD

SEQ ID NO: 5054 - DNA, 991 bp, Zea mays subsp. mays
  misc_feature (1)..(991): Ceres Seq. ID no. 12343786
  misc_feature: MA Experiment ID: 108544 Result: Down-regulated in Transcription
  misc_feature: MA Experiment ID: 108687 Result: Down-regulated in Transcription
  misc_feature: MA Experiment 108687 PARAMETER Experiment Name: Zm_Embryos-Flowers__P Parameter: Tissue Value: Embryo vs. Aerial+
gttgtgcgtcttttcctcagcagcaaccggagagcggctgctcgcctgctcctcctcctagggaaaggacagcggcggcggcggcggcggcgagaagttgggcctgaagcccggacgctttctcccgagataccgcaatactgctagagcactgtcactaatgtttgcttatgacaatggagtcacctacaactgccgctggtggtgaactggagagctacttctccttgggtttgacagtatcccactcacagaaagataatgctgaatttccaaaggttctgttgcttctctcagcgtatcttgacaagacagttcagcagaatgaagagttactagactccagtaaaataaaggagtcgaccactatctttcatggtcagagggtgcctgaacttagtataaagctgtatgcagagcgtattttcaagtatgcaaagtgcagcccatcttgctttgtgctagcacttatctacatggagagatatctacaacaaccaaacatttacatgacgtcatttagtgttcatcgcctgcttattacaagtgttgttgttgctgccaaattcatagatgatgcgtttttcaataatgcatactacgggagagttggaggaattagcacaagagagatgaatatgcttgaactggatttattgttcggtctggacttcaggctcaaagtggatatagagactttcgaaagctactgcttacagttggaggaagcactggttcttgttttggagagaccaattcaggtccaagaggccaacgtaactaaacacttgatttgtaacagcagcgccgatgagacttgcaaacacgagctcgggcttgaaaggtacagcagtcaggctgtccaagggtgtagttggtaaatgtgattgggcagatagttttgaaaaaagtgtatgggtccgagtattggtaattcttttatttgacatttaagttgttcagttggccttgtttagtagggccgttattc

SEQ ID NO: 5055 - protein, 236 aa, Zea mays subsp. mays
  peptide (1)..(236): Ceres Seq. ID no. 12343787
  misc_feature (41)..(170): Pfam Name: Cyclin, N-terminal domain Pfam Description: Cyclin, N-terminal domain
  misc_feature (36)..(220): Homolog of NCBI NO: 15224950 NR Description: putative PREG1-like negative regulator; protein
  misc_feature (21)..(189): Homolog of NCBI NO: 25493992 NR Description: PREG-like protein [imported] - Picea mariana
  misc_feature (3)..(186): Homolog of NCBI NO: 15229382 NR Description: putative protein; protein id: At3g63120.1, by cDNA: 35075. [Arabidopsis thaliana] >gi|11358166|pir||T48101
  misc_feature (3)..(186): Homolog of NCBI NO: 21593009 NR Description: unknown [Arabidopsis thaliana]
  misc_feature (26)..(190): Homolog of NCBI NO: 15240794 NR Description: putative protein; protein id: At5g07450.1
  misc_feature (8)..(190): Homolog of NCBI NO: 15233185 NR Description: PREG-like protein, putative; protein id:
  misc_feature (28)..(219): Homolog of NCBI NO: 15240306 NR Description: PREG-like - like protein; protein id: At5g61650.1
  misc_feature (35)..(232): Homolog of NCBI NO: 37536902 NR Description: hypothetical protein [Oryza sativa (japonica group)] >gi|12597875|gb|AAG60183.1| hypothetical protein [Oryza >gi|31433542|gb|AAP55040.1| hypothetical protein [Oryza sativa
  misc_feature (25)..(221): Homolog of NCBI NO: 15232360 NR Description: regulatory protein - like; protein id: At3g60550.1
  misc_feature (28)..(216): Homolog of NCBI NO: 32488963 NR Description: OSJNBb0038F03.8 [Oryza sativa (japonica
MTMESPTTAAGGELESYFSLGLTVSHSQKDNAEFPKVLLLLSAYLDKTVQQNEELLDSSKIKESTTIFHGQRVPELSIKLYAERIFKYAKCSPSCFVLALIYMERYLQQPNIYMTSFSVHRLLITSVVVAAKFIDDAFFNNAYYGRVGGISTREMNMLELDLLFGLDFRLKVDIETFESYCLQLEEALVLVLERPIQVQEANVTKHLICNSSADETCKHELGLERYSSQAVQGCSW

SEQ ID NO: 5056 - protein, 234 aa, Zea mays subsp. mays
  peptide (1)..(234): Ceres Seq. ID no. 12343788
  misc_feature (39)..(168): Pfam Name: Cyclin, N-terminal domain Pfam Description: Cyclin, N-terminal domain
  misc_feature (34)..(218): Homolog of NCBI NO: 15224950 NR Description: putative PREG1-like negative regulator; protein
  misc_feature (19)..(187): Homolog of NCBI NO: 25493992 NR Description: PREG-like protein [imported] - Picea mariana
  misc_feature (1)..(184): Homolog of NCBI NO: 15229382 NR Description: putative protein; protein id: At3g63120.1, by cDNA: 35075. [Arabidopsis thaliana] >gi|11358166|pir||T48101
  misc_feature (1)..(184): Homolog of NCBI NO: 21593009 NR Description: unknown [Arabidopsis thaliana]
  misc_feature (24)..(188): Homolog of NCBI NO: 15240794 NR Description: putative protein; protein id: At5g07450.1
  misc_feature (6)..(188): Homolog of NCBI NO: 15233185 NR Description: PREG-like protein, putative; protein id:
  misc_feature (26)..(217): Homolog of NCBI NO: 15240306 NR Description: PREG-like - like protein; protein id: At5g61650.1
  misc_feature (33)..(230): Homolog of NCBI NO: 37536902 NR Description: hypothetical protein [Oryza sativa (japonica group)] >gi|12597875|gb|AAG60183.1| hypothetical protein [Oryza >gi|31433542|gb|AAP55040.1| hypothetical protein [Oryza sativa
  misc_feature (23)..(219): Homolog of NCBI NO: 15232360 NR Description: regulatory protein - like; protein id: At3g60550.1
  misc_feature (26)..(214): Homolog of NCBI NO: 32488963 NR Description: OSJNBb0038F03.8 [Oryza sativa (japonica
MESPTTAAGGELESYFSLGLTVSHSQKDNAEFPKVLLLLSAYLDKTVQQNEELLDSSKIKESTTIFHGQRVPELSIKLYAERIFKYAKCSPSCFVLALIYMERYLQQPNIYMTSFSVHRLLITSVVVAAKFIDDAFFNNAYYGRVGGISTREMNMLELDLLFGLDFRLKVDIETFESYCLQLEEALVLVLERPIQVQEANVTKHLICNSSADETCKHELGLERYSSQAVQGCSW

SEQ ID NO: 5057 - protein, 134 aa, Zea mays subsp. mays
  peptide (1)..(134): Ceres Seq. ID no. 12343789
  misc_feature (1)..(68): Pfam Name: Cyclin, N-terminal domain Pfam Description: Cyclin, N-terminal domain
  misc_feature (1)..(118): Homolog of NCBI NO: 15224950 NR Description: putative PREG1-like negative regulator; protein
  misc_feature (1)..(87): Homolog of NCBI NO: 25493992 NR Description: PREG-like protein [imported] - Picea mariana
  misc_feature (1)..(84): Homolog of NCBI NO: 15229382 NR Description: putative protein; protein id: At3g63120.1, by cDNA: 35075. [Arabidopsis thaliana] >gi|11358166|pir||T48101
  misc_feature (1)..(84): Homolog of NCBI NO: 21593009 NR Description: unknown [Arabidopsis thaliana]
  misc_feature (1)..(88): Homolog of NCBI NO: 15240794 NR Description: putative protein; protein id: At5g07450.1
  misc_feature (1)..(88): Homolog of NCBI NO: 15233185 NR Description: PREG-like protein, putative; protein id:
  misc_feature (1)..(117): Homolog of NCBI NO: 15240306 NR Description: PREG-like - like protein; protein id: At5g61650.1
  misc_feature (1)..(130): Homolog of NCBI NO: 37536902 NR Description: hypothetical protein [Oryza sativa (japonica group)] >gi|12597875|gb|AAG60183.1| hypothetical protein [Oryza >gi|31433542|gb|AAP55040.1| hypothetical protein [Oryza sativa
  misc_feature (1)..(119): Homolog of NCBI NO: 15232360 NR Description: regulatory protein - like; protein id: At3g60550.1
  misc_feature (1)..(114): Homolog of NCBI NO: 32488963 NR Description: OSJNBb0038F03.8 [Oryza sativa (japonica
MERYLQQPNIYMTSFSVHRLLITSVVVAAKFIDDAFFNNAYYGRVGGISTREMNMLELDLLFGLDFRLKVDIETFESYCLQLEEALVLVLERPIQVQEANVTKHLICNSSADETCKHELGLERYSSQAVQGCSW

SEQ ID NO: 5058 - DNA, 1084 bp, Zea mays subsp. mays
  misc_feature (1)..(1084): Ceres Seq. ID no. 12407764
  misc_feature: MA Experiment ID: 108535 Result: Down-regulated in Transcription
  misc_feature: MA Experiment 108535 PARAMETER Experiment Name: Zm_Meristem_P Parameter: Age (day) Value: 8
  misc_feature: MA Experiment 108535 PARAMETER Experiment Name: Zm_Meristem_P Parameter: Organism Value: Zea mays
  misc_feature: MA Experiment 108535 PARAMETER Experiment Name: Zm_Meristem_P Parameter: Plant Line Value: 35A19
  misc_feature: MA Experiment 108535 PARAMETER Experiment Name: Zm_Meristem_P Parameter: Tissue Value: Root Meristem vs. Above Root Meristem
  misc_feature: MA Experiment ID: 108543 Result: Up-regulated in Transcription
  misc_feature: MA Experiment ID: 108546 Result: Up-regulated in Transcription
  misc_feature: MA Experiment 108546 PARAMETER Experiment Name: Zm_Imbibed_Seeds_P Parameter: Age (day) Value: 3 vs. 2
  misc_feature: MA Experiment 108546 PARAMETER Experiment Name: Zm_Imbibed_Seeds_P Parameter: Organism Value: Zea mays
  misc_feature: MA Experiment 108546 PARAMETER Experiment Name: Zm_Imbibed_Seeds_P Parameter: Plant Line Value: 35A19
  misc_feature: MA Experiment 108546 PARAMETER Experiment Name: Zm_Imbibed_Seeds_P Parameter: Tissue Value: Roots vs. Embryo
  misc_feature: MA Experiment ID: 108556 Result: Down-regulated in Transcription
  misc_feature: MA Experiment 108556 PARAMETER Experiment Name: Zm_Drought_P Parameter: Age (day) Value: 9
  misc_feature: MA Experiment 108556 PARAMETER Experiment Name: Zm_Drought_P Parameter: Organism Value: Zea mays
  misc_feature: MA Experiment 108556 PARAMETER Experiment Name: Zm_Drought_P Parameter: Plant Line Value: 35A19
  misc_feature: MA Experiment 108556 PARAMETER Experiment Name: Zm_Drought_P Parameter: Timepoint (hr) Value: 24
  misc_feature: MA Experiment 108556 PARAMETER Experiment Name: Zm_Drought_P Parameter: Tissue Value: Aerial
  misc_feature: MA Experiment 108556 PARAMETER Experiment Name: Zm_Drought_P Parameter: Treatment Value: Drought vs. No Drought
  misc_feature: MA Experiment ID: 108687 Result: Down-regulated in Transcription
  misc_feature: MA Experiment 108687 PARAMETER Experiment Name: Zm_Embryos-Flowers__P Parameter: Tissue Value: Embryo vs. Aerial+
  misc_feature: MA Experiment ID: 20000478 Result: Down-regulated in Transcription
  misc_feature: MA Experiment 20000478 PARAMETER Experiment Name: Zm_5mM_SA_P Parameter: Age (day) Value: 11
  misc_feature: MA Experiment 20000478 PARAMETER Experiment Name: Zm_5mM_SA_P Parameter: Organism Value: Zea mays
  misc_feature: MA Experiment 20000478 PARAMETER Experiment Name: Zm_5mM_SA_P Parameter: Plant Line Value: 35A19
  misc_feature: MA Experiment 20000478 PARAMETER Experiment Name: Zm_5mM_SA_P Parameter: Timepoint (hr) Value: 72
  misc_feature: MA Experiment 20000478 PARAMETER Experiment Name: Zm_5mM_SA_P Parameter: Tissue Value: Aerial
  misc_feature: MA Experiment 20000478 PARAMETER Experiment Name: Zm_5mM_SA_P Parameter: Treatment Value: 5mM SA vs. No Treatment
  misc_feature: MA Experiment ID: 20000480 Result: Down-regulated in Transcription
  misc_feature: MA Experiment 20000480 PARAMETER Experiment Name: Zm_Drought_P Parameter: Age (day) Value: 11
  misc_feature: MA Experiment 20000480 PARAMETER Experiment Name: Zm_Drought_P Parameter: Organism Value: Zea mays
  misc_feature: MA Experiment 20000480 PARAMETER Experiment Name: Zm_Drought_P Parameter: Plant Line Value: 35A19
  misc_feature: MA Experiment 20000480 PARAMETER Experiment Name: Zm_Drought_P Parameter: Timepoint (hr) Value: 72
  misc_feature: MA Experiment 20000480 PARAMETER Experiment Name: Zm_Drought_P Parameter: Tissue Value: Aerial
  misc_feature: MA Experiment 20000480 PARAMETER Experiment Name: Zm_Drought_P Parameter: Treatment Value: Drought vs. No Drought
  misc_feature: MA Experiment ID: 20000535 Result: Down-regulated in Transcription
  misc_feature: MA Experiment 20000535 PARAMETER Experiment Name: Zm_Hybrid_Seed_Dev_P Parameter: DAP Value: 30 vs. 12
  misc_feature: MA Experiment 20000535 PARAMETER Experiment Name: Zm_Hybrid_Seed_Dev_P Parameter: Organism Value: Zea mays
  misc_feature: MA Experiment 20000535 PARAMETER Experiment Name: Zm_Hybrid_Seed_Dev_P Parameter: Plant Line Value: 35A19
  misc_feature: MA Experiment 20000535 PARAMETER Experiment Name: Zm_Hybrid_Seed_Dev_P Parameter: Tissue Value: Embryo vs. Unfert Floret
ctgctccttctctggtgaggaggcgtggtgagagactgcgactgcgcgatggaggcgtcgtcgtcggcgttggcgctcgtggccgccgtgctcctcctctcctccccgctcgctgcgtcagatttctgcgtgtgccgttcggaccagccgacggcggtgctgcagaaggcgatcgacttcgcgtgcggcccgcagggcggcgccgactgcacgcccatcctgcagggcggcgggtgctacagcccggacaccgccgccgcgcactgctcctgggccgccaacacctactaccagaacaacaaggccaggggcgccacctgcgacttcggcggcgcagccaccgtctccaccaccgacccgagtttctccgggtgcactttcgcttccagtgccaccagcgccggtgctgggactggaaccgggacggcgggcagcagcaccttcagccccagcgcgggcaccggcttcaacggcaccgggaacgggatgggcggcagcactactaccggcctgggacccacgggcaacgcctttgacgccgccgccgccgccgcgccgggcctgctccccagcgccgcgtccctcggcctcgcactcgccgtcctctccttcctaacctagccctgccgcgccattaacggcagcctcccctcgtcttatgtctggtcgtgttcagtaccatacctctctgaacatgagccagctgctgctgctacttggcttgctccatggcggaaggggacgggccggggagctgtacgtactgcgacgaagaagagtgcggtggaactggctggttggttggttttggttccagcttcattttcacctcacaccccacactgctagtggcgacggtggttggggttgcggggtgcggtgcgtgccttttttgatgaatcctagctacacgacgggatggcgtgtggtttattcgctggtaggatggctgtctcttttcctccgaggaccattcatgtcttccttgtttgtacgtacctctcttcttttcttgttttatgtacaagacttgtcgctagccctttgtttgtttgtttctaatcaaactctttgttctgctgtc

SEQ ID NO: 5059 - protein, 190 aa, Zea mays subsp. mays
  peptide (1)..(190): Ceres Seq. ID no. 12407765
  misc_feature (7)..(189): Homolog of NCBI NO: 22775658 NR Description: contains ESTs
  misc_feature (6)..(183): Homolog of NCBI NO: 21592859 NR Description: unknown [Arabidopsis thaliana]
  misc_feature (8)..(183): Homolog of NCBI NO: 15241485 NR Description: glycosyl hydrolase family 17; protein id: supported by cDNA: 33347. [Arabidopsis thaliana]
  misc_feature (10)..(115): Homolog of NCBI NO: 34909796 NR Description: P0403C05.4 [Oryza sativa (japonica
  misc_feature (8)..(178): Homolog of NCBI NO: 21553768 NR Description: unknown [Arabidopsis thaliana]
  misc_feature (8)..(178): Homolog of NCBI NO: 18409239 NR Description: unknown protein; protein id: At1g69295.1, by cDNA: 16467., supported by cDNA: gi_13877780, supported by gi_15724275, supported by cDNA: gi_15912196, supported by cDNA:
  misc_feature (3)..(136): Homolog of NCBI NO: 21326118 NR Description: putative expressed protein [Sorghum bicolor]
  misc_feature (9)..(187): Homolog of NCBI NO: 30697478 NR Description: glycosyl hydrolase family 17 [Arabidopsis >gi|9759459|dbj|BAB10375.1| to unknown protein [Arabidopsis thaliana]
  misc_feature (8)..(180): Homolog of NCBI NO: 15222715 NR Description: glycosyl hydrolase family 17; protein id: [Arabidopsis thaliana] >gi|25518437|pir||C86391 hypothetical
  misc_feature (8)..(178): Homolog of NCBI NO: 25404810 NR Description: unknown protein, 45065-49536 [imported] -
MEASSSALALVAAVLLLSSPLAASDFCVCRSDQPTAVLQKAIDFACGPQGGADCTPILQGGGCYSPDTAAAHCSWAANTYYQNNKARGATCDFGGAATVSTTDPSFSGCTFASSATSAGAGTGTGTAGSSTFSPSAGTGFNGTGNGMGGSTTTGLGPTGNAFDAAAAAAPGLLPSAASLGLALAVLSFLT

SEQ ID NO: 5060 - protein, 177 aa, Zea mays subsp. mays
  peptide (1)..(177): Ceres Seq. ID no. 12407766
APSLVRRRGERLRLRDGGVVVGVGARGRRAPPLLPARCVRFLRVPFGPADGGAAEGDRLRVRPAGRRRLHAHPAGRRVLQPGHRRRALLLGRQHLLPEQQGQGRHLRLRRRSHRLHHRPEFLRVHFRFQCHQRRCWDWNRDGGQQHLQPQRGHRLQRHRERDGRQHYYRPGTHGQRL

SEQ ID NO: 5061 - protein, 142 aa, Zea mays subsp. mays
  peptide (1)..(142): Ceres Seq. ID no. 12407767
  misc_feature (1)..(77): Homolog of NCBI NO: 9630030 NR Description: unknown [Orgyia pseudotsugata multicapsid
MSGRVQYHTSLNMSQLLLLLGLLHGGRGRAGELYVLRRRRVRWNWLVGWFWFQLHFHLTPHTASGDGGWGCGVRCVPFLMNPSYTTGWRVVYSLVGWLSLFLRGPFMSSLFVRTSLLFLFYVQDLSLALCLFVSNQTLCSAV

SEQ ID NO: 5062 - DNA, 1561 bp, Zea mays subsp. mays
  misc_feature (1)..(1561): Ceres Seq. ID no. 13494774
  misc_feature: MA Experiment ID: 108529 Result: Up-regulated in Transcription
  misc_feature: MA Experiment 108529 PARAMETER Experiment Name: Zm_Imbibed_Seeds_P Parameter: Age (day) Value: 5 vs. 2
  misc_feature: MA Experiment 108529 PARAMETER Experiment Name: Zm_Imbibed_Seeds_P Parameter: Organism Value: Zea mays
  misc_feature: MA Experiment 108529 PARAMETER Experiment Name: Zm_Imbibed_Seeds_P Parameter: Plant Line Value: 35A19
  misc_feature: MA Experiment 108529 PARAMETER Experiment Name: Zm_Imbibed_Seeds_P Parameter: Tissue Value: Roots vs. Embryo
  misc_feature: MA Experiment ID: 108556 Result: Down-regulated in Transcription
  misc_feature: MA Experiment 108556 PARAMETER Experiment Name: Zm_Drought_P Parameter: Age (day) Value: 9
  misc_feature: MA Experiment 108556 PARAMETER Experiment Name: Zm_Drought_P Parameter: Organism Value: Zea mays
  misc_feature: MA Experiment 108556 PARAMETER Experiment Name: Zm_Drought_P Parameter: Plant Line Value: 35A19
  misc_feature: MA Experiment 108556 PARAMETER Experiment Name: Zm_Drought_P Parameter: Timepoint (hr) Value: 24
  misc_feature: MA Experiment 108556 PARAMETER Experiment Name: Zm_Drought_P Parameter: Tissue Value: Aerial
  misc_feature: MA Experiment 108556 PARAMETER Experiment Name: Zm_Drought_P Parameter: Treatment Value: Drought vs. No Drought
  misc_feature: MA Experiment ID: 20000480 Result: Down-regulated in Transcription
  misc_feature: MA Experiment 20000480 PARAMETER Experiment Name: Zm_Drought_P Parameter: Age (day) Value: 11
  misc_feature: MA Experiment 20000480 PARAMETER Experiment Name: Zm_Drought_P Parameter: Organism Value: Zea mays
  misc_feature: MA Experiment 20000480 PARAMETER Experiment Name: Zm_Drought_P Parameter: Plant Line Value: 35A19
  misc_feature: MA Experiment 20000480 PARAMETER Experiment Name: Zm_Drought_P Parameter: Timepoint (hr) Value: 72
  misc_feature: MA Experiment 20000480 PARAMETER Experiment Name: Zm_Drought_P Parameter: Tissue Value: Aerial
  misc_feature: MA Experiment 20000480 PARAMETER Experiment Name: Zm_Drought_P Parameter: Treatment Value: Drought vs. No Drought
  misc_feature: MA Experiment ID: 20000492 Result: Down-regulated in Transcription
  misc_feature: MA Experiment 20000492 PARAMETER Experiment Name: Zm_Hybrid_Seed_Dev_P Parameter: DAP Value: 12
  misc_feature: MA Experiment 20000492 PARAMETER Experiment Name: Zm_Hybrid_Seed_Dev_P Parameter: Organism Value: Zea mays
  misc_feature: MA Experiment 20000492 PARAMETER Experiment Name: Zm_Hybrid_Seed_Dev_P Parameter: Plant Line Value: 35A19
  misc_feature: MA Experiment 20000492 PARAMETER Experiment Name: Zm_Hybrid_Seed_Dev_P Parameter: Tissue Value: Fert Kernel vs. Unfert Floret
  misc_feature: MA Experiment ID: 20000535 Result: Down-regulated in Transcription
  misc_feature: MA Experiment 20000535 PARAMETER Experiment Name: Zm_Hybrid_Seed_Dev_P Parameter: DAP Value: 30 vs. 12
  misc_feature: MA Experiment 20000535 PARAMETER Experiment Name: Zm_Hybrid_Seed_Dev_P Parameter: Organism Value: Zea mays
  misc_feature: MA Experiment 20000535 PARAMETER Experiment Name: Zm_Hybrid_Seed_Dev_P Parameter: Plant Line Value: 35A19
  misc_feature: MA Experiment 20000535 PARAMETER Experiment Name: Zm_Hybrid_Seed_Dev_P Parameter: Tissue Value: Embryo vs. Unfert Floret
aagaaccccgacccgaccgccgatagctacctagctcccaccccgcacccctgactccaccttctccattcttgatcccttcgccgcgcggagatccaagaacaggggcagcctgacaggggaacgggcggctatgggaggaagcagcgcgatgctcgccgtgttggcggtggtggttcttgcggcggtcggcggcgctgacgccgcggcggaatcgagtgaggcgtcggccaaggggaggtaccacgcgctcttcaatttcggggactcgctagccgacgctggcaacctcatccagaacggcaccccggacatcctggccaccgcgcgcctgccctacggccagacctacttcggcagggccaccggccgctgctccgacggacgcctcgtcatcgaccacctcgcacaagagtttggcctgccgctgctgccgccgtccaaggccacgaacgccagcttcgcgtacggcgccaatttcgccatcaccggcgccaccgcgctcgacacgccctacttcgaggccaaggggctcggtgccgtcatctggaactccggagcgctcatgacccaaatccagtggttccgtgatctcaagcctttcttctgcaacacaacgcaggcatgcaagaaattctttgccaaggcgctgtttgtggtcggtgagtttggcggcaatgactacaatgcacccctctttgcgggcatgggcatcccagaggtttacaaattcatgccggatgtcatccagggcatctctgacggtattgaggcactgattgctgagggggctgtggagatgattgtgcctggtgttatgcccactggctgcttcccagtgtacttgaacatgcttgatgagcccaaagagggatatggctcccgcagtgggtgtgtccgccggtacaacacattctcctgggtgcacaatgcacatctcaaggccatgcttaagaagctccgggctaagcatcccaatgtgaggatcatatatggcgattactacactccagttgtccagttcatgcttcagcctgagaagtttggttttgccaaacaactgcctagggcatgttgtggggctccatcgactcctgagaaagcagcttacaacttcaatgtcacggccaaatgcggtgagcctggtgcgactgcctgtgctgatccgacaacccattggagctgggatggcattcacctgacggaggctgcgtaccgccatatcgctaaaggctggttatacgggccttttgcggaccaaccaatcatccaatcctcatgatcacgccactcctgctgtagagtttcatcaaagtagcgcactggaaaaaaaatggagcgggggaaagtagttcttccatacagtttcaatgtttgcatacatgtacatctccattttgattgtattcatttaacttgggtggtacaaaggtgggatagggaggctgcacaaaggcctgatttcttgatttgtcagggggtataaatatgaaaaatataacgtacatataatcatgtatattgtgtcctggaaatgtgatacagactgtctgcttgagct

SEQ ID NO: 5063 - protein, 382 aa, Zea mays subsp. mays
  peptide (1)..(382): Ceres Seq. ID no. 13494775
  misc_feature (40)..(368): Pfam Name: GDSL-like Lipase/Acylhydrolase Pfam Description: GDSL-like Lipase/Acylhydrolase
  misc_feature (14)..(381): Homolog of NCBI NO: 34903958 NR Description: OSJNBa0038J17.24 [Oryza sativa (japonica >gi|7523510|dbj|BAA94238.1| unnamed protein product [Oryza sativa
  misc_feature (1)..(379): Homolog of NCBI NO: 34903956 NR Description: OSJNBa0038J17.23 [Oryza sativa (japonica >gi|7523511|dbj|BAA94239.1| unnamed protein product [Oryza sativa
  misc_feature (4)..(379): Homolog of NCBI NO: 34903994 NR Description: unnamed protein product [Oryza sativa (japonica group)] >gi|7523492|dbj|BAA94220.1| unnamed protein product
  misc_feature (32)..(379): Homolog of NCBI NO: 34903986 NR Description: unnamed protein product [Oryza sativa (japonica group)] >gi|7523496|dbj|BAA94224.1| unnamed protein product
  misc_feature (36)..(373): Homolog of NCBI NO: 15242538 NR Description: GDSL-motif lipase/hydrolase protein [Arabidopsis
  misc_feature (36)..(373): Homolog of NCBI NO: 21553708 NR Description: GDSL-motif lipase/hydrolase-like protein
  misc_feature (32)..(382): Homolog of NCBI NO: 34903970 NR Description: OSJNBa0038J17.30 [Oryza sativa (japonica >gi|7523504|dbj|BAA94232.1| unnamed protein product [Oryza sativa
  misc_feature (2)..(382): Homolog of NCBI NO: 34911800 NR Description: lipase-like protein [Oryza sativa (japonica
  misc_feature (1)..(377): Homolog of NCBI NO: 10764858 NR Description: F1K23.17 [Arabidopsis thaliana]
  misc_feature (28)..(381): Homolog of NCBI NO: 10764858 NR Description: F1K23.17 [Arabidopsis thaliana]
MGGSSAMLAVLAVVVLAAVGGADAAAESSEASAKGRYHALFNFGDSLADAGNLIQNGTPDILATARLPYGQTYFGRATGRCSDGRLVIDHLAQEFGLPLLPPSKATNASFAYGANFAITGATALDTPYFEAKGLGAVIWNSGALMTQIQWFRDLKPFFCNTTQACKKFFAKALFVVGEFGGNDYNAPLFAGMGIPEVYKFMPDVIQGISDGIEALIAEGAVEMIVPGVMPTGCFPVYLNMLDEPKEGYGSRSGCVRRYNTFSWVHNAHLKAMLKKLRAKHPNVRIIYGDYYTPVVQFMLQPEKFGFAKQLPRACCGAPSTPEKAAYNFNVTAKCGEPGATACADPTTHWSWDGIHLTEAAYRHIAKGWLYGPFADQPIIQSS

SEQ ID NO: 5064 - protein, 376 aa, Zea mays subsp. mays
  peptide (1)..(376): Ceres Seq. ID no. 13494776
  misc_feature (34)..(362): Pfam Name: GDSL-like Lipase/Acylhydrolase Pfam Description: GDSL-like Lipase/Acylhydrolase
  misc_feature (1)..(376): Homolog of NCBI NO: 34911800 NR Description: lipase-like protein [Oryza sativa (japonica
  misc_feature (1)..(371): Homolog of NCBI NO: 10764858 NR Description: F1K23.17 [Arabidopsis thaliana]
  misc_feature (1)..(373): Homolog of NCBI NO: 34903956 NR Description: OSJNBa0038J17.23 [Oryza sativa (japonica >gi|7523511|dbj|BAA94239.1| unnamed protein product [Oryza sativa
  misc_feature (26)..(373): Homolog of NCBI NO: 34903986 NR Description: unnamed protein product [Oryza sativa (japonica group)] >gi|7523496|dbj|BAA94224.1| unnamed protein product
  misc_feature (30)..(367): Homolog of NCBI NO: 21553708 NR Description: GDSL-motif lipase/hydrolase-like protein
  misc_feature (26)..(376): Homolog of NCBI NO: 34903970 NR Description: OSJNBa0038J17.30 [Oryza sativa (japonica >gi|7523504|dbj|BAA94232.1| unnamed protein product [Oryza sativa
  misc_feature (30)..(367): Homolog of NCBI NO: 15242538 NR Description: GDSL-motif lipase/hydrolase protein [Arabidopsis
  misc_feature (1)..(373): Homolog of NCBI NO: 34903994 NR Description: unnamed protein product [Oryza sativa (japonica group)] >gi|7523492|dbj|BAA94220.1| unnamed protein product
  misc_feature (8)..(375): Homolog of NCBI NO: 34903958 NR Description: OSJNBa0038J17.24 [Oryza sativa (japonica >gi|7523510|dbj|BAA94238.1| unnamed protein product [Oryza sativa
  misc_feature (22)..(375): Homolog of NCBI NO: 10764858 NR Description: F1K23.17 [Arabidopsis thaliana]
MLAVLAVVVLAAVGGADAAAESSEASAKGRYHALFNFGDSLADAGNLIQNGTPDILATARLPYGQTYFGRATGRCSDGRLVIDHLAQEFGLPLLPPSKATNASFAYGANFAITGATALDTPYFEAKGLGAVIWNSGALMTQIQWFRDLKPFFCNTTQACKKFFAKALFVVGEFGGNDYNAPLFAGMGIPEVYKFMPDVIQGISDGIEALIAEGAVEMIVPGVMPTGCFPVYLNMLDEPKEGYGSRSGCVRRYNTFSWVHNAHLKAMLKKLRAKHPNVRIIYGDYYTPVVQFMLQPEKFGFAKQLPRACCGAPSTPEKAAYNFNVTAKCGEPGATACADPTTHWSWDGIHLTEAAYRHIAKGWLYGPFADQPIIQSS

SEQ ID NO: 5065 - protein, 238 aa, Zea mays subsp. mays
  peptide (1)..(238): Ceres Seq. ID no. 13494777
  misc_feature (1)..(224): Pfam Name: GDSL-like Lipase/Acylhydrolase Pfam Description: GDSL-like Lipase/Acylhydrolase
  misc_feature (1)..(237): Homolog of NCBI NO: 34903958 NR Description: OSJNBa0038J17.24 [Oryza sativa (japonica >gi|7523510|dbj|BAA94238.1| unnamed protein product [Oryza sativa
  misc_feature (1)..(235): Homolog of NCBI NO: 34903956 NR Description: OSJNBa0038J17.23 [Oryza sativa (japonica >gi|7523511|dbj|BAA94239.1| unnamed protein product [Oryza sativa
  misc_feature (1)..(235): Homolog of NCBI NO: 34903994 NR Description: unnamed protein product [Oryza sativa (japonica group)] >gi|7523492|dbj|BAA94220.1| unnamed protein product
  misc_feature (1)..(235): Homolog of NCBI NO: 34903986 NR Description: unnamed protein product [Oryza sativa (japonica group)] >gi|7523496|dbj|BAA94224.1| unnamed protein product
  misc_feature (1)..(229): Homolog of NCBI NO: 15242538 NR Description: GDSL-motif lipase/hydrolase protein [Arabidopsis
  misc_feature (1)..(229): Homolog of NCBI NO: 21553708 NR Description: GDSL-motif lipase/hydrolase-like protein
  misc_feature (1)..(238): Homolog of NCBI NO: 34903970 NR Description: OSJNBa0038J17.30 [Oryza sativa (japonica >gi|7523504|dbj|BAA94232.1| unnamed protein product [Oryza sativa
  misc_feature (1)..(238): Homolog of NCBI NO: 34911800 NR Description: lipase-like protein [Oryza sativa (japonica
  misc_feature (1)..(233): Homolog of NCBI NO: 10764858 NR Description: F1K23.17 [Arabidopsis thaliana]
  misc_feature (1)..(237): Homolog of NCBI NO: 10764858 NR Description: F1K23.17 [Arabidopsis thaliana]
MTQIQWFRDLKPFFCNTTQACKKFFAKALFVVGEFGGNDYNAPLFAGMGIPEVYKFMPDVIQGISDGIEALIAEGAVEMIVPGVMPTGCFPVYLNMLDEPKEGYGSRSGCVRRYNTFSWVHNAHLKAMLKKLRAKHPNVRIIYGDYYTPVVQFMLQPEKFGFAKQLPRACCGAPSTPEKAAYNFNVTAKCGEPGATACADPTTHWSWDGIHLTEAAYRHIAKGWLYGPFADQPIIQSS

SEQ ID NO: 5066 - DNA, 1232 bp, Zea mays subsp. mays; identical to SEQ ID NO: 2188
  misc_feature (1)..(1232): Ceres Seq. ID no. 13635672
  misc_feature: MA Experiment ID: 108523 Result: Up-regulated in Transcription
  misc_feature: MA Experiment 108523 PARAMETER Experiment Name: Zm_42deg_Heat_P Parameter: Age (day) Value: 8
  misc_feature: MA Experiment 108523 PARAMETER Experiment Name: Zm_42deg_Heat_P Parameter: Organism Value: Zea mays
  misc_feature: MA Experiment 108523 PARAMETER Experiment Name: Zm_42deg_Heat_P Parameter: Plant Line Value: 35A19
  misc_feature: MA Experiment 108523 PARAMETER Experiment Name: Zm_42deg_Heat_P Parameter: Temperature (deg C) Value: 42 vs. 22
  misc_feature: MA Experiment 108523 PARAMETER Experiment Name: Zm_42deg_Heat_P Parameter: Timepoint (hr) Value: 6
  misc_feature: MA Experiment 108523 PARAMETER Experiment Name: Zm_42deg_Heat_P Parameter: Tissue Value: Aerial
  misc_feature: MA Experiment ID: 108527 Result: Up-regulated in Transcription
  misc_feature: MA Experiment 108527 PARAMETER Experiment Name: Zm_5mM_NO_P Parameter: Age (day) Value: 8
  misc_feature: MA Experiment 108527 PARAMETER Experiment Name: Zm_5mM_NO_P Parameter: Organism Value: Zea mays
  misc_feature: MA Experiment 108527 PARAMETER Experiment Name: Zm_5mM_NO_P Parameter: Plant Line Value: 35A19
  misc_feature: MA Experiment 108527 PARAMETER Experiment Name: Zm_5mM_NO_P Parameter: Timepoint (hr) Value: 6
  misc_feature: MA Experiment 108527 PARAMETER Experiment Name: Zm_5mM_NO_P Parameter: Tissue Value: Aerial
  misc_feature: MA Experiment 108527 PARAMETER Experiment Name: Zm_5mM_NO_P Parameter: Treatment Value: 5mM NO vs. No Treatment
  misc_feature: MA Experiment ID: 108543 Result: Down-regulated in Transcription

SEQ ID NO: 5067 - protein, 247 aa, Zea mays subsp. mays; identical to SEQ ID NO: 2189
  peptide (1)..(247): Ceres Seq. ID no. 15220349
  misc_feature (55)..(86): Homolog of NCBI NO: 34898416 NR Description: ESTs AU058081(E30812),AU058365(E50679), correspond to a region of the predicted gene.~Similar to Spinacia
  misc_feature (55)..(86): Homolog of NCBI NO: 34898458 NR Description: ESTs AU058081(E3082),AU075427(E30384) correspond a region of the predicted gene.~Similar to Spinacia oleracea
  misc_feature (55)..(86): Homolog of NCBI NO: 1709761 NR Description: Proteasome subunit alpha type 4 (20S proteasome
  misc_feature (55)..(86): Homolog of NCBI NO: 15233268 NR Description: 20S proteasome alpha subunit C (PAC1) thaliana] >gi|12643237|sp|O81148|PSA4_ARATH Proteasome subunit type 4 (20S proteasome alpha subunit C) (Proteasome 27 kDa
  misc_feature (55)..(86): Homolog of NCBI NO: 2511584 NR Description: multicatalytic endopeptidase [Arabidopsis
  misc_feature (55)..(86): Homolog of NCBI NO: 12229904 NR Description: Proteasome subunit alpha type 4 (20S proteasome
  misc_feature (63)..(88): Homolog of NCBI NO: 6984140 NR Description: proteasome 27 kDa subunit [Euphorbia esula]
  misc_feature (55)..(86): Homolog of NCBI NO: 23394356 NR Description: proteasome subunit [Phytophthora infestans]
  misc_feature (55)..(88): Homolog of NCBI NO: 32410633 NR Description: hypothetical protein [Neurospora crassa]
  misc_feature (55)..(88): Homolog of NCBI NO: 40744887 NR Description: conserved hypothetical protein [Aspergillus
  misc_feature (55)..(86): Homolog of NCBI NO: 34898416 NR Description: ESTs AU058081(E30812),AU058365(E50679), correspond to a region of the predicted gene.~Similar to Spinacia
  misc_feature (55)..(86): Homolog of NCBI NO: 34898458 NR Description: ESTs AU058081(E3082),AU075427(E30384) correspond a region of the predicted gene.~Similar to Spinacia oleracea
  misc_feature (55)..(86): Homolog of NCBI NO: 1709761 NR Description: Proteasome subunit alpha type 4 (20S proteasome
  misc_feature (55)..(86): Homolog of NCBI NO: 15233268 NR Description: 20S proteasome alpha subunit C (PAC1) thaliana] >gi|12643237|sp|O81148|PSA4_ARATH Proteasome subunit type 4 (20S proteasome alpha subunit C) (Proteasome 27 kDa
  misc_feature (55)..(86): Homolog of NCBI NO: 2511584 NR Description: multicatalytic endopeptidase [Arabidopsis
  misc_feature (55)..(86): Homolog of NCBI NO: 12229904 NR Description: Proteasome subunit alpha type 4 (20S proteasome
  misc_feature (63)..(88): Homolog of NCBI NO: 6984140 NR Description: proteasome 27 kDa subunit [Euphorbia esula]
  misc_feature (55)..(86): Homolog of NCBI NO: 23394356 NR Description: proteasome subunit [Phytophthora infestans]
  misc_feature (55)..(88): Homolog of NCBI NO: 32410633 NR Description: hypothetical protein [Neurospora crassa]
  misc_feature (55)..(88): Homolog of NCBI NO: 40744887 NR Description: conserved hypothetical protein [Aspergillus
  misc_feature (86)..(86): Xaa is any aa, unknown or other

SEQ ID NO: 5068 - protein, 246 aa, Zea mays subsp. mays; identical to SEQ ID NO: 2190
  peptide (1)..(246): Ceres Seq. ID no. 15220350
  misc_feature (29)..(211): Pfam Name: Proteasome A-type and B-type Pfam Description: Proteasome A-type and B-type
  misc_feature (29)..(211): Pfam Name: Proteasome A-type and B-type Pfam Description: Proteasome A-type and B-type
  misc_feature (29)..(246): Homolog of NCBI NO: 34898416 NR Description: ESTs AU058081(E30812),AU058365(E50679), correspond to a region of the predicted gene.~Similar to Spinacia
  misc_feature (29)..(246): Homolog of NCBI NO: 34898458 NR Description: ESTs AU058081(E3082),AU075427(E30384) correspond a region of the predicted gene.~Similar to Spinacia oleracea
  misc_feature (29)..(245): Homolog of NCBI NO: 1709761 NR Description: Proteasome subunit alpha type 4 (20S proteasome
  misc_feature (29)..(245): Homolog of NCBI NO: 15233268 NR Description: 20S proteasome alpha subunit C (PAC1) thaliana] >gi|12643237|sp|O81148|PSA4_ARATH Proteasome subunit type 4 (20S proteasome alpha subunit C) (Proteasome 27 kDa
  misc_feature (29)..(245): Homolog of NCBI NO: 2511584 NR Description: multicatalytic endopeptidase [Arabidopsis
  misc_feature (29)..(246): Homolog of NCBI NO: 34898458 NR Description: ESTs AU058081(E3082),AU075427(E30384) correspond a region of the predicted gene.~Similar to Spinacia oleracea
  misc_feature (29)..(245): Homolog of NCBI NO: 15233268 NR Description: 20S proteasome alpha subunit C (PAC1) thaliana] >gi|12643237|sp|O81148|PSA4_ARATH Proteasome subunit type 4 (20S proteasome alpha subunit C) (Proteasome 27 kDa
  misc_feature (29)..(241): Homolog of NCBI NO: 32410633 NR Description: hypothetical protein [Neurospora crassa]
  misc_feature (29)..(237): Homolog of NCBI NO: 23394356 NR Description: proteasome subunit [Phytophthora infestans]
  misc_feature (55)..(246): Homolog of NCBI NO: 14039743 NR Description: 20S proteasome subunit alpha 3 [Lolium perenne]
  misc_feature (29)..(246): Homolog of NCBI NO: 6984140 NR Description: proteasome 27 kDa subunit [Euphorbia esula]
  misc_feature (29)..(245): Homolog of NCBI NO: 12229904 NR Description: Proteasome subunit alpha type 4 (20S proteasome
  misc_feature (29)..(245): Homolog of NCBI NO: 2511584 NR Description: multicatalytic endopeptidase [Arabidopsis
  misc_feature (29)..(245): Homolog of NCBI NO: 1709761 NR Description: Proteasome subunit alpha type 4 (20S proteasome
  misc_feature (29)..(246): Homolog of NCBI NO: 34898416 NR Description: ESTs AU058081(E30812),AU058365(E50679), correspond to a region of the predicted gene.~Similar to Spinacia
  misc_feature (29)..(245): Homolog of NCBI NO: 12229904 NR Description: Proteasome subunit alpha type 4 (20S proteasome
  misc_feature (29)..(246): Homolog of NCBI NO: 6984140 NR Description: proteasome 27 kDa subunit [Euphorbia esula]
  misc_feature (55)..(246): Homolog of NCBI NO: 14039743 NR Description: 20S proteasome subunit alpha 3 [Lolium perenne]
  misc_feature (29)..(237): Homolog of NCBI NO: 23394356 NR Description: proteasome subunit [Phytophthora infestans]
  misc_feature (29)..(241): Homolog of NCBI NO: 32410633 NR Description: hypothetical protein [Neurospora crassa]
  misc_feature (28)..(28): Xaa is any aa, unknown or other

SEQ ID NO: 5069 - protein, 193 aa, Zea mays subsp. mays; identical to SEQ ID NO: 2191
  peptide (1)..(193): Ceres Seq. ID no. 15220351
  misc_feature (1)..(32): Homolog of NCBI NO: 34898416 NR Description: ESTs AU058081(E30812),AU058365(E50679), correspond to a region of the predicted gene.~Similar to Spinacia
  misc_feature (1)..(32): Homolog of NCBI NO: 34898458 NR Description: ESTs AU058081(E3082),AU075427(E30384) correspond a region of the predicted gene.~Similar to Spinacia oleracea
  misc_feature (1)..(32): Homolog of NCBI NO: 1709761 NR Description: Proteasome subunit alpha type 4 (20S proteasome
  misc_feature (1)..(32): Homolog of NCBI NO: 15233268 NR Description: 20S proteasome alpha subunit C (PAC1) thaliana] >gi|12643237|sp|O81148|PSA4_ARATH Proteasome subunit type 4 (20S proteasome alpha subunit C) (Proteasome 27 kDa
  misc_feature (1)..(32): Homolog of NCBI NO: 2511584 NR Description: multicatalytic endopeptidase [Arabidopsis
  misc_feature (1)..(32): Homolog of NCBI NO: 12229904 NR Description: Proteasome subunit alpha type 4 (20S proteasome
  misc_feature (9)..(34): Homolog of NCBI NO: 6984140 NR Description: proteasome 27 kDa subunit [Euphorbia esula]
  misc_feature (1)..(32): Homolog of NCBI NO: 23394356 NR Description: proteasome subunit [Phytophthora infestans]
  misc_feature (1)..(34): Homolog of NCBI NO: 32410633 NR Description: hypothetical protein [Neurospora crassa]
  misc_feature (1)..(34): Homolog of NCBI NO: 40744887 NR Description: conserved hypothetical protein [Aspergillus
  misc_feature (1)..(32): Homolog of NCBI NO: 34898416 NR Description: ESTs AU058081(E30812),AU058365(E50679), correspond to a region of the predicted gene.~Similar to Spinacia
  misc_feature (1)..(32): Homolog of NCBI NO: 34898458 NR Description: ESTs AU058081(E3082),AU075427(E30384) correspond a region of the predicted gene.~Similar to Spinacia oleracea
  misc_feature (1)..(32): Homolog of NCBI NO: 1709761 NR Description: Proteasome subunit alpha type 4 (20S proteasome
  misc_feature (1)..(32): Homolog of NCBI NO: 15233268 NR Description: 20S proteasome alpha subunit C (PAC1) thaliana] >gi|12643237|sp|O81148|PSA4_ARATH Proteasome subunit type 4 (20S proteasome alpha subunit C) (Proteasome 27 kDa
  misc_feature (1)..(32): Homolog of NCBI NO: 2511584 NR Description: multicatalytic endopeptidase [Arabidopsis
  misc_feature (1)..(32): Homolog of NCBI NO: 12229904 NR Description: Proteasome subunit alpha type 4 (20S proteasome
  misc_feature (9)..(34): Homolog of NCBI NO: 6984140 NR Description: proteasome 27 kDa subunit [Euphorbia esula]
  misc_feature (1)..(32): Homolog of NCBI NO: 23394356 NR Description: proteasome subunit [Phytophthora infestans]
  misc_feature (1)..(34): Homolog of NCBI NO: 32410633 NR Description: hypothetical protein [Neurospora crassa]
  misc_feature (1)..(34): Homolog of NCBI NO: 40744887 NR Description: conserved hypothetical protein [Aspergillus
  misc_feature (32)..(32): Xaa is any aa, unknown or other

SEQ ID NO: 5070 - DNA, 1560 bp, Zea mays subsp. mays
  misc_feature (1)..(1560): Ceres Seq. ID no. 12373262
  misc_feature: MA Experiment ID: 108535 Result: Up-regulated in Transcription
  misc_feature: MA Experiment 108535 PARAMETER Experiment Name: Zm_Meristem_P Parameter: Age (day) Value: 8
  misc_feature: MA Experiment 108535 PARAMETER Experiment Name: Zm_Meristem_P Parameter: Organism Value: Zea mays
  misc_feature: MA Experiment 108535 PARAMETER Experiment Name: Zm_Meristem_P Parameter: Plant Line Value: 35A19
  misc_feature: MA Experiment 108535 PARAMETER Experiment Name: Zm_Meristem_P Parameter: Tissue Value: Root Meristem vs. Above Root Meristem
  misc_feature: MA Experiment ID: 20000479 Result: Down-regulated in Transcription
  misc_feature: MA Experiment 20000479 PARAMETER Experiment Name: Zm_Drought_P Parameter: Age (day) Value: 10
  misc_feature: MA Experiment 20000479 PARAMETER Experiment Name: Zm_Drought_P Parameter: Organism Value: Zea mays
  misc_feature: MA Experiment 20000479 PARAMETER Experiment Name: Zm_Drought_P Parameter: Plant Line Value: 35A19
  misc_feature: MA Experiment 20000479 PARAMETER Experiment Name: Zm_Drought_P Parameter: Timepoint (hr) Value: 48
  misc_feature: MA Experiment 20000479 PARAMETER Experiment Name: Zm_Drought_P Parameter: Tissue Value: Aerial
  misc_feature: MA Experiment 20000479 PARAMETER Experiment Name: Zm_Drought_P Parameter: Treatment Value: Drought vs. No Drought
gaaccccgagtcccgaccagagagagacacggagaggagcagacctgcccgtcgcaatggcgatgccaccgaagcccggcgacccgccgcagcgctcgccggcacgtagcccaaacctcaatctcccctgcccgctgccgccggtcccgggcggggcgccgccaccgccgcagcagcagccgggcgccgggctgcccccgccgcgcgtgggccaccaccgccgcgccagatctgaggtggccttccgcttcccggacgacctgcccggcggcgggggcggcggcttcgacgagatcggctccgaggacgacctcttctccaccttcatggacatggacaagatcgccggcgccgaccgcgaccgcgccgccgagacctcctcgccgccgcgcccagccaagcaccgccacagcgtctcctttgacggcttcggcatgggggctgccgccggcggcccgggcggccagcaggacgggggtggaggcgtgttcggagaggtgatggaggccaagaaggccatgtgcttccgagcagctctccgagctcgccgccatcgatcccaagcgcgccaaaagaattattgcaaacaggcaatctgcagcacggtcaaaggaaagaaaagctcgatatataacagaattggagcggaaggttcaaactcttcagacagaggctactactctttcagcacagctgacactattccagagagacacaactggactttcagcagaaaatgctgagctcaagataaggttgcaggccatggagcagcaggctcagctgcgtgacgctctaaatgatgcactgaggcaagaagtggagaggcttaagatagcaacgggcgagatgtcgaagtccaataacgagcatttcaatatgggaatgcagcacgtctcctacagcccttcattcttccagctctcggagcaacacacaatgcagcagcatggaaacattcagctgccgcatcatttccaacagcctccgctgactgtcccgagccaccagatgctatcccaccccaactccctctcgaacatggtgcagccaagactcgcttgggcggctccaggggctggacattgggaaaggatccatggctgtgaagtcggaggctgaggtcgtggtgaagtcggagggcagctctatatctgcgggtgaaagcaacaccaccttctagctatacaatacgtctgccttccaagaagcctttgtttggtttagagttcttcttttgttcatagtctgacatccttgaactgcttcctccttccctgtagtttttttattccattcgttatatctagttaccattgatcggttgtgtcgatcgttgttgtcgtggtggctgattttatagggacattggtgtgttggttttgagtttgttatgtgtgtggtatggttggttgtttcgagctagtgactgagagggcaccgagtgattttttggcagattttcttttctccacctgtcttagttttgttatagaacaaccatgatttctccttctgggaatgtgtacattgcgtgaagtgtgttgtttcaggctatct

SEQ ID NO: 5071 - protein, 246 aa, Zea mays subsp. mays
  peptide (1)..(246): Ceres Seq. ID no. 12373263
  misc_feature (27)..(173): Homolog of NCBI NO: 25453519 NR Description: b-Zip DNA binding protein [imported] -
  misc_feature (27)..(173): Homolog of NCBI NO: 15226727 NR Description: bZip DNA binding protein; protein id: supported by cDNA: gi_18377631, supported by cDNA: gi_20465782 thaliana] >gi|25408715|pir||G84831 probable bZIP transcription
  misc_feature (42)..(157): Homolog of NCBI NO: 8777512 NR Description: bZIP transcriptional activator RSG [Nicotiana
  misc_feature (109)..(173): Homolog of NCBI NO: 34394739 NR Description: putative transcription activator RF2a [Oryza
  misc_feature (68)..(173): Homolog of NCBI NO: 39579226 NR Description: bZIP transcription factor RF2b [Oryza sativa
  misc_feature (12)..(67): Homolog of NCBI NO: 27375632 NR Description: blr0521 [Bradyrhizobium japonicum]
  misc_feature (3)..(75): Homolog of NCBI NO: 27375632 NR Description: blr0521 [Bradyrhizobium japonicum]
TPSPDQRETRRGADLPVAMAMPPKPGDPPQRSPARSPNLNLPCPLPPVPGGAPPPPQQQPGAGLPPPRVGHHRRARSEVAFRFPDDLPGGGGGGFDEIGSEDDLFSTFMDMDKIAGADRDRAAETSSPPRPAKHRHSVSFDGFGMGAAAGGPGGQQDGGGGVFGEVMEAKKAMCFRAALRARRHRSQARQKNYCKQAICSTVKGKKSSIYNRIGAEGSNSSDRGYYSFSTADTIPERHNWTFSRKC

SEQ ID NO: 5072 - protein, 228 aa, Zea mays subsp. mays
  peptide (1)..(228): Ceres Seq. ID no. 12373264
  misc_feature (9)..(155): Homolog of NCBI NO: 25453519 NR Description: b-Zip DNA binding protein [imported] -
  misc_feature (9)..(155): Homolog of NCBI NO: 15226727 NR Description: bZip DNA binding protein; protein id: supported by cDNA: gi_18377631, supported by cDNA: gi_20465782 thaliana] >gi|25408715|pir||G84831 probable bZIP transcription
  misc_feature (24)..(139): Homolog of NCBI NO: 8777512 NR Description: bZIP transcriptional activator RSG [Nicotiana
  misc_feature (91)..(155): Homolog of NCBI NO: 34394739 NR Description: putative transcription activator RF2a [Oryza
  misc_feature (50)..(155): Homolog of NCBI NO: 39579226 NR Description: bZIP transcription factor RF2b [Oryza sativa
  misc_feature (1)..(49): Homolog of NCBI NO: 27375632 NR Description: blr0521 [Bradyrhizobium japonicum]
  misc_feature (1)..(57): Homolog of NCBI NO: 27375632 NR Description: blr0521 [Bradyrhizobium japonicum]
MAMPPKPGDPPQRSPARSPNLNLPCPLPPVPGGAPPPPQQQPGAGLPPPRVGHHRRARSEVAFRFPDDLPGGGGGGFDEIGSEDDLFSTFMDMDKIAGADRDRAAETSSPPRPAKHRHSVSFDGFGMGAAAGGPGGQQDGGGGVFGEVMEAKKAMCFRAALRARRHRSQARQKNYCKQAICSTVKGKKSSIYNRIGAEGSNSSDRGYYSFSTADTIPERHNWTFSRKC

SEQ ID NO: 5073 - protein, 226 aa, Zea mays subsp. mays
  peptide (1)..(226): Ceres Seq. ID no. 12373265
  misc_feature (7)..(153): Homolog of NCBI NO: 25453519 NR Description: b-Zip DNA binding protein [imported] -
  misc_feature (7)..(153): Homolog of NCBI NO: 15226727 NR Description: bZip DNA binding protein; protein id: supported by cDNA: gi_18377631, supported by cDNA: gi_20465782 thaliana] >gi|25408715|pir||G84831 probable bZIP transcription
  misc_feature (22)..(137): Homolog of NCBI NO: 8777512 NR Description: bZIP transcriptional activator RSG [Nicotiana
  misc_feature (89)..(153): Homolog of NCBI NO: 34394739 NR Description: putative transcription activator RF2a [Oryza
  misc_feature (48)..(153): Homolog of NCBI NO: 39579226 NR Description: bZIP transcription factor RF2b [Oryza sativa
  misc_feature (1)..(47): Homolog of NCBI NO: 27375632 NR Description: blr0521 [Bradyrhizobium japonicum]
  misc_feature (1)..(55): Homolog of NCBI NO: 27375632 NR Description: blr0521 [Bradyrhizobium japonicum]
MPPKPGDPPQRSPARSPNLNLPCPLPPVPGGAPPPPQQQPGAGLPPPRVGHHRRARSEVAFRFPDDLPGGGGGGFDEIGSEDDLFSTFMDMDKIAGADRDRAAETSSPPRPAKHRHSVSFDGFGMGAAAGGPGGQQDGGGGVFGEVMEAKKAMCFRAALRARRHRSQARQKNYCKQAICSTVKGKKSSIYNRIGAEGSNSSDRGYYSFSTADTIPERHNWTFSRKC

SEQ ID NO: 5074 - DNA, 1414 bp, Zea mays subsp. mays
  misc_feature (1)..(1414): Ceres Seq. ID no. 12373258
  misc_feature: MA Experiment ID: 108528 Result: Down-regulated in Transcription
  misc_feature: MA Experiment 108528 PARAMETER Experiment Name: Zm_Imbibed_Seeds_P Parameter: Age (day) Value: 5 vs. 2
  misc_feature: MA Experiment 108528 PARAMETER Experiment Name: Zm_Imbibed_Seeds_P Parameter: Organism Value: Zea mays
  misc_feature: MA Experiment 108528 PARAMETER Experiment Name: Zm_Imbibed_Seeds_P Parameter: Plant Line Value: 35A19
  misc_feature: MA Experiment 108528 PARAMETER Experiment Name: Zm_Imbibed_Seeds_P Parameter: Tissue Value: Aerial vs. Embryo
  misc_feature: MA Experiment ID: 108530 Result: Down-regulated in Transcription
  misc_feature: MA Experiment 108530 PARAMETER Experiment Name: Zm_Imbibed_Seeds_P Parameter: Age (day) Value: 6 vs. 2
  misc_feature: MA Experiment 108530 PARAMETER Experiment Name: Zm_Imbibed_Seeds_P Parameter: Organism Value: Zea mays
  misc_feature: MA Experiment 108530 PARAMETER Experiment Name: Zm_Imbibed_Seeds_P Parameter: Plant Line Value: 35A19
  misc_feature: MA Experiment 108530 PARAMETER Experiment Name: Zm_Imbibed_Seeds_P Parameter: Tissue Value: Aerial vs. Embryo
  misc_feature: MA Experiment ID: 108543 Result: Up-regulated in Transcription
  misc_feature: MA Experiment ID: 20000488 Result: Down-regulated in Transcription
  misc_feature: MA Experiment 20000488 PARAMETER Experiment Name: Zm_50mM_NH4NO3_L_to_H_P Parameter: Organism Value: Zea mays
  misc_feature: MA Experiment 20000488 PARAMETER Experiment Name: Zm_50mM_NH4NO3_L_to_H_P Parameter: Timepoint (hr) Value: 8
  misc_feature: MA Experiment 20000488 PARAMETER Experiment Name: Zm_50mM_NH4NO3_L_to_H_P Parameter: Tissue Value: Leaves
  misc_feature: MA Experiment 20000488 PARAMETER Experiment Name: Zm_50mM_NH4NO3_L_to_H_P Parameter: Treatment Value: 50mM NH4NO3 vs. 100mM Mannitol
  misc_feature: MA Experiment ID: 20000534 Result: Down-regulated in Transcription
  misc_feature: MA Experiment 20000534 PARAMETER Experiment Name: Zm_Hybrid_Pollen_P Parameter: Age (day) Value: 8
  misc_feature: MA Experiment 20000534 PARAMETER Experiment Name: Zm_Hybrid_Pollen_P Parameter: Organism Value: Zea mays
  misc_feature: MA Experiment 20000534 PARAMETER Experiment Name: Zm_Hybrid_Pollen_P Parameter: Plant Line Value: 35A19
  misc_feature: MA Experiment 20000534 PARAMETER Experiment Name: Zm_Hybrid_Pollen_P Parameter: Tissue Value: Pollen vs. Aerial
aactgaaactgtgtcattgtctgtcagtgctcgccgcgcggatctagggggaggggggccgtgcccggcgcggacgccgggatgccgatctgcgcgccgtcgtccgactcctcggcctcggcctcgtcgggcttgggcgcccgcgtctgggtgctccacgggctagcgctcggcgcggcggccgcggccgctgccgttgcgtacctgtaccggcggccgaccgggttccgcagccgcgcggtggggatcatacccgcgcgcttcgcctccacgcgcttcgagggcaagccgctcgttcccatcctcggcaagcccatgatccagagaacatgggaaagagttatgctagcttcttcgttggaccatgttgttgtggcaacggatgatgagagaattgcagaatgctgtcgaggatttggagctgatgttataatgacatcagcatcttgcaaaaacggatctgaacgctgctgtgaggcactaaagaagcttgataagcactatgatattgttgtcaatattcaaggagatgagcctctcattgaaccagagataatagatggtgtagttatgtcactgcagcgagctcctgatgcagtcttcagcacagctgttacttcactgaaaccagaagatgcattcgatacaaacagggtgaagtgtgttgtggataatctgggctacgcaatatacttttcaagagggctgattccattcaataaatcagggaacgccaatccaaaatatccatatcttcttcatcttggaatcgcgggctttgattcaaaatttttgaagatatatccagaacttccaccaacaccattacaaatggaagaggacctagagcaactaaaagttcttgaaaatggctataggatgaaggtgatcaaagtggaccatgatgcccatggtgtggatgcacccgaggacgttgagaaaatcgaagcactgatgcgaacgagaaacattcagtagaaaacgaagagaaagcaagtgctttgcattgctatcggcgttggcttggtgggatacttttggttgtgctttcccgtcttctgaatagcatgataccaagtgaagttggtgcatcacttcttgaagttttgtgcttgctaaaacgttcagtgattggatatgtcacttgcattagtcctcaatcagcagttcagcgcgcaggtggattgtatctgtacttcagtagttagtagcattactttcagtcttctttacattgaaaaacaaatcgtttctggagatgaagcaattggacagtgtaaaacaaaaggctaaagacccatccatgccgcgaggcgtgattgatataaggccagactcatcggaactttcattagacttccatttacatgtaataagttttcatatatacaatgttgatgatgtatacaatttt

SEQ ID NO: 5075 - protein, 298 aa, Zea mays subsp. mays
  peptide (1)..(298): Ceres Seq. ID no. 12373259
  misc_feature (54)..(269): Pfam Name: Cytidylyltransferase Pfam Description: Cytidylyltransferase
  misc_feature (1)..(298): Homolog of NCBI NO: 7688435 NR Description: CMP-KDO synthetase [Zea mays]
  misc_feature (57)..(292): Homolog of NCBI NO: 7688437 NR Description: CMP-KDO synthetase [Zea mays]
  misc_feature (11)..(297): Homolog of NCBI NO: 30695393 NR Description: CMP-KDO synthetase -related [Arabidopsis >gi|12324630|gb|AAG52266.1|AC019018_3 putative deoxyoctulonosic
  misc_feature (51)..(289): Homolog of NCBI NO: 14194887 NR Description: 3-DEOXY-MANNO-OCTULOSONATE CYTIDYLYLTRANSFERASE
  misc_feature (51)..(289): Homolog of NCBI NO: 15835072 NR Description: 3-deoxy-manno-octulosonate cytidylyltransferase
  misc_feature (51)..(289): Homolog of NCBI NO: 1361311 NR Description: CMP-2-keto-3-deoxyoctulosonic acid synthetase
  misc_feature (51)..(289): Homolog of NCBI NO: 15604902 NR Description: CMP-2-keto-3-deoxyoctulosonic acid synthetase
  misc_feature (49)..(289): Homolog of NCBI NO: 29840354 NR Description: 3-deoxy-D-manno-octulosonate cytidylyltransferase
  misc_feature (48)..(288): Homolog of NCBI NO: 39996994 NR Description: 3-deoxy-D-manno-octulosonate cytidylyltransferase
  misc_feature (54)..(298): Homolog of NCBI NO: 19704142 NR Description: 3-deoxy-manno-octulosonate cytidylyltransferase
MPICAPSSDSSASASSGLGARVWVLHGLALGAAAAAAAVAYLYRRPTGFRSRAVGIIPARFASTRFEGKPLVPILGKPMIQRTWERVMLASSLDHVVVATDDERIAECCRGFGADVIMTSASCKNGSERCCEALKKLDKHYDIVVNIQGDEPLIEPEIIDGVVMSLQRAPDAVFSTAVTSLKPEDAFDTNRVKCVVDNLGYAIYFSRGLIPFNKSGNANPKYPYLLHLGIAGFDSKFLKIYPELPPTPLQMEEDLEQLKVLENGYRMKVIKVDHDAHGVDAPEDVEKIEALMRTRNIQ

SEQ ID NO: 5076 - protein, 220 aa, Zea mays subsp. mays
  peptide (1)..(220): Ceres Seq. ID no. 12373260
  misc_feature (1)..(191): Pfam Name: Cytidylyltransferase Pfam Description: Cytidylyltransferase
  misc_feature (1)..(220): Homolog of NCBI NO: 7688435 NR Description: CMP-KDO synthetase [Zea mays]
  misc_feature (1)..(214): Homolog of NCBI NO: 7688437 NR Description: CMP-KDO synthetase [Zea mays]
  misc_feature (1)..(219): Homolog of NCBI NO: 30695393 NR Description: CMP-KDO synthetase -related [Arabidopsis >gi|12324630|gb|AAG52266.1|AC019018_3 putative deoxyoctulonosic
  misc_feature (1)..(211): Homolog of NCBI NO: 14194887 NR Description: 3-DEOXY-MANNO-OCTULOSONATE CYTIDYLYLTRANSFERASE
  misc_feature (1)..(211): Homolog of NCBI NO: 15835072 NR Description: 3-deoxy-manno-octulosonate cytidylyltransferase
  misc_feature (1)..(211): Homolog of NCBI NO: 1361311 NR Description: CMP-2-keto-3-deoxyoctulosonic acid synthetase
  misc_feature (1)..(211): Homolog of NCBI NO: 15604902 NR Description: CMP-2-keto-3-deoxyoctulosonic acid synthetase
  misc_feature (1)..(211): Homolog of NCBI NO: 29840354 NR Description: 3-deoxy-D-manno-octulosonate cytidylyltransferase
  misc_feature (1)..(210): Homolog of NCBI NO: 39996994 NR Description: 3-deoxy-D-manno-octulosonate cytidylyltransferase
  misc_feature (1)..(220): Homolog of NCBI NO: 19704142 NR Description: 3-deoxy-manno-octulosonate cytidylyltransferase
MIQRTWERVMLASSLDHVVVATDDERIAECCRGFGADVIMTSASCKNGSERCCEALKKLDKHYDIVVNIQGDEPLIEPEIIDGVVMSLQRAPDAVFSTAVTSLKPEDAFDTNRVKCVVDNLGYAIYFSRGLIPFNKSGNANPKYPYLLHLGIAGFDSKFLKIYPELPPTPLQMEEDLEQLKVLENGYRMKVIKVDHDAHGVDAPEDVEKIEALMRTRNIQ

SEQ ID NO: 5077 - protein, 211 aa, Zea mays subsp. mays
  peptide (1)..(211): Ceres Seq. ID no. 12373261
  misc_feature (1)..(182): Pfam Name: Cytidylyltransferase Pfam Description: Cytidylyltransferase
  misc_feature (1)..(211): Homolog of NCBI NO: 7688435 NR Description: CMP-KDO synthetase [Zea mays]
  misc_feature (1)..(205): Homolog of NCBI NO: 7688437 NR Description: CMP-KDO synthetase [Zea mays]
  misc_feature (1)..(210): Homolog of NCBI NO: 30695393 NR Description: CMP-KDO synthetase -related [Arabidopsis >gi|12324630|gb|AAG52266.1|AC019018_3 putative deoxyoctulonosic
  misc_feature (1)..(202): Homolog of NCBI NO: 14194887 NR Description: 3-DEOXY-MANNO-OCTULOSONATE CYTIDYLYLTRANSFERASE
  misc_feature (1)..(202): Homolog of NCBI NO: 15835072 NR Description: 3-deoxy-manno-octulosonate cytidylyltransferase
  misc_feature (1)..(202): Homolog of NCBI NO: 1361311 NR Description: CMP-2-keto-3-deoxyoctulosonic acid synthetase
  misc_feature (1)..(202): Homolog of NCBI NO: 15604902 NR Description: CMP-2-keto-3-deoxyoctulosonic acid synthetase
  misc_feature (1)..(202): Homolog of NCBI NO: 29840354 NR Description: 3-deoxy-D-manno-octulosonate cytidylyltransferase
  misc_feature (1)..(201): Homolog of NCBI NO: 39996994 NR Description: 3-deoxy-D-manno-octulosonate cytidylyltransferase
  misc_feature (1)..(211): Homolog of NCBI NO: 19704142 NR Description: 3-deoxy-manno-octulosonate cytidylyltransferase
MLASSLDHVVVATDDERIAECCRGFGADVIMTSASCKNGSERCCEALKKLDKHYDIVVNIQGDEPLIEPEIIDGVVMSLQRAPDAVFSTAVTSLKPEDAFDTNRVKCVVDNLGYAIYFSRGLIPFNKSGNANPKYPYLLHLGIAGFDSKFLKIYPELPPTPLQMEEDLEQLKVLENGYRMKVIKVDHDAHGVDAPEDVEKIEALMRTRNIQ

SEQ ID NO: 5078 - DNA, 1153 bp, Zea mays subsp. mays
  misc_feature (1)..(1153): Ceres Seq. ID no. 12344416
  misc_feature: MA Experiment ID: 108535 Result: Down-regulated in Transcription
  misc_feature: MA Experiment 108535 PARAMETER Experiment Name: Zm_Meristem_P Parameter: Age (day) Value: 8
  misc_feature: MA Experiment 108535 PARAMETER Experiment Name: Zm_Meristem_P Parameter: Organism Value: Zea mays
  misc_feature: MA Experiment 108535 PARAMETER Experiment Name: Zm_Meristem_P Parameter: Plant Line Value: 35A19
  misc_feature: MA Experiment 108535 PARAMETER Experiment Name: Zm_Meristem_P Parameter: Tissue Value: Root Meristem vs. Above Root Meristem
  misc_feature: MA Experiment ID: 108543 Result: Up-regulated in Transcription
  misc_feature: MA Experiment ID: 108544 Result: Up-regulated in Transcription
  misc_feature: MA Experiment ID: 20000477 Result: Up-regulated in Transcription
  misc_feature: MA Experiment 20000477 PARAMETER Experiment Name: Zm_5mM_SA_P Parameter: Age (day) Value: 10
  misc_feature: MA Experiment 20000477 PARAMETER Experiment Name: Zm_5mM_SA_P Parameter: Organism Value: Zea mays
  misc_feature: MA Experiment 20000477 PARAMETER Experiment Name: Zm_5mM_SA_P Parameter: Plant Line Value: 35A19
  misc_feature: MA Experiment 20000477 PARAMETER Experiment Name: Zm_5mM_SA_P Parameter: Timepoint (hr) Value: 48
  misc_feature: MA Experiment 20000477 PARAMETER Experiment Name: Zm_5mM_SA_P Parameter: Tissue Value: Aerial
  misc_feature: MA Experiment 20000477 PARAMETER Experiment Name: Zm_5mM_SA_P Parameter: Treatment Value: 5mM SA vs. No Treatment
  misc_feature: MA Experiment ID: 20000492 Result: Down-regulated in Transcription
  misc_feature: MA Experiment 20000492 PARAMETER Experiment Name: Zm_Hybrid_Seed_Dev_P Parameter: DAP Value: 12
  misc_feature: MA Experiment 20000492 PARAMETER Experiment Name: Zm_Hybrid_Seed_Dev_P Parameter: Organism Value: Zea mays
  misc_feature: MA Experiment 20000492 PARAMETER Experiment Name: Zm_Hybrid_Seed_Dev_P Parameter: Plant Line Value: 35A19
  misc_feature: MA Experiment 20000492 PARAMETER Experiment Name: Zm_Hybrid_Seed_Dev_P Parameter: Tissue Value: Fert Kernel vs. Unfert Floret
  misc_feature: MA Experiment ID: 20000535 Result: Down-regulated in Transcription
  misc_feature: MA Experiment 20000535 PARAMETER Experiment Name: Zm_Hybrid_Seed_Dev_P Parameter: DAP Value: 30 vs. 12
  misc_feature: MA Experiment 20000535 PARAMETER Experiment Name: Zm_Hybrid_Seed_Dev_P Parameter: Organism Value: Zea mays
  misc_feature: MA Experiment 20000535 PARAMETER Experiment Name: Zm_Hybrid_Seed_Dev_P Parameter: Plant Line Value: 35A19
  misc_feature: MA Experiment 20000535 PARAMETER Experiment Name: Zm_Hybrid_Seed_Dev_P Parameter: Tissue Value: Embryo vs. Unfert Floret
aacctcaccaactcccctacaagccgccgggccgaacgaccgaagcatccacttccaaagtgtactgtttgctgcccgcctggcgcctgcccccataactactctgccaccaatccggggaggaatcaacctagcggtaagcggacatggcggcggcgaagatagcgccgtcgatgctctcgtcggactttgccaacctcgcttcggaggctgagcgcatggtccgcctaggcgccgactggctacatatggacatcatggatgggcacttcgttcctaacctgactattggggctccggtgatccagagcttgaggaaacataccaaagcatatttggactgccatcttatggtcacaaagccttcagattacgtagaaccatttggaaaggctggcgcttctggattcacattccatatagaagttgctagagacaactggcaagatctcatccaaagcattaaatcaaagggtatgcggcctggtgtatcattgaggccaggtactccagtggaggaagtttttcccctggtggaagcagaaaatccggtagaattggttcttgtgatgacagtcgagcctggttttggtggtcagaaatttatgccagaaatgatggataaggtgcgcacactgagaaagaagtacccttcccttgacatagaggttgatggtggtctaggtccttcaaccatagacgtggccgcatctgctggggccaattgcatcgtcgctggaagctctatatttggcgctgcggacccaggagccatcatatctgtgctgaggaagagcgtcgagggctctcagaacaaaaactgattttggtgtttctgctgtaaagtactccctccgtttttttttattcgtcgcgttttagttcaaacatgaactagcggacgactgatattcgagaatggagggagtacttcgaccctgcacgtcagatgagctgatcctcacattgcaccggaactgttcggcgagaataaaatttgatgttagaccttgaacgtcttttgcaatatgcttttttgtctgccctgattatattctaccccttcatataacgcttgatgtgccgtcaagaaatggcgaaacattggcatgactgtaaacaagaaactaaatacgggtataaaaatcgtgtc

SEQ ID NO: 5079 - protein, 225 aa, Zea mays subsp. mays
  peptide (1)..(225): Ceres Seq. ID no. 12344417
  misc_feature (5)..(205): Pfam Name: Ribulose-phosphate 3 epimerase family Pfam Description: Ribulose-phosphate 3 epimerase family
  misc_feature (1)..(225): Homolog of NCBI NO: 28373310 NR Description: Chain A, The Structure Of The Cytosolic
  misc_feature (1)..(222): Homolog of NCBI NO: 18395962 NR Description: putative D-ribulose-5-phosphate 3-epimerase; id: At3g01850.1, supported by cDNA: 2398., supported by cDNA: [Arabidopsis thaliana] >gi|13877557|gb|AAK43856.1|AF370479_1
  misc_feature (5)..(222): Homolog of NCBI NO: 15221735 NR Description: putative D-ribulose-5-phosphate-3-epimerase; id: At1g63290.1, supported by cDNA: 37843., supported by cDNA:
  misc_feature (1)..(222): Homolog of NCBI NO: 6091725 NR Description: putative D-ribulose-5-phosphate 3-epimerase
  misc_feature (1)..(222): Homolog of NCBI NO: 19114917 NR Description: putative ribulose phosphate 3-epimerase
  misc_feature (6)..(224): Homolog of NCBI NO: 17552948 NR Description: D-ribulose-5-Phosphate 3-epimerase (24.4 kD) elegans] >gi|14574055|gb|AAK68310.1|U28991_8 Hypothetical protein
  misc_feature (2)..(225): Homolog of NCBI NO: 40385883 NR Description: ribulose-5-phosphate-3-epimerase isoform 1;
  misc_feature (2)..(225): Homolog of NCBI NO: 27532955 NR Description: RIKEN cDNA 5730518J08 [Mus musculus]
  misc_feature (6)..(218): Homolog of NCBI NO: 6322341 NR Description: D-ribulose-5-Phosphate 3-epimerase; Rpe1p
  misc_feature (6)..(224): Homolog of NCBI NO: 7498654 NR Description: hypothetical protein F08F8.4 - Caenorhabditis
MAAAKIAPSMLSSDFANLASEAERMVRLGADWLHMDIMDGHFVPNLTIGAPVIQSLRKHTKAYLDCHLMVTKPSDYVEPFGKAGASGFTFHIEVARDNWQDLIQSIKSKGMRPGVSLRPGTPVEEVFPLVEAENPVELVLVMTVEPGFGGQKFMPEMMDKVRTLRKKYPSLDIEVDGGLGPSTIDVAASAGANCIVAGSSIFGAADPGAIISVLRKSVEGSQNKN

SEQ ID NO: 5080 - protein, 216 aa, Zea mays subsp. mays
  peptide (1)..(216): Ceres Seq. ID no. 12344418
  misc_feature (1)..(196): Pfam Name: Ribulose-phosphate 3 epimerase family Pfam Description: Ribulose-phosphate 3 epimerase family
  misc_feature (1)..(216): Homolog of NCBI NO: 28373310 NR Description: Chain A, The Structure Of The Cytosolic
  misc_feature (1)..(213): Homolog of NCBI NO: 18395962 NR Description: putative D-ribulose-5-phosphate 3-epimerase; id: At3g01850.1, supported by cDNA: 2398., supported by cDNA: [Arabidopsis thaliana] >gi|13877557|gb|AAK43856.1|AF370479_1
  misc_feature (1)..(213): Homolog of NCBI NO: 15221735 NR Description: putative D-ribulose-5-phosphate-3-epimerase; id: At1g63290.1, supported by cDNA: 37843., supported by cDNA:
  misc_feature (1)..(213): Homolog of NCBI NO: 6091725 NR Description: putative D-ribulose-5-phosphate 3-epimerase
  misc_feature (1)..(213): Homolog of NCBI NO: 19114917 NR Description: putative ribulose phosphate 3-epimerase
  misc_feature (1)..(215): Homolog of NCBI NO: 17552948 NR Description: D-ribulose-5-Phosphate 3-epimerase (24.4 kD) elegans] >gi|14574055|gb|AAK68310.1|U28991_8 Hypothetical protein
  misc_feature (1)..(216): Homolog of NCBI NO: 40385883 NR Description: ribulose-5-phosphate-3-epimerase isoform 1;
  misc_feature (1)..(216): Homolog of NCBI NO: 27532955 NR Description: RIKEN cDNA 5730518J08 [Mus musculus]
  misc_feature (1)..(209): Homolog of NCBI NO: 6322341 NR Description: D-ribulose-5-Phosphate 3-epimerase; Rpe1p
  misc_feature (1)..(215): Homolog of NCBI NO: 7498654 NR Description: hypothetical protein F08F8.4 - Caenorhabditis
MLSSDFANLASEAERMVRLGADWLHMDIMDGHFVPNLTIGAPVIQSLRKHTKAYLDCHLMVTKPSDYVEPFGKAGASGFTFHIEVARDNWQDLIQSIKSKGMRPGVSLRPGTPVEEVFPLVEAENPVELVLVMTVEPGFGGQKFMPEMMDKVRTLRKKYPSLDIEVDGGLGPSTIDVAASAGANCIVAGSSIFGAADPGAIISVLRKSVEGSQNKN

SEQ ID NO: 5081 - protein, 201 aa, Zea mays subsp. mays
  peptide (1)..(201): Ceres Seq. ID no. 12344419
  misc_feature (1)..(181): Pfam Name: Ribulose-phosphate 3 epimerase family Pfam Description: Ribulose-phosphate 3 epimerase family
  misc_feature (1)..(198): Homolog of NCBI NO: 18395962 NR Description: putative D-ribulose-5-phosphate 3-epimerase; id: At3g01850.1, supported by cDNA: 2398., supported by cDNA: [Arabidopsis thaliana] >gi|13877557|gb|AAK43856.1|AF370479_1
  misc_feature (1)..(198): Homolog of NCBI NO: 15221735 NR Description: putative D-ribulose-5-phosphate-3-epimerase; id: At1g63290.1, supported by cDNA: 37843., supported by cDNA:
  misc_feature (1)..(198): Homolog of NCBI NO: 6091725 NR Description: putative D-ribulose-5-phosphate 3-epimerase
  misc_feature (1)..(198): Homolog of NCBI NO: 19114917 NR Description: putative ribulose phosphate 3-epimerase
  misc_feature (1)..(200): Homolog of NCBI NO: 17552948 NR Description: D-ribulose-5-Phosphate 3-epimerase (24.4 kD) elegans] >gi|14574055|gb|AAK68310.1|U28991_8 Hypothetical protein
  misc_feature (1)..(201): Homolog of NCBI NO: 28373310 NR Description: Chain A, The Structure Of The Cytosolic
  misc_feature (1)..(201): Homolog of NCBI NO: 40385883 NR Description: ribulose-5-phosphate-3-epimerase isoform 1;
  misc_feature (1)..(201): Homolog of NCBI NO: 27532955 NR Description: RIKEN cDNA 5730518J08 [Mus musculus]
  misc_feature (1)..(194): Homolog of NCBI NO: 6322341 NR Description: D-ribulose-5-Phosphate 3-epimerase; Rpe1p
  misc_feature (1)..(200): Homolog of NCBI NO: 7498654 NR Description: hypothetical protein F08F8.4 - Caenorhabditis
MVRLGADWLHMDIMDGHFVPNLTIGAPVIQSLRKHTKAYLDCHLMVTKPSDYVEPFGKAGASGFTFHIEVARDNWQDLIQSIKSKGMRPGVSLRPGTPVEEVFPLVEAENPVELVLVMTVEPGFGGQKFMPEMMDKVRTLRKKYPSLDIEVDGGLGPSTIDVAASAGANCIVAGSSIFGAADPGAIISVLRKSVEGSQNKN

SEQ ID NO: 5082 - DNA, 883 bp, Zea mays subsp. mays
  misc_feature (1)..(883): Ceres Seq. ID no. 12403563
  misc_feature: MA Experiment ID: 108543 Result: Up-regulated in Transcription
actagttgtcgctgctgccctgttgcggcgacgactccgtgactcctagtccctacccagatcggcgcccgacgcaaggccgagcaggcgatggccgcagcggcgtcaatggggcacccttacgcgccagccgagctggaccttccgggtttcgtgccgctgaagctgtcccaggtcgagatcctcgtgtcctacctcggcgcctccgtcttcgttttcctcgccgtctggctcgtctccggaagatgtgtcagattatccaagaccgaccgtctgctcatgtgctggtgggcattcacagggttgacccacataatgatcgaggggcccttcgtcttcactcctgatttcttcaagaaggagaaccccaatttctttgatgaagtttggaaagagtatagtaagggagactctaggtatgttgctagggacactgcaactgttacggtcgaagggatcaccgctgtattggaaggccctgcatcactacttgctgtctacgctattgcatccaggaagtccttcagccacattctccagttcgccgtctgtctgggccagctctacggatgcctggtttacttcatcaccgcgtacttggacggcttcaacttctgggtcggcccgttctacttctgggcgtatttcattggcgcaaacagcttctggatctggataccgatgctcatcgccataaggtcctggaagaaaacttgcgccgcgtttcaagctgagaaggtgaagaagaccaaataaaagctgtctttagctaccgttttattggagaccgtcattttgatggcttaaattcttgtgttggttggtactggaaactgcatgatgtactctttgctcaaacaaatgaagaccggtttacaaattc

SEQ ID NO: 5083 - protein, 221 aa, Zea mays subsp. mays
  peptide (1)..(221): Ceres Seq. ID no. 12403564
  misc_feature (23)..(218): Pfam Name: Emopamil binding protein Pfam Description: Emopamil binding protein
  misc_feature (9)..(221): Homolog of NCBI NO: 34894044 NR Description: putative C-8,7 sterol isomerase [Oryza sativa
  misc_feature (7)..(211): Homolog of NCBI NO: 15223758 NR Description: C-8,7 sterol isomerase; protein id: At1g20050.1, by cDNA: 2121., supported by cDNA: gi_12248038, supported by gi_2772933, supported by cDNA: gi_4098988 [Arabidopsis thaliana]
  misc_feature (7)..(211): Homolog of NCBI NO: 21554213 NR Description: C-8,7 sterol isomerase [Arabidopsis thaliana]
  misc_feature (7)..(211): Homolog of NCBI NO: 4098989 NR Description: phenylalkylamine binding protein homolog
  misc_feature (3)..(221): Homolog of NCBI NO: 18202586 NR Description: 3-beta-hydroxysteroid-delta(8),delta(7)-isomerase
  misc_feature (1)..(219): Homolog of NCBI NO: 33417065 NR Description: Unknown (protein for MGC:68833) [Xenopus laevis]
  misc_feature (1)..(221): Homolog of NCBI NO: 5729810 NR Description: emopamil-binding protein (sterol isomerase);
  misc_feature (9)..(221): Homolog of NCBI NO: 16923992 NR Description: phenylalkylamine Ca2+ antagonist (emopamil)
  misc_feature (9)..(221): Homolog of NCBI NO: 6681255 NR Description: phenylalkylamine Ca2+ antagonist (emopamil)
  misc_feature (9)..(206): Homolog of NCBI NO: 12848900 NR Description: unnamed protein product [Mus musculus]
MAAAASMGHPYAPAELDLPGFVPLKLSQVEILVSYLGASVFVFLAVWLVSGRCVRLSKTDRLLMCWWAFTGLTHIMIEGPFVFTPDFFKKENPNFFDEVWKEYSKGDSRYVARDTATVTVEGITAVLEGPASLLAVYAIASRKSFSHILQFAVCLGQLYGCLVYFITAYLDGFNFWVGPFYFWAYFIGANSFWIWIPMLIAIRSWKKTCAAFQAEKVKKTK

SEQ ID NO: 5084 - protein, 215 aa, Zea mays subsp. mays
  peptide (1)..(215): Ceres Seq. ID no. 12403565
  misc_feature (17)..(212): Pfam Name: Emopamil binding protein Pfam Description: Emopamil binding protein
  misc_feature (3)..(215): Homolog of NCBI NO: 34894044 NR Description: putative C-8,7 sterol isomerase [Oryza sativa
  misc_feature (1)..(205): Homolog of NCBI NO: 15223758 NR Description: C-8,7 sterol isomerase; protein id: At1g20050.1, by cDNA: 2121., supported by cDNA: gi_12248038, supported by gi_2772933, supported by cDNA: gi_4098988 [Arabidopsis thaliana]
  misc_feature (1)..(205): Homolog of NCBI NO: 21554213 NR Description: C-8,7 sterol isomerase [Arabidopsis thaliana]
  misc_feature (1)..(205): Homolog of NCBI NO: 4098989 NR Description: phenylalkylamine binding protein homolog
  misc_feature (1)..(215): Homolog of NCBI NO: 18202586 NR Description: 3-beta-hydroxysteroid-delta(8),delta(7)-isomerase
  misc_feature (1)..(213): Homolog of NCBI NO: 33417065 NR Description: Unknown (protein for MGC:68833) [Xenopus laevis]
  misc_feature (1)..(215): Homolog of NCBI NO: 5729810 NR Description: emopamil-binding protein (sterol isomerase);
  misc_feature (3)..(215): Homolog of NCBI NO: 16923992 NR Description: phenylalkylamine Ca2+ antagonist (emopamil)
  misc_feature (3)..(215): Homolog of NCBI NO: 6681255 NR Description: phenylalkylamine Ca2+ antagonist (emopamil)
  misc_feature (3)..(200): Homolog of NCBI NO: 12848900 NR Description: unnamed protein product [Mus musculus]
MGHPYAPAELDLPGFVPLKLSQVEILVSYLGASVFVFLAVWLVSGRCVRLSKTDRLLMCWWAFTGLTHIMIEGPFVFTPDFFKKENPNFFDEVWKEYSKGDSRYVARDTATVTVEGITAVLEGPASLLAVYAIASRKSFSHILQFAVCLGQLYGCLVYFITAYLDGFNFWVGPFYFWAYFIGANSFWIWIPMLIAIRSWKKTCAAFQAEKVKKTK

SEQ ID NO: 5085 - protein, 158 aa, Zea mays subsp. mays
  peptide (1)..(158): Ceres Seq. ID no. 12403566
  misc_feature (1)..(155): Pfam Name: Emopamil binding protein Pfam Description: Emopamil binding protein
  misc_feature (1)..(158): Homolog of NCBI NO: 34894044 NR Description: putative C-8,7 sterol isomerase [Oryza sativa
  misc_feature (1)..(148): Homolog of NCBI NO: 15223758 NR Description: C-8,7 sterol isomerase; protein id: At1g20050.1, by cDNA: 2121., supported by cDNA: gi_12248038, supported by gi_2772933, supported by cDNA: gi_4098988 [Arabidopsis thaliana]
  misc_feature (1)..(148): Homolog of NCBI NO: 21554213 NR Description: C-8,7 sterol isomerase [Arabidopsis thaliana]
  misc_feature (1)..(148): Homolog of NCBI NO: 4098989 NR Description: phenylalkylamine binding protein homolog
  misc_feature (1)..(158): Homolog of NCBI NO: 18202586 NR Description: 3-beta-hydroxysteroid-delta(8),delta(7)-isomerase
  misc_feature (1)..(156): Homolog of NCBI NO: 33417065 NR Description: Unknown (protein for MGC:68833) [Xenopus laevis]
  misc_feature (1)..(158): Homolog of NCBI NO: 5729810 NR Description: emopamil-binding protein (sterol isomerase);
  misc_feature (1)..(158): Homolog of NCBI NO: 16923992 NR Description: phenylalkylamine Ca2+ antagonist (emopamil)
  misc_feature (1)..(158): Homolog of NCBI NO: 6681255 NR Description: phenylalkylamine Ca2+ antagonist (emopamil)
  misc_feature (1)..(143): Homolog of NCBI NO: 12848900 NR Description: unnamed protein product [Mus musculus]
MCWWAFTGLTHIMIEGPFVFTPDFFKKENPNFFDEVWKEYSKGDSRYVARDTATVTVEGITAVLEGPASLLAVYAIASRKSFSHILQFAVCLGQLYGCLVYFITAYLDGFNFWVGPFYFWAYFIGANSFWIWIPMLIAIRSWKKTCAAFQAEKVKKTK

SEQ ID NO: 5086 - DNA, 2805 bp, Zea mays subsp. mays
  misc_feature (1)..(2805): Ceres Seq. ID no. 13600310
  misc_feature: MA Experiment ID: 108535 Result: Up-regulated in Transcription
  misc_feature: MA Experiment 108535 PARAMETER Experiment Name: Zm_Meristem_P Parameter: Age (day) Value: 8
  misc_feature: MA Experiment 108535 PARAMETER Experiment Name: Zm_Meristem_P Parameter: Organism Value: Zea mays
  misc_feature: MA Experiment 108535 PARAMETER Experiment Name: Zm_Meristem_P Parameter: Plant Line Value: 35A19
  misc_feature: MA Experiment 108535 PARAMETER Experiment Name: Zm_Meristem_P Parameter: Tissue Value: Root Meristem vs. Above Root Meristem
ggaaaagatcccctgcagaggacatgagaaacggcgttgcagattccaaaacccatcagaaaacttctgtcttttctggacaaaaggttcgtgaagttttccaattaaaacgcggaacatattcagatcttactgctgccaagatttcagagatgatgcactctaatagcttagataatgcaccgacacagtcgcttattagtgttgttaatggtattttggatgaaagcatagaaaggaaaaagggagaaataccacatcgtgtagtttacttactgcggaaagtcgttcaagagattgagcaccgtctctgtattcaagcagagcacataagaagtcaaaatgttaccatcaagacaagagaacaaaagtactgttcaaaaattaaagcacttgaaatgttggtaaatggcacaaatgaagaaaaccagatggcaataaacaggcttcagatagtcaagaatgagaagtcacaaatcgaagagaaaaaagaactctgtgagaaagatgttcaacgattaatgaaagagaaagaatattccaaaagcatcataatgaacctaacaaaagatatggaagccatgaatagattgcatgagcagcaacttgagcaaattggaagaaaggcaaaggaaatggaggaacaattaaccaccagggtaaaagaagtagagtatctcttgctacaatcgaataagaaagttgaagaacttgagattgcttctaagctaaaatcacagttatgggatcagaaagagaacatttttcagagttacatggataatcaacaattagttatcaaggacataagaatattgtcacagtcatatgaaaatgatatgtatgcacttcaaatgcagtggagaaatgaaatctctaacttaggatctgggttaaaatgtttggttgatgccgctgaaaattatcataaagtcctgacagagaaccaaaagttatttaatgaagtgcaagaactaaaaggtaatataagagtatattgtcgtgttaggccatttctttccggtcaagataaaaagtccaccacaattgactacatgggggaaaatggtgagcttcttatatcaaatccatttaagcaagggaaggacggacatagaatgttcaagtttaataaagtgtttactccatttgcttcccaagctgaggttttttctgacatacaaccactgatccgatcagttctggatggattcaacgtttgtatttttgcatatggccagactggttctggcaaaacttacactatgagtgggcctaccacatcaaaacaagattggggtgtcaattatcgagctttaaatgatttgtttgatatttcactaagtaggagaaatgccttctcatatgaggtgggggtacaaatggttgagatatacaatgaacaagtccgtgatctgctatcaaatgatattgcacaaagaagacttgggatttggaacacttctcaacccaatgggcttgttgttccagatgcaagcttgcactcagttaagtcgacatctgatgtattagacttgatggagattggacaagcaaatagagcagttggttcaacagcgctaaatgaacgaagtagtcggtcacacagtattctaactgtacatgttcgagggatggatttgaagaatggatcaacctctaggggttgtttgcatcttattgatcttgctggtagtgagagggtagagaagtctgaagtaaccggcgatagattaaaagaagctcaatacattaacaaatcactctctgcgttaggtgatgttatttttgctttgtcacagaaaagtgcccatgtgccttatagaaacagcaagttaacacaagttcttcaaagttctttaggtggacaagcaaaaactctaatgtttgttcagataaatcctgatgttgagtcatattcagaaactataagtactttaaagtttgctgaaagggtgtctggagtagagttaggtgctgctagaagtaacaaggagggaaaagatataaaagagctattggaacaggttgcgtctttgaaagacacaattttgcgcaaagatatggaaatagagcagatccaggtcatcaaagacaaagtaaaatccccaaatttgttgttagatagaaatgtgcctggcttgacgaagactacagcaaaccaacctagccaactattatcaggcgaacgaatgcttaagtctagtgacagagttctatcggatcgtcagagttacggcgaggtgaatgtagatcctaaccaccatgtgatggatactgcaccagtgagcatagatgaagcaggatatgagaacaatgcatcggatgatggtttatcgggtgaaaccgagaatgataattcagctgctgagatgacagcggaacggctgcatagatttccatcaagaataagcaggttcactctcacaaagaacgggcagccatctatgtctagatcgaacccaaaggatgctaagactccaagcaatacgaaagctccatcgagccggttgacaggaggctcttcagccaggtctaaaagacggcagtagagcacgatcatgttgctcgttttgatgtgcattgtagttgaaatgtgaatttggtgggtagttgtaggaccgttttatgattgtaactttagaaaatgtcagacactgatggcagaatatttgagacatttgtttgatcatttgcttatgccgagcaaaacagcaaacaatgctcgattgtatgtgaaacactctgacctgtgaccatttgaatgtcggtgcgcctccggaagtccggagttgtgtatatacc

SEQ ID NO: 5087 - protein, 849 aa, Zea mays subsp. mays
  peptide (1)..(849): Ceres Seq. ID no. 13600311
  misc_feature (50)..(336): Pfam Name: Myosin tail Pfam Description: Myosin tail
  misc_feature (33)..(697): Homolog of NCBI NO: 25404429 NR Description: kinesin-like protein, 73641-79546 [imported] -
  misc_feature (33)..(697): Homolog of NCBI NO: 30696876 NR Description: kinesin-related protein [Arabidopsis thaliana]
  misc_feature (33)..(386): Homolog of NCBI NO: 6633835 NR Description: F2K11.1 [Arabidopsis thaliana]
  misc_feature (388)..(697): Homolog of NCBI NO: 6633835 NR Description: F2K11.1 [Arabidopsis thaliana]
  misc_feature (94)..(832): Homolog of NCBI NO: 12324217 NR Description: kinesin-related protein; 103921-99132
  misc_feature (94)..(832): Homolog of NCBI NO: 22330608 NR Description: kinesin-related protein [Arabidopsis thaliana]
  misc_feature (94)..(751): Homolog of NCBI NO: 25406299 NR Description: protein kinesin F2P9.27 [imported] - Arabidopsis
  misc_feature (92)..(474): Homolog of NCBI NO: 6714287 NR Description: F15H18.10 [Arabidopsis thaliana]
  misc_feature (482)..(846): Homolog of NCBI NO: 6714287 NR Description: F15H18.10 [Arabidopsis thaliana]
  misc_feature (153)..(842): Homolog of NCBI NO: 22329655 NR Description: kinesin-related protein [Arabidopsis thaliana]
KRSPAEDMRNGVADSKTHQKTSVFSGQKVREVFQLKRGTYSDLTAAKISEMMHSNSLDNAPTQSLISVVNGILDESIERKKGEIPHRVVYLLRKVVQEIEHRLCIQAEHIRSQNVTIKTREQKYCSKIKALEMLVNGTNEENQMAINRLQIVKNEKSQIEEKKELCEKDVQRLMKEKEYSKSIIMNLTKDMEAMNRLHEQQLEQIGRKAKEMEEQLTTRVKEVEYLLLQSNKKVEELEIASKLKSQLWDQKENIFQSYMDNQQLVIKDIRILSQSYENDMYALQMQWRNEISNLGSGLKCLVDAAENYHKVLTENQKLFNEVQELKGNIRVYCRVRPFLSGQDKKSTTIDYMGENGELLISNPFKQGKDGHRMFKFNKVFTPFASQAEVFSDIQPLIRSVLDGFNVCIFAYGQTGSGKTYTMSGPTTSKQDWGVNYRALNDLFDISLSRRNAFSYEVGVQMVEIYNEQVRDLLSNDIAQRRLGIWNTSQPNGLVVPDASLHSVKSTSDVLDLMEIGQANRAVGSTALNERSSRSHSILTVHVRGMDLKNGSTSRGCLHLIDLAGSERVEKSEVTGDRLKEAQYINKSLSALGDVIFALSQKSAHVPYRNSKLTQVLQSSLGGQAKTLMFVQINPDVESYSETISTLKFAERVSGVELGAARSNKEGKDIKELLEQVASLKDTILRKDMEIEQIQVIKDKVKSPNLLLDRNVPGLTKTTANQPSQLLSGERMLKSSDRVLSDRQSYGEVNVDPNHHVMDTAPVSIDEAGYENNASDDGLSGETENDNSAAEMTAERLHRFPSRISRFTLTKNGQPSMSRSNPKDAKTPSNTKAPSSRLTGGSSARSKRRQ

SEQ ID NO: 5088 - protein, 842 aa, Zea mays subsp. mays
  peptide (1)..(842): Ceres Seq. ID no. 13600312
  misc_feature (43)..(329): Pfam Name: Myosin tail Pfam Description: Myosin tail
  misc_feature (26)..(690): Homolog of NCBI NO: 25404429 NR Description: kinesin-like protein, 73641-79546 [imported] -
  misc_feature (26)..(690): Homolog of NCBI NO: 30696876 NR Description: kinesin-related protein [Arabidopsis thaliana]
  misc_feature (26)..(379): Homolog of NCBI NO: 6633835 NR Description: F2K11.1 [Arabidopsis thaliana]
  misc_feature (381)..(690): Homolog of NCBI NO: 6633835 NR Description: F2K11.1 [Arabidopsis thaliana]
  misc_feature (87)..(825): Homolog of NCBI NO: 12324217 NR Description: kinesin-related protein; 103921-99132
  misc_feature (87)..(825): Homolog of NCBI NO: 22330608 NR Description: kinesin-related protein [Arabidopsis thaliana]
  misc_feature (87)..(744): Homolog of NCBI NO: 25406299 NR Description: protein kinesin F2P9.27 [imported] - Arabidopsis
  misc_feature (85)..(467): Homolog of NCBI NO: 6714287 NR Description: F15H18.10 [Arabidopsis thaliana]
  misc_feature (475)..(839): Homolog of NCBI NO: 6714287 NR Description: F15H18.10 [Arabidopsis thaliana]
  misc_feature (146)..(835): Homolog of NCBI NO: 22329655 NR Description: kinesin-related protein [Arabidopsis thaliana]
MRNGVADSKTHQKTSVFSGQKVREVFQLKRGTYSDLTAAKISEMMHSNSLDNAPTQSLISVVNGILDESIERKKGEIPHRVVYLLRKVVQEIEHRLCIQAEHIRSQNVTIKTREQKYCSKIKALEMLVNGTNEENQMAINRLQIVKNEKSQIEEKKELCEKDVQRLMKEKEYSKSIIMNLTKDMEAMNRLHEQQLEQIGRKAKEMEEQLTTRVKEVEYLLLQSNKKVEELEIASKLKSQLWDQKENIFQSYMDNQQLVIKDIRILSQSYENDMYALQMQWRNEISNLGSGLKCLVDAAENYHKVLTENQKLFNEVQELKGNIRVYCRVRPFLSGQDKKSTTIDYMGENGELLISNPFKQGKDGHRMFKFNKVFTPFASQAEVFSDIQPLIRSVLDGFNVCIFAYGQTGSGKTYTMSGPTTSKQDWGVNYRALNDLFDISLSRRNAFSYEVGVQMVEIYNEQVRDLLSNDIAQRRLGIWNTSQPNGLVVPDASLHSVKSTSDVLDLMEIGQANRAVGSTALNERSSRSHSILTVHVRGMDLKNGSTSRGCLHLIDLAGSERVEKSEVTGDRLKEAQYINKSLSALGDVIFALSQKSAHVPYRNSKLTQVLQSSLGGQAKTLMFVQINPDVESYSETISTLKFAERVSGVELGAARSNKEGKDIKELLEQVASLKDTILRKDMEIEQIQVIKDKVKSPNLLLDRNVPGLTKTTANQPSQLLSGERMLKSSDRVLSDRQSYGEVNVDPNHHVMDTAPVSIDEAGYENNASDDGLSGETENDNSAAEMTAERLHRFPSRISRFTLTKNGQPSMSRSNPKDAKTPSNTKAPSSRLTGGSSARSKRRQ

SEQ ID NO: 5089 - protein, 799 aa, Zea mays subsp. mays
  peptide (1)..(799): Ceres Seq. ID no. 13600313
  misc_feature (1)..(286): Pfam Name: Myosin tail Pfam Description: Myosin tail
  misc_feature (1)..(647): Homolog of NCBI NO: 25404429 NR Description: kinesin-like protein, 73641-79546 [imported] -
  misc_feature (1)..(647): Homolog of NCBI NO: 30696876 NR Description: kinesin-related protein [Arabidopsis thaliana]
  misc_feature (1)..(336): Homolog of NCBI NO: 6633835 NR Description: F2K11.1 [Arabidopsis thaliana]
  misc_feature (338)..(647): Homolog of NCBI NO: 6633835 NR Description: F2K11.1 [Arabidopsis thaliana]
  misc_feature (44)..(782): Homolog of NCBI NO: 12324217 NR Description: kinesin-related protein; 103921-99132
  misc_feature (44)..(782): Homolog of NCBI NO: 22330608 NR Description: kinesin-related protein [Arabidopsis thaliana]
  misc_feature (44)..(701): Homolog of NCBI NO: 25406299 NR Description: protein kinesin F2P9.27 [imported] - Arabidopsis
  misc_feature (42)..(424): Homolog of NCBI NO: 6714287 NR Description: F15H18.10 [Arabidopsis thaliana]
  misc_feature (432)..(796): Homolog of NCBI NO: 6714287 NR Description: F15H18.10 [Arabidopsis thaliana]
  misc_feature (103)..(792): Homolog of NCBI NO: 22329655 NR Description: kinesin-related protein [Arabidopsis thaliana]
MMHSNSLDNAPTQSLISVVNGILDESIERKKGEIPHRVVYLLRKVVQEIEHRLCIQAEHIRSQNVTIKTREQKYCSKIKALEMLVNGTNEENQMAINRLQIVKNEKSQIEEKKELCEKDVQRLMKEKEYSKSIIMNLTKDMEAMNRLHEQQLEQIGRKAKEMEEQLTTRVKEVEYLLLQSNKKVEELEIASKLKSQLWDQKENIFQSYMDNQQLVIKDIRILSQSYENDMYALQMQWRNEISNLGSGLKCLVDAAENYHKVLTENQKLFNEVQELKGNIRVYCRVRPFLSGQDKKSTTIDYMGENGELLISNPFKQGKDGHRMFKFNKVFTPFASQAEVFSDIQPLIRSVLDGFNVCIFAYGQTGSGKTYTMSGPTTSKQDWGVNYRALNDLFDISLSRRNAFSYEVGVQMVEIYNEQVRDLLSNDIAQRRLGIWNTSQPNGLVVPDASLHSVKSTSDVLDLMEIGQANRAVGSTALNERSSRSHSILTVHVRGMDLKNGSTSRGCLHLIDLAGSERVEKSEVTGDRLKEAQYINKSLSALGDVIFALSQKSAHVPYRNSKLTQVLQSSLGGQAKTLMFVQINPDVESYSETISTLKFAERVSGVELGAARSNKEGKDIKELLEQVASLKDTILRKDMEIEQIQVIKDKVKSPNLLLDRNVPGLTKTTANQPSQLLSGERMLKSSDRVLSDRQSYGEVNVDPNHHVMDTAPVSIDEAGYENNASDDGLSGETENDNSAAEMTAERLHRFPSRISRFTLTKNGQPSMSRSNPKDAKTPSNTKAPSSRLTGGSSARSKRRQ

SEQ ID NO: 5090 - DNA, 1844 bp, Zea mays subsp. mays
  misc_feature (1)..(1844): Ceres Seq. ID no. 12409726
  misc_feature: MA Experiment ID: 108504 Result: Down-regulated in Transcription
  misc_feature: MA Experiment 108504 PARAMETER Experiment Name: Zm_Drought_P Parameter: Age (day) Value: 8
  misc_feature: MA Experiment 108504 PARAMETER Experiment Name: Zm_Drought_P Parameter: Organism Value: Zea mays
  misc_feature: MA Experiment 108504 PARAMETER Experiment Name: Zm_Drought_P Parameter: Plant Line Value: 35A19
  misc_feature: MA Experiment 108504 PARAMETER Experiment Name: Zm_Drought_P Parameter: Timepoint (hr) Value: 12
  misc_feature: MA Experiment 108504 PARAMETER Experiment Name: Zm_Drought_P Parameter: Tissue Value: Aerial
  misc_feature: MA Experiment 108504 PARAMETER Experiment Name: Zm_Drought_P Parameter: Treatment Value: Drought vs. No Drought
  misc_feature: MA Experiment ID: 108522 Result: Down-regulated in Transcription
  misc_feature: MA Experiment 108522 PARAMETER Experiment Name: Zm_42deg_Heat_P Parameter: Age (day) Value: 8
  misc_feature: MA Experiment 108522 PARAMETER Experiment Name: Zm_42deg_Heat_P Parameter: Organism Value: Zea mays
  misc_feature: MA Experiment 108522 PARAMETER Experiment Name: Zm_42deg_Heat_P Parameter: Plant Line Value: 35A19
  misc_feature: MA Experiment 108522 PARAMETER Experiment Name: Zm_42deg_Heat_P Parameter: Temperature (deg C) Value: 42 vs. 22
  misc_feature: MA Experiment 108522 PARAMETER Experiment Name: Zm_42deg_Heat_P Parameter: Timepoint (hr) Value: 1
  misc_feature: MA Experiment 108522 PARAMETER Experiment Name: Zm_42deg_Heat_P Parameter: Tissue Value: Aerial
  misc_feature: MA Experiment ID: 108523 Result: Down-regulated in Transcription
  misc_feature: MA Experiment 108523 PARAMETER Experiment Name: Zm_42deg_Heat_P Parameter: Age (day) Value: 8
  misc_feature: MA Experiment 108523 PARAMETER Experiment Name: Zm_42deg_Heat_P Parameter: Organism Value: Zea mays
  misc_feature: MA Experiment 108523 PARAMETER Experiment Name: Zm_42deg_Heat_P Parameter: Plant Line Value: 35A19
  misc_feature: MA Experiment 108523 PARAMETER Experiment Name: Zm_42deg_Heat_P Parameter: Temperature (deg C) Value: 42 vs. 22
  misc_feature: MA Experiment 108523 PARAMETER Experiment Name: Zm_42deg_Heat_P Parameter: Timepoint (hr) Value: 6
  misc_feature: MA Experiment 108523 PARAMETER Experiment Name: Zm_42deg_Heat_P Parameter: Tissue Value: Aerial
  misc_feature: MA Experiment ID: 108527 Result: Down-regulated in Transcription
  misc_feature: MA Experiment 108527 PARAMETER Experiment Name: Zm_5mM_NO_P Parameter: Age (day) Value: 8
  misc_feature: MA Experiment 108527 PARAMETER Experiment Name: Zm_5mM_NO_P Parameter: Organism Value: Zea mays
  misc_feature: MA Experiment 108527 PARAMETER Experiment Name: Zm_5mM_NO_P Parameter: Plant Line Value: 35A19
  misc_feature: MA Experiment 108527 PARAMETER Experiment Name: Zm_5mM_NO_P Parameter: Timepoint (hr) Value: 6
  misc_feature: MA Experiment 108527 PARAMETER Experiment Name: Zm_5mM_NO_P Parameter: Tissue Value: Aerial
  misc_feature: MA Experiment 108527 PARAMETER Experiment Name: Zm_5mM_NO_P Parameter: Treatment Value: 5mM NO vs. No Treatment
  misc_feature: MA Experiment ID: 108528 Result: Up-regulated in Transcription
  misc_feature: MA Experiment 108528 PARAMETER Experiment Name: Zm_Imbibed_Seeds_P Parameter: Age (day) Value: 5 vs. 2
  misc_feature: MA Experiment 108528 PARAMETER Experiment Name: Zm_Imbibed_Seeds_P Parameter: Organism Value: Zea mays
  misc_feature: MA Experiment 108528 PARAMETER Experiment Name: Zm_Imbibed_Seeds_P Parameter: Plant Line Value: 35A19
  misc_feature: MA Experiment 108528 PARAMETER Experiment Name: Zm_Imbibed_Seeds_P Parameter: Tissue Value: Aerial vs. Embryo
  misc_feature: MA Experiment ID: 108530 Result: Up-regulated in Transcription
  misc_feature: MA Experiment 108530 PARAMETER Experiment Name: Zm_Imbibed_Seeds_P Parameter: Age (day) Value: 6 vs. 2
  misc_feature: MA Experiment 108530 PARAMETER Experiment Name: Zm_Imbibed_Seeds_P Parameter: Organism Value: Zea mays
  misc_feature: MA Experiment 108530 PARAMETER Experiment Name: Zm_Imbibed_Seeds_P Parameter: Plant Line Value: 35A19
  misc_feature: MA Experiment 108530 PARAMETER Experiment Name: Zm_Imbibed_Seeds_P Parameter: Tissue Value: Aerial vs. Embryo
  misc_feature: MA Experiment ID: 108534 Result: Down-regulated in Transcription
  misc_feature: MA Experiment 108534 PARAMETER Experiment Name: Zm_4deg_Cold_P Parameter: Age (hr) Value: 8
  misc_feature: MA Experiment 108534 PARAMETER Experiment Name: Zm_4deg_Cold_P Parameter: Organism Value: Zea mays
  misc_feature: MA Experiment 108534 PARAMETER Experiment Name: Zm_4deg_Cold_P Parameter: Plant Line Value: 35A19
  misc_feature: MA Experiment 108534 PARAMETER Experiment Name: Zm_4deg_Cold_P Parameter: Temperature (deg C) Value: 4 vs. 22
  misc_feature: MA Experiment 108534 PARAMETER Experiment Name: Zm_4deg_Cold_P Parameter: Timepoint (hr) Value: 6
  misc_feature: MA Experiment 108534 PARAMETER Experiment Name: Zm_4deg_Cold_P Parameter: Tissue Value: Aerial
  misc_feature: MA Experiment ID: 108540 Result: Down-regulated in Transcription
  misc_feature: MA Experiment 108540 PARAMETER Experiment Name: Zm_20percent_PEG_P Parameter: Age (day) Value: 8
  misc_feature: MA Experiment 108540 PARAMETER Experiment Name: Zm_20percent_PEG_P Parameter: Organism Value: Zea mays
  misc_feature: MA Experiment 108540 PARAMETER Experiment Name: Zm_20percent_PEG_P Parameter: Plant Line Value: 35A19
  misc_feature: MA Experiment 108540 PARAMETER Experiment Name: Zm_20percent_PEG_P Parameter: Timepoint (hr) Value: 6
  misc_feature: MA Experiment 108540 PARAMETER Experiment Name: Zm_20percent_PEG_P Parameter: Tissue Value: Aerial
  misc_feature: MA Experiment 108540 PARAMETER Experiment Name: Zm_20percent_PEG_P Parameter: Treatment Value: 20percent PEG vs. No Treatment
  misc_feature: MA Experiment ID: 108556 Result: Down-regulated in Transcription
  misc_feature: MA Experiment 108556 PARAMETER Experiment Name: Zm_Drought_P Parameter: Age (day) Value: 9
  misc_feature: MA Experiment 108556 PARAMETER Experiment Name: Zm_Drought_P Parameter: Organism Value: Zea mays
  misc_feature: MA Experiment 108556 PARAMETER Experiment Name: Zm_Drought_P Parameter: Plant Line Value: 35A19
  misc_feature: MA Experiment 108556 PARAMETER Experiment Name: Zm_Drought_P Parameter: Timepoint (hr) Value: 24
  misc_feature: MA Experiment 108556 PARAMETER Experiment Name: Zm_Drought_P Parameter: Tissue Value: Aerial
  misc_feature: MA Experiment 108556 PARAMETER Experiment Name: Zm_Drought_P Parameter: Treatment Value: Drought vs. No Drought
  misc_feature: MA Experiment ID: 108559 Result: Down-regulated in Transcription
  misc_feature: MA Experiment 108559 PARAMETER Experiment Name: Zm_5mM_NO_P Parameter: Age (day) Value: 8
  misc_feature: MA Experiment 108559 PARAMETER Experiment Name: Zm_5mM_NO_P Parameter: Organism Value: Zea mays
  misc_feature: MA Experiment 108559 PARAMETER Experiment Name: Zm_5mM_NO_P Parameter: Plant Line Value: 35A19
  misc_feature: MA Experiment 108559 PARAMETER Experiment Name: Zm_5mM_NO_P Parameter: Timepoint (hr) Value: 12
  misc_feature: MA Experiment 108559 PARAMETER Experiment Name: Zm_5mM_NO_P Parameter: Tissue Value: Aerial
  misc_feature: MA Experiment 108559 PARAMETER Experiment Name: Zm_5mM_NO_P Parameter: Treatment Value: 5mM NO vs. No Treatment
  misc_feature: MA Experiment ID: 20000477 Result: Down-regulated in Transcription
  misc_feature: MA Experiment 20000477 PARAMETER Experiment Name: Zm_5mM_SA_P Parameter: Age (day) Value: 10
  misc_feature: MA Experiment 20000477 PARAMETER Experiment Name: Zm_5mM_SA_P Parameter: Organism Value: Zea mays
  misc_feature: MA Experiment 20000477 PARAMETER Experiment Name: Zm_5mM_SA_P Parameter: Plant Line Value: 35A19
  misc_feature: MA Experiment 20000477 PARAMETER Experiment Name: Zm_5mM_SA_P Parameter: Timepoint (hr) Value: 48
  misc_feature: MA Experiment 20000477 PARAMETER Experiment Name: Zm_5mM_SA_P Parameter: Tissue Value: Aerial
  misc_feature: MA Experiment 20000477 PARAMETER Experiment Name: Zm_5mM_SA_P Parameter: Treatment Value: 5mM SA vs. No Treatment
  misc_feature: MA Experiment ID: 20000478 Result: Down-regulated in Transcription
  misc_feature: MA Experiment 20000478 PARAMETER Experiment Name: Zm_5mM_SA_P Parameter: Age (day) Value: 11
  misc_feature: MA Experiment 20000478 PARAMETER Experiment Name: Zm_5mM_SA_P Parameter: Organism Value: Zea mays
  misc_feature: MA Experiment 20000478 PARAMETER Experiment Name: Zm_5mM_SA_P Parameter: Plant Line Value: 35A19
  misc_feature: MA Experiment 20000478 PARAMETER Experiment Name: Zm_5mM_SA_P Parameter: Timepoint (hr) Value: 72
  misc_feature: MA Experiment 20000478 PARAMETER Experiment Name: Zm_5mM_SA_P Parameter: Tissue Value: Aerial
  misc_feature: MA Experiment 20000478 PARAMETER Experiment Name: Zm_5mM_SA_P Parameter: Treatment Value: 5mM SA vs. No Treatment
  misc_feature: MA Experiment ID: 20000479 Result: Down-regulated in Transcription
  misc_feature: MA Experiment 20000479 PARAMETER Experiment Name: Zm_Drought_P Parameter: Age (day) Value: 10
  misc_feature: MA Experiment 20000479 PARAMETER Experiment Name: Zm_Drought_P Parameter: Organism Value: Zea mays
  misc_feature: MA Experiment 20000479 PARAMETER Experiment Name: Zm_Drought_P Parameter: Plant Line Value: 35A19
  misc_feature: MA Experiment 20000479 PARAMETER Experiment Name: Zm_Drought_P Parameter: Timepoint (hr) Value: 48
  misc_feature: MA Experiment 20000479 PARAMETER Experiment Name: Zm_Drought_P Parameter: Tissue Value: Aerial
  misc_feature: MA Experiment 20000479 PARAMETER Experiment Name: Zm_Drought_P Parameter: Treatment Value: Drought vs. No Drought
  misc_feature: MA Experiment ID: 20000480 Result: Down-regulated in Transcription
  misc_feature: MA Experiment 20000480 PARAMETER Experiment Name: Zm_Drought_P Parameter: Age (day) Value: 11
  misc_feature: MA Experiment 20000480 PARAMETER Experiment Name: Zm_Drought_P Parameter: Organism Value: Zea mays
  misc_feature: MA Experiment 20000480 PARAMETER Experiment Name: Zm_Drought_P Parameter: Plant Line Value: 35A19
  misc_feature: MA Experiment 20000480 PARAMETER Experiment Name: Zm_Drought_P Parameter: Timepoint (hr) Value: 72
  misc_feature: MA Experiment 20000480 PARAMETER Experiment Name: Zm_Drought_P Parameter: Tissue Value: Aerial
  misc_feature: MA Experiment 20000480 PARAMETER Experiment Name: Zm_Drought_P Parameter: Treatment Value: Drought vs. No Drought
  misc_feature: MA Experiment ID: 20000535 Result: Down-regulated in Transcription
  misc_feature: MA Experiment 20000535 PARAMETER Experiment Name: Zm_Hybrid_Seed_Dev_P Parameter: DAP Value: 30 vs. 12
  misc_feature: MA Experiment 20000535 PARAMETER Experiment Name: Zm_Hybrid_Seed_Dev_P Parameter: Organism Value: Zea mays
  misc_feature: MA Experiment 20000535 PARAMETER Experiment Name: Zm_Hybrid_Seed_Dev_P Parameter: Plant Line Value: 35A19
  misc_feature: MA Experiment 20000535 PARAMETER Experiment Name: Zm_Hybrid_Seed_Dev_P Parameter: Tissue Value: Embryo vs. Unfert Floret
  misc_feature: MA Experiment ID: 20001608 Result: Down-regulated in Transcription
  misc_feature: MA Experiment 20001608 PARAMETER Experiment Name: Zm_50ppm_KNO3_L-to-H_P Parameter: Age (day) Value: 21
  misc_feature: MA Experiment 20001608 PARAMETER Experiment Name: Zm_50ppm_KNO3_L-to-H_P Parameter: Organism Value: Zea mays
  misc_feature: MA Experiment 20001608 PARAMETER Experiment Name: Zm_50ppm_KNO3_L-to-H_P Parameter: Plant Line Value: 35A19
  misc_feature: MA Experiment 20001608 PARAMETER Experiment Name: Zm_50ppm_KNO3_L-to-H_P Parameter: Timepoint (hr) Value: 48
  misc_feature: MA Experiment 20001608 PARAMETER Experiment Name: Zm_50ppm_KNO3_L-to-H_P Parameter: Tissue Value: Shoots
  misc_feature: MA Experiment 20001608 PARAMETER Experiment Name: Zm_50ppm_KNO3_L-to-H_P Parameter: Treatment Value: 50ppm KNO3 vs. 50ppm KCl
atgtgcgggagccttatggtcatctgcctcctctaaaatatctgtcttgcaaacgaaaatagatggacggcagtccgtaggccactccacctccacgatacaccacggcaccactcaacctgtcaggtagacttctctctcccgcggaagctcttacctccggctccgcaagcaagacttcatggagaagacggtcgttctgtaccccggcctatccgtcagccatttcgtcccgatgatgcagctcgccgacatgttcctagaggagggttacgctgttgcggtcgcgctcatcgacctcaccttggaccaagacgccgccttggcagacgccgtcgaccgcgtcgcctccgccaagccgtccgtcgccttccacaggctccttcggatccagaatcctcccactgtcacagacgacgggggagccgttcctctggtacttccagatactgaaacgctacaacgaccgcctccgtgagttcctctgctccctgcctccccgaagcgtccacgcggtgatcgtggacgcgctttccgtcgacgcgctcgacgtcaccaaggagcttgggctcccggcctacaccttctgcgccgccaacgcctccgcgctcgccgtgttcctccagcttccttggatccgcgcggaaggccaaccaagcttcaaggagctcggagacgcccccgtcaacttctccggcgtgcctcccattccggcgtcacacctcgtgcgccagatgctggacccggagagcgagatatacaccgcgatgatgaacgcgatgcgaaggggagcggaggaccccgacggcatcttggtgaacacgttcgcgtcgctggaagctcgggcggtgggagctctccgggacccacagctggttcctcctagcagcggcagagcacgcaggacgcctccggtgtactgcgtcgggccactggtcgccggtgccggcgcagaggcaaaagagaagcacgaatgcctggcgtggctcgacgggcaaccagagcgcagcgtggtgttgctctgcttcgggagcataggcgcggccacccactcggaagagcagctcagggaggttgccgtcggcctgcagagatccggccaccgtttcctgtgggtggtgcgagccccgctgcgcggtgacaccgagaggctgttcgatccccgtgcggacaccgacctcgacgcccttctgccggacgggttcctcgaggccacaagagaccgcggcctggtcgtcaagcactgggcgccgcaggtggaagtgctcaaccatagggcgacaggcgttcgtgacgcactgtgggtggaactcggtgctggaaggtatcacggctggcgtgccgatgctttgctggccgatgtacgcggagcagaaaatgaacaagctgttcatggtggaggaagccatggtcggcgtggaaatggttggatggcagcaggggctggtcagtgctgaggaggtggaggccaaggtaaggttggtgttggaggagtccgaggaaggcaaccagctcaggacgcgggtggccgcgcataggaatgccgcgaccatggcccggaggggcggcggctcatcgcgcgctgcgtttggccagttcttgtcggacgccgccaaactcgcacgggagtagacgcgtacgcgctggatgcattgccgattgctgaatttcaccatcatcggttgtgattcgatgttgagaattgagatgaaactgcgatgcttgcatgtactctgtggtaacttttatttctatatctgtgagtgctcggcgttgcaacaggaccactatattacaacctttaatatcatacagacttctatatatgatagtacaatacttgc

SEQ ID NO: 5091 - protein, 240 aa, Zea mays subsp. mays
  peptide (1)..(240): Ceres Seq. ID no. 12409727
  misc_feature (1)..(184): Pfam Name: UDP-glucoronosyl and UDP-glucosyl transferase Pfam Description: UDP-glucoronosyl and UDP-glucosyl transferase
  misc_feature (1)..(184): Homolog of NCBI NO: 34908644 NR Description: putative flavonol 3-O-glucosyltransferase [Oryza
  misc_feature (1)..(184): Homolog of NCBI NO: 34910206 NR Description: putative flavonol glucosyltransferase [Oryza
  misc_feature (1)..(184): Homolog of NCBI NO: 34910204 NR Description: putative flavonol glucosyltransferase [Oryza
  misc_feature (1)..(184): Homolog of NCBI NO: 22535568 NR Description: putative glucosyltransferase [Oryza sativa
  misc_feature (1)..(141): Homolog of NCBI NO: 34910222 NR Description: putative flavonol glucosyltransferase [Oryza
  misc_feature (1)..(183): Homolog of NCBI NO: 34910228 NR Description: putative flavonol glucosyltransferase [Oryza
  misc_feature (1)..(184): Homolog of NCBI NO: 34910218 NR Description: putative flavonol glucosyltransferase [Oryza
  misc_feature (1)..(184): Homolog of NCBI NO: 34910208 NR Description: putative flavonol glucosyltransferase [Oryza
  misc_feature (25)..(184): Homolog of NCBI NO: 34910222 NR Description: putative flavonol glucosyltransferase [Oryza
  misc_feature (1)..(200): Homolog of NCBI NO: 34394688 NR Description: putative glucosyltransferase [Oryza sativa
MLDPESEIYTAMMNAMRRGAEDPDGILVNTFASLEARAVGALRDPQLVPPSSGRARRTPPVYCVGPLVAGAGAEAKEKHECLAWLDGQPERSVVLLCFGSIGAATHSEEQLREVAVGLQRSGHRFLWVVRAPLRGDTERLFDPRADTDLDALLPDGFLEATRDRGLVVKHWAPQVEVLNHRATGVRDALWVELGAGRYHGWRADALLADVRGAENEQAVHGGGSHGRRGNGWMAAGAGQC

SEQ ID NO: 5092 - protein, 229 aa, Zea mays subsp. mays
  peptide (1)..(229): Ceres Seq. ID no. 12409728
  misc_feature (1)..(173): Pfam Name: UDP-glucoronosyl and UDP-glucosyl transferase Pfam Description: UDP-glucoronosyl and UDP-glucosyl transferase
  misc_feature (1)..(173): Homolog of NCBI NO: 34908644 NR Description: putative flavonol 3-O-glucosyltransferase [Oryza
  misc_feature (1)..(173): Homolog of NCBI NO: 34910206 NR Description: putative flavonol glucosyltransferase [Oryza
  misc_feature (1)..(173): Homolog of NCBI NO: 34910204 NR Description: putative flavonol glucosyltransferase [Oryza
  misc_feature (1)..(173): Homolog of NCBI NO: 22535568 NR Description: putative glucosyltransferase [Oryza sativa
  misc_feature (1)..(130): Homolog of NCBI NO: 34910222 NR Description: putative flavonol glucosyltransferase [Oryza
  misc_feature (1)..(172): Homolog of NCBI NO: 34910228 NR Description: putative flavonol glucosyltransferase [Oryza
  misc_feature (1)..(173): Homolog of NCBI NO: 34910218 NR Description: putative flavonol glucosyltransferase [Oryza
  misc_feature (1)..(173): Homolog of NCBI NO: 34910208 NR Description: putative flavonol glucosyltransferase [Oryza
  misc_feature (14)..(173): Homolog of NCBI NO: 34910222 NR Description: putative flavonol glucosyltransferase [Oryza
  misc_feature (1)..(189): Homolog of NCBI NO: 34394688 NR Description: putative glucosyltransferase [Oryza sativa
MMNAMRRGAEDPDGILVNTFASLEARAVGALRDPQLVPPSSGRARRTPPVYCVGPLVAGAGAEAKEKHECLAWLDGQPERSVVLLCFGSIGAATHSEEQLREVAVGLQRSGHRFLWVVRAPLRGDTERLFDPRADTDLDALLPDGFLEATRDRGLVVKHWAPQVEVLNHRATGVRDALWVELGAGRYHGWRADALLADVRGAENEQAVHGGGSHGRRGNGWMAAGAGQC

SEQ ID NO: 5093 - protein, 228 aa, Zea mays subsp. mays
  peptide (1)..(228): Ceres Seq. ID no. 12409729
  misc_feature (1)..(172): Pfam Name: UDP-glucoronosyl and UDP-glucosyl transferase Pfam Description: UDP-glucoronosyl and UDP-glucosyl transferase
  misc_feature (1)..(172): Homolog of NCBI NO: 34908644 NR Description: putative flavonol 3-O-glucosyltransferase [Oryza
  misc_feature (1)..(172): Homolog of NCBI NO: 34910206 NR Description: putative flavonol glucosyltransferase [Oryza
  misc_feature (1)..(172): Homolog of NCBI NO: 34910204 NR Description: putative flavonol glucosyltransferase [Oryza
  misc_feature (1)..(172): Homolog of NCBI NO: 22535568 NR Description: putative glucosyltransferase [Oryza sativa
  misc_feature (1)..(129): Homolog of NCBI NO: 34910222 NR Description: putative flavonol glucosyltransferase [Oryza
  misc_feature (1)..(171): Homolog of NCBI NO: 34910228 NR Description: putative flavonol glucosyltransferase [Oryza
  misc_feature (1)..(172): Homolog of NCBI NO: 34910218 NR Description: putative flavonol glucosyltransferase [Oryza
  misc_feature (1)..(172): Homolog of NCBI NO: 34910208 NR Description: putative flavonol glucosyltransferase [Oryza
  misc_feature (13)..(172): Homolog of NCBI NO: 34910222 NR Description: putative flavonol glucosyltransferase [Oryza
  misc_feature (1)..(188): Homolog of NCBI NO: 34394688 NR Description: putative glucosyltransferase [Oryza sativa
MNAMRRGAEDPDGILVNTFASLEARAVGALRDPQLVPPSSGRARRTPPVYCVGPLVAGAGAEAKEKHECLAWLDGQPERSVVLLCFGSIGAATHSEEQLREVAVGLQRSGHRFLWVVRAPLRGDTERLFDPRADTDLDALLPDGFLEATRDRGLVVKHWAPQVEVLNHRATGVRDALWVELGAGRYHGWRADALLADVRGAENEQAVHGGGSHGRRGNGWMAAGAGQC

SEQ ID NO: 5094 - DNA, 1277 bp, Zea mays subsp. mays
  misc_feature (1)..(1277): Ceres Seq. ID no. 12406953
  misc_feature: MA Experiment ID: 108522 Result: Down-regulated in Transcription
  misc_feature: MA Experiment 108522 PARAMETER Experiment Name: Zm_42deg_Heat_P Parameter: Age (day) Value: 8
  misc_feature: MA Experiment 108522 PARAMETER Experiment Name: Zm_42deg_Heat_P Parameter: Organism Value: Zea mays
  misc_feature: MA Experiment 108522 PARAMETER Experiment Name: Zm_42deg_Heat_P Parameter: Plant Line Value: 35A19
  misc_feature: MA Experiment 108522 PARAMETER Experiment Name: Zm_42deg_Heat_P Parameter: Temperature (deg C) Value: 42 vs. 22
  misc_feature: MA Experiment 108522 PARAMETER Experiment Name: Zm_42deg_Heat_P Parameter: Timepoint (hr) Value: 1
  misc_feature: MA Experiment 108522 PARAMETER Experiment Name: Zm_42deg_Heat_P Parameter: Tissue Value: Aerial
  misc_feature: MA Experiment ID: 108529 Result: Down-regulated in Transcription
  misc_feature: MA Experiment 108529 PARAMETER Experiment Name: Zm_Imbibed_Seeds_P Parameter: Age (day) Value: 5 vs. 2
  misc_feature: MA Experiment 108529 PARAMETER Experiment Name: Zm_Imbibed_Seeds_P Parameter: Organism Value: Zea mays
  misc_feature: MA Experiment 108529 PARAMETER Experiment Name: Zm_Imbibed_Seeds_P Parameter: Plant Line Value: 35A19
  misc_feature: MA Experiment 108529 PARAMETER Experiment Name: Zm_Imbibed_Seeds_P Parameter: Tissue Value: Roots vs. Embryo
  misc_feature: MA Experiment ID: 108536 Result: Down-regulated in Transcription
  misc_feature: MA Experiment 108536 PARAMETER Experiment Name: Zm_Meristem_P Parameter: Age (day) Value: 8
  misc_feature: MA Experiment 108536 PARAMETER Experiment Name: Zm_Meristem_P Parameter: Organism Value: Zea mays
  misc_feature: MA Experiment 108536 PARAMETER Experiment Name: Zm_Meristem_P Parameter: Plant Line Value: 35A19
  misc_feature: MA Experiment 108536 PARAMETER Experiment Name: Zm_Meristem_P Parameter: Tissue Value: Shoot Meristem vs. Above Shoot Meristem
  misc_feature: MA Experiment ID: 108543 Result: Up-regulated in Transcription
  misc_feature: MA Experiment ID: 108545 Result: Up-regulated in Transcription
  misc_feature: MA Experiment 108545 PARAMETER Experiment Name: Zm_Imbibed_Seeds_P Parameter: Age (day) Value: 3 vs. 2
  misc_feature: MA Experiment 108545 PARAMETER Experiment Name: Zm_Imbibed_Seeds_P Parameter: Organism Value: Zea mays
  misc_feature: MA Experiment 108545 PARAMETER Experiment Name: Zm_Imbibed_Seeds_P Parameter: Plant Line Value: 35A19
  misc_feature: MA Experiment 108545 PARAMETER Experiment Name: Zm_Imbibed_Seeds_P Parameter: Tissue Value: Aerial vs. Embryo
  misc_feature: MA Experiment ID: 108556 Result: Down-regulated in Transcription
  misc_feature: MA Experiment 108556 PARAMETER Experiment Name: Zm_Drought_P Parameter: Age (day) Value: 9
  misc_feature: MA Experiment 108556 PARAMETER Experiment Name: Zm_Drought_P Parameter: Organism Value: Zea mays
  misc_feature: MA Experiment 108556 PARAMETER Experiment Name: Zm_Drought_P Parameter: Plant Line Value: 35A19
  misc_feature: MA Experiment 108556 PARAMETER Experiment Name: Zm_Drought_P Parameter: Timepoint (hr) Value: 24
  misc_feature: MA Experiment 108556 PARAMETER Experiment Name: Zm_Drought_P Parameter: Tissue Value: Aerial
  misc_feature: MA Experiment 108556 PARAMETER Experiment Name: Zm_Drought_P Parameter: Treatment Value: Drought vs. No Drought
agagccggccggtcgtcgtcgatccacatcaccattactccatctcctgataccgatcgagagctcctccctcgctccgggctgagtcgccggccggacggactcctccgatccgtgcggcgtcaggccggcccgccagctgggacatcccgtttgattcatcagccgtagtaggagccatggtcgaagctatttgatctatctctgagctgagctgggccggtaatttgatgatgcttgccggtgtgatcatgagtggatgataagagatgataagcggcaacctcaccaatgaagacctgggggccgggcgcaccaaggccgaggggccgacgaccgcggccggggccgtcgtcgcaaagagtcccgtgctgccgagctcccggcactggccgccgtcgacggagtccaggatcgtgcgcgtgtcgcgggtcttcggcggcaaggaccggcacagcaaggtgaggacggtcaaggggctgcgcgaccggcgcgtgcggctgtccgtgccgacggcgatacagctctacgacctccaggaccggctgggcctcagccagccgagcaaggtggtggactggctgctcgacgccgcgcagcacgagatcgacaagctgcctccgcttcagttcccaccgcaagcggcgcaggacctcgtcgcccatctgccgccgccatccatggtggcgcccttcgcagccgaccgagccgacggcgacaaacgccactgccacggcggcgtcaaagggctcatgggcctcaacaattccatccgcctcgtcaacgccaccatgccgctggctcacggcttgtactacacgcccgctcgtcttctactcgccggaaggcggcggattcaccatgaaagaagaagccaccggttatcagttcccagtacaaaatagcctcgaccactcgcaaggccagctctcactgagctcagctagaagcttccttcgccccggcaaccagggatgattaggtcactgatctctactgctccaagaaggtacgtagaagaataaagcttggtgtagtagtaatcaagtactcatttgaaggttccgtaacggttgtaactgcagttttgagatgctattgtttggtatgatcgagtagagggtctctagcatgcataattgaggttatttttgcaggacatgcaatgcaattcgttgcttcttttttatacaaggaagcaacgacaggtcatatgggtgtgtgtttttgtttgtattgtaataacaattttaataatccattcttgattttgtgtt

SEQ ID NO: 5095 - protein, 211 aa, Zea mays subsp. mays
  peptide (1)..(211): Ceres Seq. ID no. 12406954
  misc_feature (45)..(153): Pfam Name: TCP family transcription factor Pfam Description: TCP family transcription factor
  misc_feature (1)..(153): Homolog of NCBI NO: 34909780 NR Description: P0512C01.32 [Oryza sativa (japonica
  misc_feature (37)..(122): Homolog of NCBI NO: 15239489 NR Description: DNA binding protein - like; protein id: [Arabidopsis thaliana] >gi|10177320|dbj|BAB10646.1|
  misc_feature (1)..(124): Homolog of NCBI NO: 18396089 NR Description: expressed protein; protein id: At3g02150.1, by cDNA: 15552. [Arabidopsis thaliana]
  misc_feature (1)..(124): Homolog of NCBI NO: 30678498 NR Description: TCP family transcription factor TFPD [Arabidopsis >gi|6041802|gb|AAF02122.1|AC009755_15 unknown protein thaliana] >gi|6513919|gb|AAF14823.1|AC011664_5 unknown protein
  misc_feature (31)..(123): Homolog of NCBI NO: 15241512 NR Description: putative helix-loop-helix DNA binding protein;
  misc_feature (39)..(119): Homolog of NCBI NO: 18397402 NR Description: expressed protein; protein id: At1g30210.1, by cDNA: gi_14334669, supported by cDNA: gi_16323136 [Arabidopsis
  misc_feature (41)..(136): Homolog of NCBI NO: 33146716 NR Description: putative transcription factor PCF6 [Oryza sativa
  misc_feature (47)..(119): Homolog of NCBI NO: 25369264 NR Description: probable basic helix-loop-helix DNA binding
  misc_feature (47)..(119): Homolog of NCBI NO: 7486304 NR Description: hypothetical protein F28J12.50 - Arabidopsis
  misc_feature (47)..(119): Homolog of NCBI NO: 18415079 NR Description: teosinte branched1 - like protein; protein id: supported by cDNA: gi_14194128, supported by cDNA: gi_14194170 thaliana] >gi|14194129|gb|AAK56259.1|AF367270_1
MISGNLTNEDLGAGRTKAEGPTTAAGAVVAKSPVLPSSRHWPPSTESRIVRVSRVFGGKDRHSKVRTVKGLRDRRVRLSVPTAIQLYDLQDRLGLSQPSKVVDWLLDAAQHEIDKLPPLQFPPQAAQDLVAHLPPPSMVAPFAADRADGDKRHCHGGVKGLMGLNNSIRLVNATMPLAHGLYYTPARLLLAGRRRIHHERRSHRLSVPSTK

SEQ ID NO: 5096 - DNA, 1492 bp, Zea mays subsp. mays
  misc_feature (1)..(1492): Ceres Seq. ID no. 13498770
  misc_feature: MA Experiment ID: 108687 Result: Down-regulated in Transcription
  misc_feature: MA Experiment 108687 PARAMETER Experiment Name: Zm_Embryos-Flowers__P Parameter: Tissue Value: Embryo vs. Aerial+
  misc_feature: MA Experiment ID: 20000535 Result: Down-regulated in Transcription
  misc_feature: MA Experiment 20000535 PARAMETER Experiment Name: Zm_Hybrid_Seed_Dev_P Parameter: DAP Value: 30 vs. 12
  misc_feature: MA Experiment 20000535 PARAMETER Experiment Name: Zm_Hybrid_Seed_Dev_P Parameter: Organism Value: Zea mays
  misc_feature: MA Experiment 20000535 PARAMETER Experiment Name: Zm_Hybrid_Seed_Dev_P Parameter: Plant Line Value: 35A19
  misc_feature: MA Experiment 20000535 PARAMETER Experiment Name: Zm_Hybrid_Seed_Dev_P Parameter: Tissue Value: Embryo vs. Unfert Floret
aaaacctaggaggagcctagtggccacctagggtgaggaaaactgaggacgcgaggcgagagcgagatccaatctgcacccccccaccaaagaaagattcttccccgccggcctcgctctctcaacatccgtctcgctccttccaccctcgctgcgcctcaggcagcgagcgagcatatagcagcccaccacccacatgccgcagggccctcacccgtcgagccaattgagtggcagccagaaaaacccagagcgcgagcagcgagcgcgagcgactcggcagcgagcgcgggctcctgtgtgcagtgtgtctgcgctagagggcgaagggcacggaccgccttcgtcaataattgcggtacgaacggggcaaatccgtcgtttaaagaggtcgctgatagcgcctgctggtggcgagagagaaagcagcagaatcgctgagggatcgtcgatccggagaggcaaaaaagccgagagatcaggcagggcaccatggggcgcgggaaggtggtgctgcagcggatcgagaacaagatcagccggcaggtgaccttcgccaagcgccggaacggcctgctcaagaaggcgtacgagctctccgtcctctgcgacgccgaggtcgcgctcgtcctcttctcccacgccggccgcctctaccagttctcatcctcctccaatctgcttaagactctagagcggtaccagaggtacatctatgcttcagccgatgctgcagtgccatctagcgatcagatgcagaataactatcaagaatatgtgaagctgaaggcacgagttgaggttttacagcactcacaaaggaatcttcttggtgaagatctggccctacttagcccaagtgaacttgaccagcttgagaatcaagtagacaagaccttgaagcaaataagatcaagaaagactcaagtgttacttgatgaactttgtgacttaaagagaaaggaacaaatgctgcaagatgcaaacagggttctgaaaaggaagctgggcgagtttgaggcagaggcggcttctcccccgcagttagcgtggcaaggcgaaggcggcatgttgtcccatgaccctccacagccagaacacttcttccaggctctggagagcaacccatgtctgcaacctacataccatacgatggacatgaaccagcagccagtgccagcgccgggcggctgctatcctgcatggatgtcttagccagtgcttcattccattgccttgagaagtgtcctgaccttcacagatccctacgagctttattactgcttttgcctgcccctttgctgcttgcggtgcttactgaactgtccaaatgaccacatggtcatatataggttattgctgtctttatcttatgttgatcacggcctgctcagctgctttagcgccatgcaaaatggcttgggcgatgcacgcttgaatgggtcgaactgcttatgttttgggagtataaatcacttagcaataagcattg

SEQ ID NO: 5097 - protein, 240 aa, Zea mays subsp. mays
  peptide (1)..(240): Ceres Seq. ID no. 13498771
  misc_feature (75)..(174): Pfam Name: K-box region Pfam Description: K-box region
  misc_feature (1)..(240): Homolog of NCBI NO: 29372758 NR Description: m24 [Zea mays]
  misc_feature (1)..(240): Homolog of NCBI NO: 29372762 NR Description: m31 [Zea mays]
  misc_feature (1)..(240): Homolog of NCBI NO: 5295982 NR Description: MADS box-like protein [Oryza sativa (japonica
  misc_feature (1)..(240): Homolog of NCBI NO: 29570318 NR Description: MADS-box transcriptional factor [Triticum
  misc_feature (1)..(240): Homolog of NCBI NO: 28630965 NR Description: MADS7 [Lolium perenne]
  misc_feature (1)..(239): Homolog of NCBI NO: 8567991 NR Description: MADS-box protein MADS4 [Nicotiana tabacum]
  misc_feature (1)..(239): Homolog of NCBI NO: 13384050 NR Description: MADS-box transcription factor FBP9 [Petunia x
  misc_feature (1)..(239): Homolog of NCBI NO: 33342042 NR Description: MADS-box transcription factor [Houttuynia cordata]
  misc_feature (1)..(218): Homolog of NCBI NO: 6467976 NR Description: MADS box protein DOMADS3 [Dendrobium grex Madame
  misc_feature (1)..(239): Homolog of NCBI NO: 33342040 NR Description: MADS-box transcription factor [Houttuynia cordata]
MGRGKVVLQRIENKISRQVTFAKRRNGLLKKAYELSVLCDAEVALVLFSHAGRLYQFSSSSNLLKTLERYQRYIYASADAAVPSSDQMQNNYQEYVKLKARVEVLQHSQRNLLGEDLALLSPSELDQLENQVDKTLKQIRSRKTQVLLDELCDLKRKEQMLQDANRVLKRKLGEFEAEAASPPQLAWQGEGGMLSHDPPQPEHFFQALESNPCLQPTYHTMDMNQQPVPAPGGCYPAWMS

SEQ ID NO: 5098 - protein, 153 aa, Zea mays subsp. mays
  peptide (1)..(153): Ceres Seq. ID no. 13498772
  misc_feature (1)..(87): Pfam Name: K-box region Pfam Description: K-box region
  misc_feature (1)..(153): Homolog of NCBI NO: 29372758 NR Description: m24 [Zea mays]
  misc_feature (1)..(153): Homolog of NCBI NO: 29372762 NR Description: m31 [Zea mays]
  misc_feature (1)..(153): Homolog of NCBI NO: 5295982 NR Description: MADS box-like protein [Oryza sativa (japonica
  misc_feature (1)..(153): Homolog of NCBI NO: 29570318 NR Description: MADS-box transcriptional factor [Triticum
  misc_feature (1)..(153): Homolog of NCBI NO: 28630965 NR Description: MADS7 [Lolium perenne]
  misc_feature (1)..(152): Homolog of NCBI NO: 8567991 NR Description: MADS-box protein MADS4 [Nicotiana tabacum]
  misc_feature (1)..(152): Homolog of NCBI NO: 13384050 NR Description: MADS-box transcription factor FBP9 [Petunia x
  misc_feature (1)..(152): Homolog of NCBI NO: 33342042 NR Description: MADS-box transcription factor [Houttuynia cordata]
  misc_feature (1)..(131): Homolog of NCBI NO: 6467976 NR Description: MADS box protein DOMADS3 [Dendrobium grex Madame
  misc_feature (1)..(152): Homolog of NCBI NO: 33342040 NR Description: MADS-box transcription factor [Houttuynia cordata]
MQNNYQEYVKLKARVEVLQHSQRNLLGEDLALLSPSELDQLENQVDKTLKQIRSRKTQVLLDELCDLKRKEQMLQDANRVLKRKLGEFEAEAASPPQLAWQGEGGMLSHDPPQPEHFFQALESNPCLQPTYHTMDMNQQPVPAPGGCYPAWMS

SEQ ID NO: 5099 - DNA, 1352 bp, Zea mays subsp. mays
  misc_feature (1)..(1352): Ceres Seq. ID no. 12409718
  misc_feature: MA Experiment ID: 20000477 Result: Down-regulated in Transcription
  misc_feature: MA Experiment 20000477 PARAMETER Experiment Name: Zm_5mM_SA_P Parameter: Age (day) Value: 10
  misc_feature: MA Experiment 20000477 PARAMETER Experiment Name: Zm_5mM_SA_P Parameter: Organism Value: Zea mays
  misc_feature: MA Experiment 20000477 PARAMETER Experiment Name: Zm_5mM_SA_P Parameter: Plant Line Value: 35A19
  misc_feature: MA Experiment 20000477 PARAMETER Experiment Name: Zm_5mM_SA_P Parameter: Timepoint (hr) Value: 48
  misc_feature: MA Experiment 20000477 PARAMETER Experiment Name: Zm_5mM_SA_P Parameter: Tissue Value: Aerial
  misc_feature: MA Experiment 20000477 PARAMETER Experiment Name: Zm_5mM_SA_P Parameter: Treatment Value: 5mM SA vs. No Treatment
accagtcccctttacatccacacacaacgcgcaccacaccacaccacaccacccgacgccaacgtccgagaccaaactccgatccccactatgccggcggacggggaggcgctggcgccggccgtccacttctggggcgagcacccggccacggaggcggagttctactcggcgcacggcacggagggcgagccctccttacttcaccacgcccgacgcgggcgcccggcggctcttcacgcgcgcgtggaggccccgcgcgcccgancggcccagggcgctcgtgttcatggtccacggctacggcaatgacatcagctggacgttccagtccacggcggtcttcctcgcgcggtccgggttcgcctgcttcgcggccgacctcccgggccacggccgctcccacggcctccgggccttcgtgcccgacctcgacgccgccgtcgctgacctcctcgccttcttccgcgccgtcagggcgagggaggagcacgctggcctgccctgcttcctgttcggggagtccatgggcggggccatctgcctgctcatccacctccgcacacggccggaggagtgggcgggggcggtcctcgtcgctcccatgtgcaggatctccgaccggatccgcccgccgtggccgctgccggagattctcaccttcgtcgcgcgcttcagcgcccacggcggccatcgtgcccaccgccgacctcatcgagaagtccgtcaaggtgcccgccaagcgcatcgttgcagcgcgcaaccctgtgcgctacaacggccgtcccaggctcggcaccgtcgtcgagctgttgcgtgccaccgacgagctggccaagcgcctcggcgaagtcagcatcccgttccttgtcgtgcacggcagcaccgacgaggttaccgacccggaagtcagccgcgccctgtacgccgccgccgccagcaaggataagactatcaagatatacgacgggatgctccactccttgctatttggggaaccggacgagaacatcgagcgtgtccgtggggacatcctggcctggctcaacgagagatgcacagcccaggcaactcaccgtaacatacctgtcgaataagcattcggatgcatggatacacaagaaaaatatttcatgtacaacgattgttatatatgctatactcagtatttgactgtaaactgtttggtcaggtttagtggcttggatatacaaaatgttggttgcctgatcagtgtaaaagaatgctgcaaatgcttgtgatcgataatatcagctctcttcgggggctatggatggcaatacaaggcgttctctgccctgtacaagcttggcagaacgaattttatctcc

SEQ ID NO: 5100 - protein, 364 aa, Zea mays subsp. mays
  peptide (1)..(364): Ceres Seq. ID no. 12409719
  misc_feature (226)..(341): Pfam Name: alpha/beta hydrolase fold Pfam Description: alpha/beta hydrolase fold
  misc_feature (227)..(350): Homolog of NCBI NO: 18417885 NR Description: lipase-like protein; protein id: At5g16120.1, by cDNA: gi_13430613, supported by cDNA: gi_15293170 [Arabidopsis >gi|13430614|gb|AAK25929.1|AF360219_1 putative lipase
  misc_feature (226)..(351): Homolog of NCBI NO: 15219082 NR Description: putative lipase; protein id: At1g52760.1, by cDNA: 36954., supported by cDNA: gi_15450993 [Arabidopsis
  misc_feature (227)..(351): Homolog of NCBI NO: 7487947 NR Description: lysophospholipase homolog F12L6.7 - Arabidopsis
  misc_feature (226)..(353): Homolog of NCBI NO: 34899776 NR Description: putative lysophospholipase isolog [Oryza sativa
  misc_feature (227)..(351): Homolog of NCBI NO: 7487948 NR Description: lysophospholipase homolog F12L6.8 - Arabidopsis >gi|3355471|gb|AAC27833.1| putative phospholipase [Arabidopsis >gi|13877687|gb|AAK43921.1|AF370602_1 putative phospholipase
  misc_feature (227)..(351): Homolog of NCBI NO: 30687883 NR Description: esterase/lipase/thioesterase family [Arabidopsis >gi|19423964|gb|AAL87258.1| putative phospholipase [Arabidopsis >gi|21689759|gb|AAM67523.1| putative phospholipase [Arabidopsis
  misc_feature (227)..(361): Homolog of NCBI NO: 15220284 NR Description: lysophospholipase isolog; protein id: At1g11090.1
  misc_feature (227)..(351): Homolog of NCBI NO: 30687879 NR Description: hydrolase, alpha/beta fold family [Arabidopsis >gi|20197113|gb|AAC27832.2| putative phospholipase; alternative
  misc_feature (227)..(353): Homolog of NCBI NO: 18405038 NR Description: putative phospholipase; protein id: At2g39400.1, by cDNA: gi_14532651, supported by cDNA: gi_15450344, supported cDNA: gi_20259278 [Arabidopsis thaliana]
  misc_feature (227)..(351): Homolog of NCBI NO: 34894592 NR Description: phospholipase-like protein [Oryza sativa
  misc_feature (89)..(89): Xaa is any aa, unknown or other
QSPLHPHTTRTTPHHTTRRQRPRPNSDPHYAGGRGGAGAGRPLLGRAPGHGGGVLLGARHGGRALLTSPRPTRAPGGSSRARGGPARPXGPGRSCSWSTATAMTSAGRSSPRRSSSRGPGSPASRPTSRATAAPTASGPSCPTSTPPSLTSSPSSAPSGRGRSTLACPASCSGSPWAGPSACSSTSAHGRRSGRGRSSSLPCAGSPTGSARRGRCRRFSPSSRASAPTAAIVPTADLIEKSVKVPAKRIVAARNPVRYNGRPRLGTVVELLRATDELAKRLGEVSIPFLVVHGSTDEVTDPEVSRALYAAAASKDKTIKIYDGMLHSLLFGEPDENIERVRGDILAWLNERCTAQATHRNIPVE

SEQ ID NO: 5101 - protein, 315 aa, Zea mays subsp. mays
  peptide (1)..(315): Ceres Seq. ID no. 12409720
  misc_feature (121)..(226): Pfam Name: alpha/beta hydrolase fold Pfam Description: alpha/beta hydrolase fold
  misc_feature (67)..(226): Homolog of NCBI NO: 34899776 NR Description: putative lysophospholipase isolog [Oryza sativa
  misc_feature (64)..(225): Homolog of NCBI NO: 15220284 NR Description: lysophospholipase isolog; protein id: At1g11090.1
  misc_feature (77)..(226): Homolog of NCBI NO: 7487948 NR Description: lysophospholipase homolog F12L6.8 - Arabidopsis >gi|3355471|gb|AAC27833.1| putative phospholipase [Arabidopsis >gi|13877687|gb|AAK43921.1|AF370602_1 putative phospholipase
  misc_feature (77)..(226): Homolog of NCBI NO: 30687883 NR Description: esterase/lipase/thioesterase family [Arabidopsis >gi|19423964|gb|AAL87258.1| putative phospholipase [Arabidopsis >gi|21689759|gb|AAM67523.1| putative phospholipase [Arabidopsis
  misc_feature (36)..(223): Homolog of NCBI NO: 18417885 NR Description: lipase-like protein; protein id: At5g16120.1, by cDNA: gi_13430613, supported by cDNA: gi_15293170 [Arabidopsis >gi|13430614|gb|AAK25929.1|AF360219_1 putative lipase
  misc_feature (48)..(211): Homolog of NCBI NO: 15219082 NR Description: putative lipase; protein id: At1g52760.1, by cDNA: 36954., supported by cDNA: gi_15450993 [Arabidopsis
  misc_feature (77)..(220): Homolog of NCBI NO: 7487947 NR Description: lysophospholipase homolog F12L6.7 - Arabidopsis
  misc_feature (77)..(220): Homolog of NCBI NO: 30687879 NR Description: hydrolase, alpha/beta fold family [Arabidopsis >gi|20197113|gb|AAC27832.2| putative phospholipase; alternative
  misc_feature (77)..(225): Homolog of NCBI NO: 18405038 NR Description: putative phospholipase; protein id: At2g39400.1, by cDNA: gi_14532651, supported by cDNA: gi_15450344, supported cDNA: gi_20259278 [Arabidopsis thaliana]
  misc_feature (77)..(222): Homolog of NCBI NO: 34894592 NR Description: phospholipase-like protein [Oryza sativa
  misc_feature (89)..(89): Xaa is any aa, unknown or other
PVPFTSTHNAHHTTPHHPTPTSETKLRSPLCRRTGRRWRRPSTSGASTRPRRRSSTRRTARRASPPYFTTPDAGARRLFTRAWRPRAPXRPRALVFMVHGYGNDISWTFQSTAVFLARSGFACFAADLPGHGRSHGLRAFVPDLDAAVADLLAFFRAVRAREEHAGLPCFLFGESMGGAICLLIHLRTRPEEWAGAVLVAPMCRISDRIRPPWPLPEILTFVARFSAHGGHRAHRRPHREVRQGARQAHRCSAQPCALQRPSQARHRRRAVACHRRAGQAPRRSQHPVPCRARQHRRGYRPGSQPRPVRRRRQQG

SEQ ID NO: 5102 - protein, 262 aa, Zea mays subsp. mays
  peptide (1)..(262): Ceres Seq. ID no. 12409721
  misc_feature (124)..(239): Pfam Name: alpha/beta hydrolase fold Pfam Description: alpha/beta hydrolase fold
  misc_feature (124)..(251): Homolog of NCBI NO: 34899776 NR Description: putative lysophospholipase isolog [Oryza sativa
  misc_feature (125)..(259): Homolog of NCBI NO: 15220284 NR Description: lysophospholipase isolog; protein id: At1g11090.1
  misc_feature (125)..(249): Homolog of NCBI NO: 7487948 NR Description: lysophospholipase homolog F12L6.8 - Arabidopsis >gi|3355471|gb|AAC27833.1| putative phospholipase [Arabidopsis >gi|13877687|gb|AAK43921.1|AF370602_1 putative phospholipase
  misc_feature (125)..(249): Homolog of NCBI NO: 30687883 NR Description: esterase/lipase/thioesterase family [Arabidopsis >gi|19423964|gb|AAL87258.1| putative phospholipase [Arabidopsis >gi|21689759|gb|AAM67523.1| putative phospholipase [Arabidopsis
  misc_feature (125)..(248): Homolog of NCBI NO: 18417885 NR Description: lipase-like protein; protein id: At5g16120.1, by cDNA: gi_13430613, supported by cDNA: gi_15293170 [Arabidopsis >gi|13430614|gb|AAK25929.1|AF360219_1 putative lipase
  misc_feature (124)..(249): Homolog of NCBI NO: 15219082 NR Description: putative lipase; protein id: At1g52760.1, by cDNA: 36954., supported by cDNA: gi_15450993 [Arabidopsis
  misc_feature (125)..(249): Homolog of NCBI NO: 7487947 NR Description: lysophospholipase homolog F12L6.7 - Arabidopsis
  misc_feature (125)..(249): Homolog of NCBI NO: 30687879 NR Description: hydrolase, alpha/beta fold family [Arabidopsis >gi|20197113|gb|AAC27832.2| putative phospholipase; alternative
  misc_feature (125)..(251): Homolog of NCBI NO: 18405038 NR Description: putative phospholipase; protein id: At2g39400.1, by cDNA: gi_14532651, supported by cDNA: gi_15450344, supported cDNA: gi_20259278 [Arabidopsis thaliana]
  misc_feature (125)..(249): Homolog of NCBI NO: 34894592 NR Description: phospholipase-like protein [Oryza sativa
MTSAGRSSPRRSSSRGPGSPASRPTSRATAAPTASGPSCPTSTPPSLTSSPSSAPSGRGRSTLACPASCSGSPWAGPSACSSTSAHGRRSGRGRSSSLPCAGSPTGSARRGRCRRFSPSSRASAPTAAIVPTADLIEKSVKVPAKRIVAARNPVRYNGRPRLGTVVELLRATDELAKRLGEVSIPFLVVHGSTDEVTDPEVSRALYAAAASKDKTIKIYDGMLHSLLFGEPDENIERVRGDILAWLNERCTAQATHRNIPVE

SEQ ID NO: 5103 - protein, 219 aa, Zea mays subsp. mays
  peptide (1)..(219): Ceres Seq. ID no. 12409722
  misc_feature (25)..(130): Pfam Name: alpha/beta hydrolase fold Pfam Description: alpha/beta hydrolase fold
  misc_feature (1)..(130): Homolog of NCBI NO: 34899776 NR Description: putative lysophospholipase isolog [Oryza sativa
  misc_feature (1)..(129): Homolog of NCBI NO: 15220284 NR Description: lysophospholipase isolog; protein id: At1g11090.1
  misc_feature (1)..(130): Homolog of NCBI NO: 7487948 NR Description: lysophospholipase homolog F12L6.8 - Arabidopsis >gi|3355471|gb|AAC27833.1| putative phospholipase [Arabidopsis >gi|13877687|gb|AAK43921.1|AF370602_1 putative phospholipase
  misc_feature (1)..(130): Homolog of NCBI NO: 30687883 NR Description: esterase/lipase/thioesterase family [Arabidopsis >gi|19423964|gb|AAL87258.1| putative phospholipase [Arabidopsis >gi|21689759|gb|AAM67523.1| putative phospholipase [Arabidopsis
  misc_feature (1)..(127): Homolog of NCBI NO: 18417885 NR Description: lipase-like protein; protein id: At5g16120.1, by cDNA: gi_13430613, supported by cDNA: gi_15293170 [Arabidopsis >gi|13430614|gb|AAK25929.1|AF360219_1 putative lipase
  misc_feature (1)..(115): Homolog of NCBI NO: 15219082 NR Description: putative lipase; protein id: At1g52760.1, by cDNA: 36954., supported by cDNA: gi_15450993 [Arabidopsis
  misc_feature (1)..(124): Homolog of NCBI NO: 7487947 NR Description: lysophospholipase homolog F12L6.7 - Arabidopsis
  misc_feature (1)..(124): Homolog of NCBI NO: 30687879 NR Description: hydrolase, alpha/beta fold family [Arabidopsis >gi|20197113|gb|AAC27832.2| putative phospholipase; alternative
  misc_feature (1)..(129): Homolog of NCBI NO: 18405038 NR Description: putative phospholipase; protein id: At2g39400.1, by cDNA: gi_14532651, supported by cDNA: gi_15450344, supported cDNA: gi_20259278 [Arabidopsis thaliana]
  misc_feature (1)..(126): Homolog of NCBI NO: 34894592 NR Description: phospholipase-like protein [Oryza sativa
MVHGYGNDISWTFQSTAVFLARSGFACFAADLPGHGRSHGLRAFVPDLDAAVADLLAFFRAVRAREEHAGLPCFLFGESMGGAICLLIHLRTRPEEWAGAVLVAPMCRISDRIRPPWPLPEILTFVARFSAHGGHRAHRRPHREVRQGARQAHRCSAQPCALQRPSQARHRRRAVACHRRAGQAPRRSQHPVPCRARQHRRGYRPGSQPRPVRRRRQQG

SEQ ID NO: 5104 - DNA, 1270 bp, Zea mays subsp. mays
  misc_feature (1)..(1270): Ceres Seq. ID no. 12369175
  misc_feature: MA Experiment ID: 108687 Result: Down-regulated in Transcription
  misc_feature: MA Experiment 108687 PARAMETER Experiment Name: Zm_Embryos-Flowers__P Parameter: Tissue Value: Embryo vs. Aerial+
  misc_feature: MA Experiment ID: 108689 Result: Up-regulated in Transcription
  misc_feature: MA Experiment 108689 PARAMETER Experiment Name: Zm_Drought_Roots_P Parameter: Age (day) Value: 9
  misc_feature: MA Experiment 108689 PARAMETER Experiment Name: Zm_Drought_Roots_P Parameter: Organism Value: Zea mays
  misc_feature: MA Experiment 108689 PARAMETER Experiment Name: Zm_Drought_Roots_P Parameter: Plant Line Value: 35A19
  misc_feature: MA Experiment 108689 PARAMETER Experiment Name: Zm_Drought_Roots_P Parameter: Timepoint (hr) Value: 24
  misc_feature: MA Experiment 108689 PARAMETER Experiment Name: Zm_Drought_Roots_P Parameter: Tissue Value: Roots
  misc_feature: MA Experiment 108689 PARAMETER Experiment Name: Zm_Drought_Roots_P Parameter: Treatment Value: Drought vs. No Drought
  misc_feature: MA Experiment ID: 20000534 Result: Down-regulated in Transcription
  misc_feature: MA Experiment 20000534 PARAMETER Experiment Name: Zm_Hybrid_Pollen_P Parameter: Age (day) Value: 8
  misc_feature: MA Experiment 20000534 PARAMETER Experiment Name: Zm_Hybrid_Pollen_P Parameter: Organism Value: Zea mays
  misc_feature: MA Experiment 20000534 PARAMETER Experiment Name: Zm_Hybrid_Pollen_P Parameter: Plant Line Value: 35A19
  misc_feature: MA Experiment 20000534 PARAMETER Experiment Name: Zm_Hybrid_Pollen_P Parameter: Tissue Value: Pollen vs. Aerial
  misc_feature: MA Experiment ID: 20000535 Result: Down-regulated in Transcription
  misc_feature: MA Experiment 20000535 PARAMETER Experiment Name: Zm_Hybrid_Seed_Dev_P Parameter: DAP Value: 30 vs. 12
  misc_feature: MA Experiment 20000535 PARAMETER Experiment Name: Zm_Hybrid_Seed_Dev_P Parameter: Organism Value: Zea mays
  misc_feature: MA Experiment 20000535 PARAMETER Experiment Name: Zm_Hybrid_Seed_Dev_P Parameter: Plant Line Value: 35A19
  misc_feature: MA Experiment 20000535 PARAMETER Experiment Name: Zm_Hybrid_Seed_Dev_P Parameter: Tissue Value: Embryo vs. Unfert Floret
agagcggcgctgccagcaaggcggctagtatgagcagcatggagtcgcggccgggccgaacgaacctggtggagcccatagggcacggcgccgcgctgccgtccggcggccaggcagtgcagccgtggtggacgagctccggggctgtgctcggtgcagtctcgccagccgtcgtggcggtggcgcccgggagcgggacggggattagcctgtcgagcagcccggcaggtggtagtggtggtggcggcgcggctaaaggagccgcgagtgacgagagcagcgaggattcacggagatctggggaaccaaaagatggaagcgctagtcaagaaaagaaccatgccacatcgcagatacccgctctggcgccagagtatttggcaccatactcgcagctggaactgaaccaatcaattgcttctgcagcatatcagtacccagatccttactatgcaggcatggttgctccctatggaagtcatgctgtggctcattttcagctacctggactaactcaatctcgaatgccattacctcttgaagtatccgaggagcctgtttatgtaaatgccaagcagtaccatggtatcttaagacgacggcagtcccgtgctaaggctgaacttgagaaaaaggtggtcaaagccagaaagccataccttcacgagtctcgtcatcagcacgcgatgaggagggcaagaggaaacgggggacgcttcctgaacacaaagaaaagtgacagtggtgctcccaatggaggcgaaaacgccgagcatctccatgtccctcccgacttactacagctacgacagaacgaggcttgaagtagcggtatggctctggcatccttgaacagcagttcctgtccacgggcgtaggcattcgagaccggattcatatagctctccacagcatacgcgcagccatctctgcggtaacgcacgttctcctgaacgagctttgtagcgagataggtatgcaagtgcaatctgggcgcaggaatccatcatcaagtgcccaatgcccatggggtaggtacgctgtttcaggcaattcattcttggctttcacgttccacccttgtgtaactggtgtgttgtaaatgtgtggaaaactaagcttgtgctctgtatcgggccgttcagcggaactgcaaaacgcctgtataattaagatcgaactttggattaactcggtaatgctttgtctggttttcttttagcttttcaactgtaacacggccacagctgattcatgtgatgtgcttgct

SEQ ID NO: 5105 - protein, 273 aa, Zea mays subsp. mays
  peptide (1)..(273): Ceres Seq. ID no. 12369176
  misc_feature (183)..(239): Pfam Name: CCAAT-binding transcription factor (CBF-B/NF-YA) Pfam Description: CCAAT-binding transcription factor
  misc_feature (13)..(272): Homolog of NCBI NO: 27552556 NR Description: putative CCAAT-binding transcription factor
  misc_feature (71)..(260): Homolog of NCBI NO: 7489565 NR Description: probable transcription factor - rice
  misc_feature (69)..(264): Homolog of NCBI NO: 38640734 NR Description: transcription factor WAPB [Triticum aestivum]
  misc_feature (13)..(257): Homolog of NCBI NO: 30684143 NR Description: CCAAT box binding factor/ transcription factor [Arabidopsis thaliana] >gi|2398521|emb|CAA74048.1| transcription
  misc_feature (13)..(257): Homolog of NCBI NO: 18416875 NR Description: CCAAT box binding factor/ transcription factor protein id: At5g12840.1 [Arabidopsis thaliana]
  misc_feature (72)..(273): Homolog of NCBI NO: 28209479 NR Description: putative CCAAT-binding transcription factor
  misc_feature (73)..(256): Homolog of NCBI NO: 34395137 NR Description: putative transcription factor [Oryza sativa
  misc_feature (21)..(273): Homolog of NCBI NO: 9293997 NR Description: CCAAT-binding transcription factor B subunit
  misc_feature (21)..(273): Homolog of NCBI NO: 18402799 NR Description: CCAAT-binding factor B chain, putative; protein At3g20910.1, supported by cDNA: 37744., supported by cDNA: [Arabidopsis thaliana] >gi|15724232|gb|AAL06509.1|AF412056_1
  misc_feature (91)..(246): Homolog of NCBI NO: 25511727 NR Description: F26G16.12 protein - Arabidopsis thaliana Contains similarity to gb|Y13720 Hap2a transcription factor from
SGAASKAASMSSMESRPGRTNLVEPIGHGAALPSGGQAVQPWWTSSGAVLGAVSPAVVAVAPGSGTGISLSSSPAGGSGGGGAAKGAASDESSEDSRRSGEPKDGSASQEKNHATSQIPALAPEYLAPYSQLELNQSIASAAYQYPDPYYAGMVAPYGSHAVAHFQLPGLTQSRMPLPLEVSEEPVYVNAKQYHGILRRRQSRAKAELEKKVVKARKPYLHESRHQHAMRRARGNGGRFLNTKKSDSGAPNGGENAEHLHVPPDLLQLRQNEA

SEQ ID NO: 5106 - protein, 264 aa, Zea mays subsp. mays
  peptide (1)..(264): Ceres Seq. ID no. 12369177
  misc_feature (174)..(230): Pfam Name: CCAAT-binding transcription factor (CBF-B/NF-YA) Pfam Description: CCAAT-binding transcription factor
  misc_feature (4)..(263): Homolog of NCBI NO: 27552556 NR Description: putative CCAAT-binding transcription factor
  misc_feature (62)..(251): Homolog of NCBI NO: 7489565 NR Description: probable transcription factor - rice
  misc_feature (60)..(255): Homolog of NCBI NO: 38640734 NR Description: transcription factor WAPB [Triticum aestivum]
  misc_feature (4)..(248): Homolog of NCBI NO: 30684143 NR Description: CCAAT box binding factor/ transcription factor [Arabidopsis thaliana] >gi|2398521|emb|CAA74048.1| transcription
  misc_feature (4)..(248): Homolog of NCBI NO: 18416875 NR Description: CCAAT box binding factor/ transcription factor protein id: At5g12840.1 [Arabidopsis thaliana]
  misc_feature (63)..(264): Homolog of NCBI NO: 28209479 NR Description: putative CCAAT-binding transcription factor
  misc_feature (64)..(247): Homolog of NCBI NO: 34395137 NR Description: putative transcription factor [Oryza sativa
  misc_feature (12)..(264): Homolog of NCBI NO: 9293997 NR Description: CCAAT-binding transcription factor B subunit
  misc_feature (12)..(264): Homolog of NCBI NO: 18402799 NR Description: CCAAT-binding factor B chain, putative; protein At3g20910.1, supported by cDNA: 37744., supported by cDNA: [Arabidopsis thaliana] >gi|15724232|gb|AAL06509.1|AF412056_1
  misc_feature (82)..(237): Homolog of NCBI NO: 25511727 NR Description: F26G16.12 protein - Arabidopsis thaliana Contains similarity to gb|Y13720 Hap2a transcription factor from
MSSMESRPGRTNLVEPIGHGAALPSGGQAVQPWWTSSGAVLGAVSPAVVAVAPGSGTGISLSSSPAGGSGGGGAAKGAASDESSEDSRRSGEPKDGSASQEKNHATSQIPALAPEYLAPYSQLELNQSIASAAYQYPDPYYAGMVAPYGSHAVAHFQLPGLTQSRMPLPLEVSEEPVYVNAKQYHGILRRRQSRAKAELEKKVVKARKPYLHESRHQHAMRRARGNGGRFLNTKKSDSGAPNGGENAEHLHVPPDLLQLRQNEA

SEQ ID NO: 5107 - protein, 261 aa, Zea mays subsp. mays
  peptide (1)..(261): Ceres Seq. ID no. 12369178
  misc_feature (171)..(227): Pfam Name: CCAAT-binding transcription factor (CBF-B/NF-YA) Pfam Description: CCAAT-binding transcription factor
  misc_feature (1)..(260): Homolog of NCBI NO: 27552556 NR Description: putative CCAAT-binding transcription factor
  misc_feature (59)..(248): Homolog of NCBI NO: 7489565 NR Description: probable transcription factor - rice
  misc_feature (57)..(252): Homolog of NCBI NO: 38640734 NR Description: transcription factor WAPB [Triticum aestivum]
  misc_feature (1)..(245): Homolog of NCBI NO: 30684143 NR Description: CCAAT box binding factor/ transcription factor [Arabidopsis thaliana] >gi|2398521|emb|CAA74048.1| transcription
  misc_feature (1)..(245): Homolog of NCBI NO: 18416875 NR Description: CCAAT box binding factor/ transcription factor protein id: At5g12840.1 [Arabidopsis thaliana]
  misc_feature (60)..(261): Homolog of NCBI NO: 28209479 NR Description: putative CCAAT-binding transcription factor
  misc_feature (61)..(244): Homolog of NCBI NO: 34395137 NR Description: putative transcription factor [Oryza sativa
  misc_feature (9)..(261): Homolog of NCBI NO: 9293997 NR Description: CCAAT-binding transcription factor B subunit
  misc_feature (9)..(261): Homolog of NCBI NO: 18402799 NR Description: CCAAT-binding factor B chain, putative; protein At3g20910.1, supported by cDNA: 37744., supported by cDNA: [Arabidopsis thaliana] >gi|15724232|gb|AAL06509.1|AF412056_1
  misc_feature (79)..(234): Homolog of NCBI NO: 25511727 NR Description: F26G16.12 protein - Arabidopsis thaliana Contains similarity to gb|Y13720 Hap2a transcription factor from
MESRPGRTNLVEPIGHGAALPSGGQAVQPWWTSSGAVLGAVSPAVVAVAPGSGTGISLSSSPAGGSGGGGAAKGAASDESSEDSRRSGEPKDGSASQEKNHATSQIPALAPEYLAPYSQLELNQSIASAAYQYPDPYYAGMVAPYGSHAVAHFQLPGLTQSRMPLPLEVSEEPVYVNAKQYHGILRRRQSRAKAELEKKVVKARKPYLHESRHQHAMRRARGNGGRFLNTKKSDSGAPNGGENAEHLHVPPDLLQLRQNEA

SEQ ID NO: 5108 - DNA, 1249 bp, Zea mays subsp. mays
  misc_feature (1)..(1249): Ceres Seq. ID no. 12373684
  misc_feature: MA Experiment ID: 108527 Result: Up-regulated in Transcription
  misc_feature: MA Experiment 108527 PARAMETER Experiment Name: Zm_5mM_NO_P Parameter: Age (day) Value: 8
  misc_feature: MA Experiment 108527 PARAMETER Experiment Name: Zm_5mM_NO_P Parameter: Organism Value: Zea mays
  misc_feature: MA Experiment 108527 PARAMETER Experiment Name: Zm_5mM_NO_P Parameter: Plant Line Value: 35A19
  misc_feature: MA Experiment 108527 PARAMETER Experiment Name: Zm_5mM_NO_P Parameter: Timepoint (hr) Value: 6
  misc_feature: MA Experiment 108527 PARAMETER Experiment Name: Zm_5mM_NO_P Parameter: Tissue Value: Aerial
  misc_feature: MA Experiment 108527 PARAMETER Experiment Name: Zm_5mM_NO_P Parameter: Treatment Value: 5mM NO vs. No Treatment
  misc_feature: MA Experiment ID: 108559 Result: Up-regulated in Transcription
  misc_feature: MA Experiment 108559 PARAMETER Experiment Name: Zm_5mM_NO_P Parameter: Age (day) Value: 8
  misc_feature: MA Experiment 108559 PARAMETER Experiment Name: Zm_5mM_NO_P Parameter: Organism Value: Zea mays
  misc_feature: MA Experiment 108559 PARAMETER Experiment Name: Zm_5mM_NO_P Parameter: Plant Line Value: 35A19
  misc_feature: MA Experiment 108559 PARAMETER Experiment Name: Zm_5mM_NO_P Parameter: Timepoint (hr) Value: 12
  misc_feature: MA Experiment 108559 PARAMETER Experiment Name: Zm_5mM_NO_P Parameter: Tissue Value: Aerial
  misc_feature: MA Experiment 108559 PARAMETER Experiment Name: Zm_5mM_NO_P Parameter: Treatment Value: 5mM NO vs. No Treatment
accggaaaaaaaacattcgcggtggcttctttcttcttccccaatccaactccaaactctccatccagtgggaaaaaaaaacaaaaagggtaccggaagcggcgaaagcctcgcctcccgccgctctcgcatcgtctccagagcgcacgtcagatcaggtgcgccgcgcccccctcgcctaagctgcgacgaccatccatcgaacaggaaggatgacgggctccatggatctcccggccaagggcgggttcagcttcgacctgtgtcgccggaacaacatgctggagaagaacggactcaaggtcccgggattcaggaagaccgggacaaccatcgtcggcctcgtctttcaggatggggttgttcttggggcagacacaagggcaactgagggccccatagttgctgataagaactgtgagaaaatccactttatggcaccgaatatatactgctgtggagcaggaactgctgcggacacggaggccgttacagatatggtgagctcccagctacagcttcaccgttatgcaacgggccgcgaatcaagagttgtaactgctcttacactactgaagtcacacctcttcaagtatcaaggccatgtcagtgctgcccttgttcttggtggagtggattgtactgggccacatttacacactgtttatccacacgggtccactgatactcttccttttgccaccatgggctctggttctcttgctgcaatgtcagtgtttgaatcgaagtacaaagaaggccttactagggaggagggaatacagattgtgtgcgaagcaatctgtgctggtattttcaatgacttgggtagtgggagcaacgtggacgtctgcgtgataaccaaggggaagacagaatacttgagaaaccaccagttgccgaatcccaggacttatgctagttcaaagggatacagtttcacaaaggggcagactgaggtactgtcttcaaaggtcacacttctaaagcagaaggttgaggtcgccgagggtggtgatgctatggaggagtgatcttgcatgcctgcattcatacaagcatattctgaatctgtgtaacttttcttagtggagcagctagaacaagaaaaaaaaaaatttggagatctttgctgtactcgctggaccgaagccagggctcttatgctaaatgtgtttctaatgtttggcacattttaaattgcttgttgtttctgaatgtttaaaaccggtgaagggtatttgcttgt

SEQ ID NO: 5109 - protein, 273 aa, Zea mays subsp. mays
  peptide (1)..(273): Ceres Seq. ID no. 12373685
  misc_feature (36)..(216): Pfam Name: Proteasome A-type and B-type Pfam Description: Proteasome A-type and B-type
  misc_feature (1)..(273): Homolog of NCBI NO: 8671504 NR Description: beta 2 subunit of 20S proteasome [Oryza sativa
  misc_feature (4)..(273): Homolog of NCBI NO: 15237451 NR Description: 20S proteasome beta subunit B (PBB2); protein id: supported by cDNA: 38185., supported by cDNA: gi_20260223, by cDNA: gi_3421103 [Arabidopsis thaliana]
  misc_feature (4)..(273): Homolog of NCBI NO: 18405364 NR Description: 20S proteasome beta subunit B (PBB1); protein id: supported by cDNA: 25264., supported by cDNA: gi_3421101
  misc_feature (4)..(273): Homolog of NCBI NO: 2511578 NR Description: multicatalytic endopeptidase [Arabidopsis
  misc_feature (4)..(273): Homolog of NCBI NO: 20260224 NR Description: 20S proteasome beta subunit PBB2 [Arabidopsis >gi|21387013|gb|AAM47910.1| 20S proteasome beta subunit PBB2
  misc_feature (4)..(273): Homolog of NCBI NO: 21593337 NR Description: 20S proteasome beta subunit PBB2 [Arabidopsis
  misc_feature (4)..(245): Homolog of NCBI NO: 30688785 NR Description: 20S proteasome beta subunit B (PBB1) [Arabidopsis
  misc_feature (56)..(273): Homolog of NCBI NO: 2511576 NR Description: multicatalytic endopeptidase [Arabidopsis
  misc_feature (1)..(263): Homolog of NCBI NO: 24664391 NR Description: Proteasome beta2 subunit CG3329-PA
  misc_feature (4)..(266): Homolog of NCBI NO: 4506203 NR Description: proteasome beta 7 subunit proprotein; proteasome Z; proteasome subunit beta 7; proteasome catalytic subunit 2; chain Z; proteasome subunit alpha; multicatalytic endopeptidase
MTGSMDLPAKGGFSFDLCRRNNMLEKNGLKVPGFRKTGTTIVGLVFQDGVVLGADTRATEGPIVADKNCEKIHFMAPNIYCCGAGTAADTEAVTDMVSSQLQLHRYATGRESRVVTALTLLKSHLFKYQGHVSAALVLGGVDCTGPHLHTVYPHGSTDTLPFATMGSGSLAAMSVFESKYKEGLTREEGIQIVCEAICAGIFNDLGSGSNVDVCVITKGKTEYLRNHQLPNPRTYASSKGYSFTKGQTEVLSSKVTLLKQKVEVAEGGDAMEE

SEQ ID NO: 5110 - protein, 269 aa, Zea mays subsp. mays
  peptide (1)..(269): Ceres Seq. ID no. 12373686
  misc_feature (32)..(212): Pfam Name: Proteasome A-type and B-type Pfam Description: Proteasome A-type and B-type
  misc_feature (1)..(269): Homolog of NCBI NO: 8671504 NR Description: beta 2 subunit of 20S proteasome [Oryza sativa
  misc_feature (1)..(269): Homolog of NCBI NO: 15237451 NR Description: 20S proteasome beta subunit B (PBB2); protein id: supported by cDNA: 38185., supported by cDNA: gi_20260223, by cDNA: gi_3421103 [Arabidopsis thaliana]
  misc_feature (1)..(269): Homolog of NCBI NO: 18405364 NR Description: 20S proteasome beta subunit B (PBB1); protein id: supported by cDNA: 25264., supported by cDNA: gi_3421101
  misc_feature (1)..(269): Homolog of NCBI NO: 2511578 NR Description: multicatalytic endopeptidase [Arabidopsis
  misc_feature (1)..(269): Homolog of NCBI NO: 20260224 NR Description: 20S proteasome beta subunit PBB2 [Arabidopsis >gi|21387013|gb|AAM47910.1| 20S proteasome beta subunit PBB2
  misc_feature (1)..(269): Homolog of NCBI NO: 21593337 NR Description: 20S proteasome beta subunit PBB2 [Arabidopsis
  misc_feature (1)..(241): Homolog of NCBI NO: 30688785 NR Description: 20S proteasome beta subunit B (PBB1) [Arabidopsis
  misc_feature (52)..(269): Homolog of NCBI NO: 2511576 NR Description: multicatalytic endopeptidase [Arabidopsis
  misc_feature (1)..(259): Homolog of NCBI NO: 24664391 NR Description: Proteasome beta2 subunit CG3329-PA
  misc_feature (1)..(262): Homolog of NCBI NO: 4506203 NR Description: proteasome beta 7 subunit proprotein; proteasome Z; proteasome subunit beta 7; proteasome catalytic subunit 2; chain Z; proteasome subunit alpha; multicatalytic endopeptidase
MDLPAKGGFSFDLCRRNNMLEKNGLKVPGFRKTGTTIVGLVFQDGVVLGADTRATEGPIVADKNCEKIHFMAPNIYCCGAGTAADTEAVTDMVSSQLQLHRYATGRESRVVTALTLLKSHLFKYQGHVSAALVLGGVDCTGPHLHTVYPHGSTDTLPFATMGSGSLAAMSVFESKYKEGLTREEGIQIVCEAICAGIFNDLGSGSNVDVCVITKGKTEYLRNHQLPNPRTYASSKGYSFTKGQTEVLSSKVTLLKQKVEVAEGGDAMEE

SEQ ID NO: 5111 - protein, 251 aa, Zea mays subsp. mays
  peptide (1)..(251): Ceres Seq. ID no. 12373687
  misc_feature (14)..(194): Pfam Name: Proteasome A-type and B-type Pfam Description: Proteasome A-type and B-type
  misc_feature (1)..(251): Homolog of NCBI NO: 8671504 NR Description: beta 2 subunit of 20S proteasome [Oryza sativa
  misc_feature (1)..(251): Homolog of NCBI NO: 15237451 NR Description: 20S proteasome beta subunit B (PBB2); protein id: supported by cDNA: 38185., supported by cDNA: gi_20260223, by cDNA: gi_3421103 [Arabidopsis thaliana]
  misc_feature (1)..(251): Homolog of NCBI NO: 18405364 NR Description: 20S proteasome beta subunit B (PBB1); protein id: supported by cDNA: 25264., supported by cDNA: gi_3421101
  misc_feature (1)..(251): Homolog of NCBI NO: 2511578 NR Description: multicatalytic endopeptidase [Arabidopsis
  misc_feature (1)..(251): Homolog of NCBI NO: 20260224 NR Description: 20S proteasome beta subunit PBB2 [Arabidopsis >gi|21387013|gb|AAM47910.1| 20S proteasome beta subunit PBB2
  misc_feature (1)..(251): Homolog of NCBI NO: 21593337 NR Description: 20S proteasome beta subunit PBB2 [Arabidopsis
  misc_feature (1)..(223): Homolog of NCBI NO: 30688785 NR Description: 20S proteasome beta subunit B (PBB1) [Arabidopsis
  misc_feature (34)..(251): Homolog of NCBI NO: 2511576 NR Description: multicatalytic endopeptidase [Arabidopsis
  misc_feature (1)..(241): Homolog of NCBI NO: 24664391 NR Description: Proteasome beta2 subunit CG3329-PA
  misc_feature (1)..(244): Homolog of NCBI NO: 4506203 NR Description: proteasome beta 7 subunit proprotein; proteasome Z; proteasome subunit beta 7; proteasome catalytic subunit 2; chain Z; proteasome subunit alpha; multicatalytic endopeptidase
MLEKNGLKVPGFRKTGTTIVGLVFQDGVVLGADTRATEGPIVADKNCEKIHFMAPNIYCCGAGTAADTEAVTDMVSSQLQLHRYATGRESRVVTALTLLKSHLFKYQGHVSAALVLGGVDCTGPHLHTVYPHGSTDTLPFATMGSGSLAAMSVFESKYKEGLTREEGIQIVCEAICAGIFNDLGSGSNVDVCVITKGKTEYLRNHQLPNPRTYASSKGYSFTKGQTEVLSSKVTLLKQKVEVAEGGDAMEE

SEQ ID NO: 5112 - DNA, 1471 bp, Zea mays subsp. mays
  misc_feature (1)..(1471): Ceres Seq. ID no. 12349040
  misc_feature: MA Experiment ID: 108543 Result: Up-regulated in Transcription
  misc_feature: MA Experiment ID: 20000535 Result: Up-regulated in Transcription
  misc_feature: MA Experiment 20000535 PARAMETER Experiment Name: Zm_Hybrid_Seed_Dev_P Parameter: DAP Value: 30 vs. 12
  misc_feature: MA Experiment 20000535 PARAMETER Experiment Name: Zm_Hybrid_Seed_Dev_P Parameter: Organism Value: Zea mays
  misc_feature: MA Experiment 20000535 PARAMETER Experiment Name: Zm_Hybrid_Seed_Dev_P Parameter: Plant Line Value: 35A19
  misc_feature: MA Experiment 20000535 PARAMETER Experiment Name: Zm_Hybrid_Seed_Dev_P Parameter: Tissue Value: Embryo vs. Unfert Floret
acgcctcctcccctaccattcgcagttttggacacttggttgtcgtttcgtcccgcagatccgcaagcaccggggccagtagagagagagagagagaggagggagggtcgcggcctcgcggggggtggaggagatgtctgtggcgaaggaggcggggccgagcagcagggcggtgcttgtgacgggcggggcgggatacatcggcagccacgccgtgctgcagctgctcaccgcgggcttccgggtcgtcgtcgtcgacagcctcgccaactcctccgagctcgtgatccgccgcctgcgctcgctcgcggtggaacacgccaaaaacctcgcgttccacaaggttgatatccgtgacaaagatggattggaaaaggtttttgcttcaacaagatttgatgctgttattcattttgctggactgaaagctgttggagaaagtgtacaaaagcctttgctttattatgaccataatgttgttggcacaataaatcttctggaagtaatggcagctcatggatgtaagaagttagtgttctcatcatcagctgcagtttatgggtcacctaagaactcaccctgcactgaagattttcctctcactccacataacccatatggcagaaccaaacttatggcagaggagatatgccgtgatatctaccattcagatcctgaatggaatatcattttgcttaggtactttaatccagttggggctcaccccagtggataccttggtgaagacccatgtggaactcctaacaaccttatgcccttcgttcagcaaattgcagttggcaggaggccatcgctaacaatatttggaaataactacgcaacaaaggatgggacaggggttcgtgattatattcatgtggttgaccttgctgaaggacatcttttcgcattaaagaagctttttgaaagctcatctaacataggatgtgaagcatacaaccttggaaccggaaaaggaacatcagtgttggagatagtcaatgcatttgagaaggcttctggaaagaaaatccctttgatcatgggccaacggcgtcctggtgatgctgagattctcttttcatcgccggcaaaagcagagagagagctccactggaaagcgaaatatggcatcacagaaatgtgcggagacctgtggaactgggctagcaagagcccttatggatacgcggcatctgagtctccgaagctgaatggtagttcacgctgagcaacgccgattggcccgtgtggactcacttgtacatgagactgtagtgccagccaaccaggataaatgtagatctagtcggtcggtcatacagagagaagttctataggcctaggaaagaaatgttatcctgttcctcagcataagctcccatagtggttcttccatatgcgtatagtctatgaaatttgttctaggaccattgctatagtcaaccagctaattcaattctatttcttg

SEQ ID NO: 5113 - protein, 365 aa, Zea mays subsp. mays
  peptide (1)..(365): Ceres Seq. ID no. 12349041
  misc_feature (14)..(349): Pfam Name: NAD dependent epimerase/dehydratase family Pfam Description: NAD dependent epimerase/dehydratase family
  misc_feature (1)..(362): Homolog of NCBI NO: 25553520 NR Description: putative UDP-glucose 4-epimerase [Oryza sativa
  misc_feature (10)..(356): Homolog of NCBI NO: 11386775 NR Description: UDP-glucose 4-epimerase GEPI48 (Galactowaldenase)
  misc_feature (12)..(357): Homolog of NCBI NO: 21715990 NR Description: UDP-glucose 4-epimerase [Oryza sativa (japonica
  misc_feature (12)..(355): Homolog of NCBI NO: 32130594 NR Description: UDP-glucose-4-epimerase [Zea mays]
  misc_feature (11)..(355): Homolog of NCBI NO: 12643850 NR Description: Probable UDP-glucose 4-epimerase At4g10960
  misc_feature (11)..(355): Homolog of NCBI NO: 15236988 NR Description: UDP-galactose 4-epimerase - like protein; protein At4g10960.1, supported by cDNA: 15608., supported by cDNA:
  misc_feature (11)..(357): Homolog of NCBI NO: 21553659 NR Description: UDP-galactose 4-epimerase-like protein
  misc_feature (11)..(364): Homolog of NCBI NO: 15236663 NR Description: UDPglucose 4-epimerase - like protein; protein
  misc_feature (11)..(364): Homolog of NCBI NO: 21536846 NR Description: UDPglucose 4-epimerase-like protein [Arabidopsis
  misc_feature (14)..(355): Homolog of NCBI NO: 15217653 NR Description: UDP-galactose 4-epimerase, putative; protein id:
MSVAKEAGPSSRAVLVTGGAGYIGSHAVLQLLTAGFRVVVVDSLANSSELVIRRLRSLAVEHAKNLAFHKVDIRDKDGLEKVFASTRFDAVIHFAGLKAVGESVQKPLLYYDHNVVGTINLLEVMAAHGCKKLVFSSSAAVYGSPKNSPCTEDFPLTPHNPYGRTKLMAEEICRDIYHSDPEWNIILLRYFNPVGAHPSGYLGEDPCGTPNNLMPFVQQIAVGRRPSLTIFGNNYATKDGTGVRDYIHVVDLAEGHLFALKKLFESSSNIGCEAYNLGTGKGTSVLEIVNAFEKASGKKIPLIMGQRRPGDAEILFSSPAKAERELHWKAKYGITEMCGDLWNWASKSPYGYAASESPKLNGSSR

SEQ ID NO: 5114 - protein, 241 aa, Zea mays subsp. mays
  peptide (1)..(241): Ceres Seq. ID no. 12349042
  misc_feature (1)..(225): Pfam Name: NAD dependent epimerase/dehydratase family Pfam Description: NAD dependent epimerase/dehydratase family
  misc_feature (1)..(238): Homolog of NCBI NO: 25553520 NR Description: putative UDP-glucose 4-epimerase [Oryza sativa
  misc_feature (1)..(232): Homolog of NCBI NO: 11386775 NR Description: UDP-glucose 4-epimerase GEPI48 (Galactowaldenase)
  misc_feature (1)..(233): Homolog of NCBI NO: 21715990 NR Description: UDP-glucose 4-epimerase [Oryza sativa (japonica
  misc_feature (1)..(231): Homolog of NCBI NO: 32130594 NR Description: UDP-glucose-4-epimerase [Zea mays]
  misc_feature (1)..(231): Homolog of NCBI NO: 12643850 NR Description: Probable UDP-glucose 4-epimerase At4g10960
  misc_feature (1)..(231): Homolog of NCBI NO: 15236988 NR Description: UDP-galactose 4-epimerase - like protein; protein At4g10960.1, supported by cDNA: 15608., supported by cDNA:
  misc_feature (1)..(233): Homolog of NCBI NO: 21553659 NR Description: UDP-galactose 4-epimerase-like protein
  misc_feature (1)..(240): Homolog of NCBI NO: 15236663 NR Description: UDPglucose 4-epimerase - like protein; protein
  misc_feature (1)..(240): Homolog of NCBI NO: 21536846 NR Description: UDPglucose 4-epimerase-like protein [Arabidopsis
  misc_feature (1)..(231): Homolog of NCBI NO: 15217653 NR Description: UDP-galactose 4-epimerase, putative; protein id:
MAAHGCKKLVFSSSAAVYGSPKNSPCTEDFPLTPHNPYGRTKLMAEEICRDIYHSDPEWNIILLRYFNPVGAHPSGYLGEDPCGTPNNLMPFVQQIAVGRRPSLTIFGNNYATKDGTGVRDYIHVVDLAEGHLFALKKLFESSSNIGCEAYNLGTGKGTSVLEIVNAFEKASGKKIPLIMGQRRPGDAEILFSSPAKAERELHWKAKYGITEMCGDLWNWASKSPYGYAASESPKLNGSSR

SEQ ID NO: 5115 - protein, 198 aa, Zea mays subsp. mays
  peptide (1)..(198): Ceres Seq. ID no. 12349043
  misc_feature (1)..(182): Pfam Name: NAD dependent epimerase/dehydratase family Pfam Description: NAD dependent epimerase/dehydratase family
  misc_feature (1)..(195): Homolog of NCBI NO: 25553520 NR Description: putative UDP-glucose 4-epimerase [Oryza sativa
  misc_feature (1)..(189): Homolog of NCBI NO: 11386775 NR Description: UDP-glucose 4-epimerase GEPI48 (Galactowaldenase)
  misc_feature (1)..(190): Homolog of NCBI NO: 21715990 NR Description: UDP-glucose 4-epimerase [Oryza sativa (japonica
  misc_feature (1)..(188): Homolog of NCBI NO: 32130594 NR Description: UDP-glucose-4-epimerase [Zea mays]
  misc_feature (1)..(188): Homolog of NCBI NO: 12643850 NR Description: Probable UDP-glucose 4-epimerase At4g10960
  misc_feature (1)..(188): Homolog of NCBI NO: 15236988 NR Description: UDP-galactose 4-epimerase - like protein; protein At4g10960.1, supported by cDNA: 15608., supported by cDNA:
  misc_feature (1)..(190): Homolog of NCBI NO: 21553659 NR Description: UDP-galactose 4-epimerase-like protein
  misc_feature (1)..(197): Homolog of NCBI NO: 15236663 NR Description: UDPglucose 4-epimerase - like protein; protein
  misc_feature (1)..(197): Homolog of NCBI NO: 21536846 NR Description: UDPglucose 4-epimerase-like protein [Arabidopsis
  misc_feature (1)..(188): Homolog of NCBI NO: 15217653 NR Description: UDP-galactose 4-epimerase, putative; protein id:
MAEEICRDIYHSDPEWNIILLRYFNPVGAHPSGYLGEDPCGTPNNLMPFVQQIAVGRRPSLTIFGNNYATKDGTGVRDYIHVVDLAEGHLFALKKLFESSSNIGCEAYNLGTGKGTSVLEIVNAFEKASGKKIPLIMGQRRPGDAEILFSSPAKAERELHWKAKYGITEMCGDLWNWASKSPYGYAASESPKLNGSSR

SEQ ID NO: 5116 - DNA, 1163 bp, Zea mays subsp. mays
  misc_feature (1)..(1163): Ceres Seq. ID no. 12344724
  misc_feature: MA Experiment ID: 108527 Result: Up-regulated in Transcription
  misc_feature: MA Experiment 108527 PARAMETER Experiment Name: Zm_5mM_NO_P Parameter: Age (day) Value: 8
  misc_feature: MA Experiment 108527 PARAMETER Experiment Name: Zm_5mM_NO_P Parameter: Organism Value: Zea mays
  misc_feature: MA Experiment 108527 PARAMETER Experiment Name: Zm_5mM_NO_P Parameter: Plant Line Value: 35A19
  misc_feature: MA Experiment 108527 PARAMETER Experiment Name: Zm_5mM_NO_P Parameter: Timepoint (hr) Value: 6
  misc_feature: MA Experiment 108527 PARAMETER Experiment Name: Zm_5mM_NO_P Parameter: Tissue Value: Aerial
  misc_feature: MA Experiment 108527 PARAMETER Experiment Name: Zm_5mM_NO_P Parameter: Treatment Value: 5mM NO vs. No Treatment
  misc_feature: MA Experiment ID: 108559 Result: Up-regulated in Transcription
  misc_feature: MA Experiment 108559 PARAMETER Experiment Name: Zm_5mM_NO_P Parameter: Age (day) Value: 8
  misc_feature: MA Experiment 108559 PARAMETER Experiment Name: Zm_5mM_NO_P Parameter: Organism Value: Zea mays
  misc_feature: MA Experiment 108559 PARAMETER Experiment Name: Zm_5mM_NO_P Parameter: Plant Line Value: 35A19
  misc_feature: MA Experiment 108559 PARAMETER Experiment Name: Zm_5mM_NO_P Parameter: Timepoint (hr) Value: 12
  misc_feature: MA Experiment 108559 PARAMETER Experiment Name: Zm_5mM_NO_P Parameter: Tissue Value: Aerial
  misc_feature: MA Experiment 108559 PARAMETER Experiment Name: Zm_5mM_NO_P Parameter: Treatment Value: 5mM NO vs. No Treatment
agtgtggaggggaggcagggtagcccccgcggcgccgctccgctcgaaatccccaaaaaggcaagatcaaatcaaatcagatctctccacccccagcccatccatggcgatcgtgtacgccctggtcgcgcggggcacggtggtgctggccgagttcgccgccgtctcgggcaacgccggcgccgtggcccgtcggatcctcgagaagctgccgcccgacgccgagtccaggctgtgcttcgcgcaggaccggtacatcttccacgtcctccgatccgacgccgccggcatcaccttcctctgtatggccaacgacaccttcggaacaaggatcccctttctctacctggaggacatccaaatgaggttcatgaaaaactacggcagagtcgcccactctgcgctggcttacgccatgaacgatgagttctccagagtgctccatcagcaaatggagttcttctccagcaacccaagcgccgacacactcaaccgtctccgtggagaagtcagcgagatacacaccgtcatggtcgacaacatagagaaaattcttgacagaggcgatcgcatctcgctccttgtcgacaagacatccaccatgcaagacagcgcctttcacttccgcaagcaatccaagaggctccgtagagctctttggatgaagaatgccaagcttctagttgtgttgacagttgtcatagtagtgctgctctacttgatcatttctgctttctgtggaggcctttccttgtcatcatgcagatcatgagtaacacaccagatggctttgcccctcccttaaatggagggtagaacaccatggaatgatgcctgctgtgttgagcaccggagcttccggaggcaaaaaaaaaaaggagatcgatggataccactgtggtttccagtaactgggatcagattgtacagtggacgagtggagttggccgttgctgtttttgatgtcgccatggttgtgggtgaactcaattcttaaatcgtggtgtgcttagcatctttcttgccttgtcaaactgtcgttgtgacttgtgagggatgggactagtgagttgggttttgtagagttacatgggttatcaatgtgcagacatatatgtatgccgcgatgagtgttagtacatgcctactatggttatcggtgt

SEQ ID NO: 5117 - protein, 256 aa, Zea mays subsp. mays
  peptide (1)..(256): Ceres Seq. ID no. 12344725
  misc_feature (159)..(247): Pfam Name: Synaptobrevin Pfam Description: Synaptobrevin
  misc_feature (35)..(256): Homolog of NCBI NO: 37531190 NR Description: putative synaptobrevin-like protein [Oryza sativa
  misc_feature (35)..(256): Homolog of NCBI NO: 15242224 NR Description: synaptobrevin-like protein; protein id:
  misc_feature (35)..(254): Homolog of NCBI NO: 15236687 NR Description: synaptobrevin-like protein; protein id: supported by cDNA: 41543., supported by cDNA: gi_16612291
  misc_feature (35)..(254): Homolog of NCBI NO: 15238971 NR Description: putative protein; protein id: At5g11150.1, by cDNA: gi_20259406 [Arabidopsis thaliana]
  misc_feature (35)..(254): Homolog of NCBI NO: 34898442 NR Description: ESTs AU082579(S2069),D40238(S2069) correspond to
  misc_feature (35)..(254): Homolog of NCBI NO: 15224711 NR Description: putative synaptobrevin; protein id: At2g25340.1
  misc_feature (35)..(173): Homolog of NCBI NO: 16323190 NR Description: AT5g22360/MWD9_16 [Arabidopsis thaliana]
  misc_feature (35)..(256): Homolog of NCBI NO: 28828593 NR Description: similar to Arabidopsis thaliana (Mouse-ear cress).
  misc_feature (35)..(254): Homolog of NCBI NO: 33468929 NR Description: synaptobrevin like 1 [Mus musculus]
  misc_feature (35)..(254): Homolog of NCBI NO: 5032137 NR Description: synaptobrevin-like 1 [Homo sapiens]
VWRGGRVAPAAPLRSKSPKRQDQIKSDLSTPSPSMAIVYALVARGTVVLAEFAAVSGNAGAVARRILEKLPPDAESRLCFAQDRYIFHVLRSDAAGITFLCMANDTFGTRIPFLYLEDIQMRFMKNYGRVAHSALAYAMNDEFSRVLHQQMEFFSSNPSADTLNRLRGEVSEIHTVMVDNIEKILDRGDRISLLVDKTSTMQDSAFHFRKQSKRLRRALWMKNAKLLVVLTVVIVVLLYLIISAFCGGLSLSSCRS

SEQ ID NO: 5118 - protein, 222 aa, Zea mays subsp. mays
  peptide (1)..(222): Ceres Seq. ID no. 12344726
  misc_feature (125)..(213): Pfam Name: Synaptobrevin Pfam Description: Synaptobrevin
  misc_feature (1)..(222): Homolog of NCBI NO: 37531190 NR Description: putative synaptobrevin-like protein [Oryza sativa
  misc_feature (1)..(222): Homolog of NCBI NO: 15242224 NR Description: synaptobrevin-like protein; protein id:
  misc_feature (1)..(220): Homolog of NCBI NO: 15236687 NR Description: synaptobrevin-like protein; protein id: supported by cDNA: 41543., supported by cDNA: gi_16612291
  misc_feature (1)..(220): Homolog of NCBI NO: 15238971 NR Description: putative protein; protein id: At5g11150.1, by cDNA: gi_20259406 [Arabidopsis thaliana]
  misc_feature (1)..(220): Homolog of NCBI NO: 34898442 NR Description: ESTs AU082579(S2069),D40238(S2069) correspond to
  misc_feature (1)..(220): Homolog of NCBI NO: 15224711 NR Description: putative synaptobrevin; protein id: At2g25340.1
  misc_feature (1)..(139): Homolog of NCBI NO: 16323190 NR Description: AT5g22360/MWD9_16 [Arabidopsis thaliana]
  misc_feature (1)..(222): Homolog of NCBI NO: 28828593 NR Description: similar to Arabidopsis thaliana (Mouse-ear cress).
  misc_feature (1)..(220): Homolog of NCBI NO: 33468929 NR Description: synaptobrevin like 1 [Mus musculus]
  misc_feature (1)..(220): Homolog of NCBI NO: 5032137 NR Description: synaptobrevin-like 1 [Homo sapiens]
MAIVYALVARGTVVLAEFAAVSGNAGAVARRILEKLPPDAESRLCFAQDRYIFHVLRSDAAGITFLCMANDTFGTRIPFLYLEDIQMRFMKNYGRVAHSALAYAMNDEFSRVLHQQMEFFSSNPSADTLNRLRGEVSEIHTVMVDNIEKILDRGDRISLLVDKTSTMQDSAFHFRKQSKRLRRALWMKNAKLLVVLTVVIVVLLYLIISAFCGGLSLSSCRS

SEQ ID NO: 5119 - protein, 155 aa, Zea mays subsp. mays
  peptide (1)..(155): Ceres Seq. ID no. 12344727
  misc_feature (58)..(146): Pfam Name: Synaptobrevin Pfam Description: Synaptobrevin
  misc_feature (1)..(155): Homolog of NCBI NO: 37531190 NR Description: putative synaptobrevin-like protein [Oryza sativa
  misc_feature (1)..(155): Homolog of NCBI NO: 15242224 NR Description: synaptobrevin-like protein; protein id:
  misc_feature (1)..(153): Homolog of NCBI NO: 15236687 NR Description: synaptobrevin-like protein; protein id: supported by cDNA: 41543., supported by cDNA: gi_16612291
  misc_feature (1)..(153): Homolog of NCBI NO: 15238971 NR Description: putative protein; protein id: At5g11150.1, by cDNA: gi_20259406 [Arabidopsis thaliana]
  misc_feature (1)..(153): Homolog of NCBI NO: 34898442 NR Description: ESTs AU082579(S2069),D40238(S2069) correspond to
  misc_feature (1)..(153): Homolog of NCBI NO: 15224711 NR Description: putative synaptobrevin; protein id: At2g25340.1
  misc_feature (1)..(72): Homolog of NCBI NO: 16323190 NR Description: AT5g22360/MWD9_16 [Arabidopsis thaliana]
  misc_feature (1)..(155): Homolog of NCBI NO: 28828593 NR Description: similar to Arabidopsis thaliana (Mouse-ear cress).
  misc_feature (1)..(153): Homolog of NCBI NO: 33468929 NR Description: synaptobrevin like 1 [Mus musculus]
  misc_feature (1)..(153): Homolog of NCBI NO: 5032137 NR Description: synaptobrevin-like 1 [Homo sapiens]
MANDTFGTRIPFLYLEDIQMRFMKNYGRVAHSALAYAMNDEFSRVLHQQMEFFSSNPSADTLNRLRGEVSEIHTVMVDNIEKILDRGDRISLLVDKTSTMQDSAFHFRKQSKRLRRALWMKNAKLLVVLTVVIVVLLYLIISAFCGGLSLSSCRS

SEQ ID NO: 5120 - DNA, 1360 bp, Zea mays subsp. mays
  misc_feature (1)..(1360): Ceres Seq. ID no. 12344092
  misc_feature: MA Experiment ID: 108544 Result: Down-regulated in Transcription
  misc_feature: MA Experiment ID: 20000492 Result: Up-regulated in Transcription
  misc_feature: MA Experiment 20000492 PARAMETER Experiment Name: Zm_Hybrid_Seed_Dev_P Parameter: DAP Value: 12
  misc_feature: MA Experiment 20000492 PARAMETER Experiment Name: Zm_Hybrid_Seed_Dev_P Parameter: Organism Value: Zea mays
  misc_feature: MA Experiment 20000492 PARAMETER Experiment Name: Zm_Hybrid_Seed_Dev_P Parameter: Plant Line Value: 35A19
  misc_feature: MA Experiment 20000492 PARAMETER Experiment Name: Zm_Hybrid_Seed_Dev_P Parameter: Tissue Value: Fert Kernel vs. Unfert Floret
gagatctatccccgtttccaacctcacacccccccttccattggagctccttcgtctgagttaaacctaaaccctaatcgcgacctgcgttcgtcaaaaccctacctggccatggacggcggaggaggaggcggtggaggaggaggtggagttggggcaggtgtcatggtgggtggcggagtcgtgccgggcggcgggggcggcgacgtggaactcgtcagcaagacgctgcagttcgagcacaagctgttctactttgatctgaaggagaacccgcgggggaggtacctcaagatctccgagaagacatcggccacgcgctccaccatcatcgtccccatcgacggcgtcgcctggttcctcgacctcttcgactactacatccgcaccgacgagcgcgacgtcttcagcaaggagctgcgactccagaccaaggtgttctatttcgatatcggggagaacaagaggggccgattcctcaaggtttctgaggcctctgtcaacagaaaccggagtaccataattgttccagctggcagctctggtgaagagggctgggaagcattcagaaatgtactgttggaaataaataacgaggcttccagattgtatgtcctaccaaatcatccaaatcagcaacacatggagccgccagagcgtcttcctggcttgtcagatgatgtgggtgccggatttatagctggacatggtagccagtccgcttctgggccagaggtagatgtcgaacgtttggttgatctgcctcctcaagaagaaattagtggcatgggtatgtctaaggtgattagggcagatcagaagaggttcttcttcgacctgggaagcaacaacaggggccattatttgaggatttctgaggtggctggagttgatcgttcgtctataatcttgccgctctcgggtttgaagcagttccatgaaatggttggtcactttgtagatataatgaaggacaggcttgaaggaatgacaggagctaacgtgcgcactgtcgaatccagtcagagatgattacccttactgtggcctgggcaagactgctgttatgcctcctgtaggtttgccatgtggtgtgtggtaatgtagatcacgcactattaattcatctggtggggataataatgtctcctttctcttcatttttttaaaattcagtggtgaggattgatttatttgggacgttttgctttttcggaggaataataagcagtgtattgttcgtggggtggtataattatagttgctgtagtgttagccctgttttcatgcttcgctgttcttgtttatgtaaaaaagatgtgtggtatgtttctggcattgagttctttctacacatgtt

SEQ ID NO: 5121 - protein, 343 aa, Zea mays subsp. mays
  peptide (1)..(343): Ceres Seq. ID no. 12344093
  misc_feature (69)..(323): Pfam Name: PurA ssDNA and RNA-binding protein Pfam Description: PurA ssDNA and RNA-binding protein
  misc_feature (38)..(343): Homolog of NCBI NO: 34902984 NR Description: unnamed protein product [Oryza sativa (japonica group)] >gi|9558524|dbj|BAB03442.1| unnamed protein product
  misc_feature (38)..(343): Homolog of NCBI NO: 18402871 NR Description: putative purine-rich single-stranded DNA-binding protein id: At2g32080.1, supported by cDNA: gi_15450692, by cDNA: gi_17386137, supported by cDNA: gi_5081611 [Arabidopsis
  misc_feature (38)..(343): Homolog of NCBI NO: 30685174 NR Description: purine-rich single-stranded DNA-binding protein [Arabidopsis thaliana] >gi|16930405|gb|AAL31888.1|AF419556_1
  misc_feature (38)..(261): Homolog of NCBI NO: 25408208 NR Description: hypothetical protein At2g32080 [imported] -
  misc_feature (290)..(328): Homolog of NCBI NO: 25408208 NR Description: hypothetical protein At2g32080 [imported] -
  misc_feature (39)..(199): Homolog of NCBI NO: 31211141 NR Description: ENSANGP00000016990 [Anopheles gambiae]
  misc_feature (269)..(333): Homolog of NCBI NO: 31211141 NR Description: ENSANGP00000016990 [Anopheles gambiae]
  misc_feature (64)..(216): Homolog of NCBI NO: 24638642 NR Description: Purine-rich binding protein-alpha CG1507-PD
  misc_feature (269)..(341): Homolog of NCBI NO: 24638642 NR Description: Purine-rich binding protein-alpha CG1507-PD
  misc_feature (64)..(216): Homolog of NCBI NO: 24638638 NR Description: Purine-rich binding protein-alpha CG1507-PA
EIYPRFQPHTPPSIGAPSSELNLNPNRDLRSSKPYLAMDGGGGGGGGGGGVGAGVMVGGGVVPGGGGGDVELVSKTLQFEHKLFYFDLKENPRGRYLKISEKTSATRSTIIVPIDGVAWFLDLFDYYIRTDERDVFSKELRLQTKVFYFDIGENKRGRFLKVSEASVNRNRSTIIVPAGSSGEEGWEAFRNVLLEINNEASRLYVLPNHPNQQHMEPPERLPGLSDDVGAGFIAGHGSQSASGPEVDVERLVDLPPQEEISGMGMSKVIRADQKRFFFDLGSNNRGHYLRISEVAGVDRSSIILPLSGLKQFHEMVGHFVDIMKDRLEGMTGANVRTVESSQR

SEQ ID NO: 5122 - protein, 306 aa, Zea mays subsp. mays
  peptide (1)..(306): Ceres Seq. ID no. 12344094
  misc_feature (32)..(286): Pfam Name: PurA ssDNA and RNA-binding protein Pfam Description: PurA ssDNA and RNA-binding protein
  misc_feature (1)..(306): Homolog of NCBI NO: 34902984 NR Description: unnamed protein product [Oryza sativa (japonica group)] >gi|9558524|dbj|BAB03442.1| unnamed protein product
  misc_feature (1)..(306): Homolog of NCBI NO: 18402871 NR Description: putative purine-rich single-stranded DNA-binding protein id: At2g32080.1, supported by cDNA: gi_15450692, by cDNA: gi_17386137, supported by cDNA: gi_5081611 [Arabidopsis
  misc_feature (1)..(306): Homolog of NCBI NO: 30685174 NR Description: purine-rich single-stranded DNA-binding protein [Arabidopsis thaliana] >gi|16930405|gb|AAL31888.1|AF419556_1
  misc_feature (1)..(224): Homolog of NCBI NO: 25408208 NR Description: hypothetical protein At2g32080 [imported] -
  misc_feature (253)..(291): Homolog of NCBI NO: 25408208 NR Description: hypothetical protein At2g32080 [imported] -
  misc_feature (2)..(162): Homolog of NCBI NO: 31211141 NR Description: ENSANGP00000016990 [Anopheles gambiae]
  misc_feature (232)..(296): Homolog of NCBI NO: 31211141 NR Description: ENSANGP00000016990 [Anopheles gambiae]
  misc_feature (27)..(179): Homolog of NCBI NO: 24638642 NR Description: Purine-rich binding protein-alpha CG1507-PD
  misc_feature (232)..(304): Homolog of NCBI NO: 24638642 NR Description: Purine-rich binding protein-alpha CG1507-PD
  misc_feature (27)..(179): Homolog of NCBI NO: 24638638 NR Description: Purine-rich binding protein-alpha CG1507-PA
MDGGGGGGGGGGGVGAGVMVGGGVVPGGGGGDVELVSKTLQFEHKLFYFDLKENPRGRYLKISEKTSATRSTIIVPIDGVAWFLDLFDYYIRTDERDVFSKELRLQTKVFYFDIGENKRGRFLKVSEASVNRNRSTIIVPAGSSGEEGWEAFRNVLLEINNEASRLYVLPNHPNQQHMEPPERLPGLSDDVGAGFIAGHGSQSASGPEVDVERLVDLPPQEEISGMGMSKVIRADQKRFFFDLGSNNRGHYLRISEVAGVDRSSIILPLSGLKQFHEMVGHFVDIMKDRLEGMTGANVRTVESSQR

SEQ ID NO: 5123 - protein, 288 aa, Zea mays subsp. mays
  peptide (1)..(288): Ceres Seq. ID no. 12344095
  misc_feature (14)..(268): Pfam Name: PurA ssDNA and RNA-binding protein Pfam Description: PurA ssDNA and RNA-binding protein
  misc_feature (1)..(288): Homolog of NCBI NO: 34902984 NR Description: unnamed protein product [Oryza sativa (japonica group)] >gi|9558524|dbj|BAB03442.1| unnamed protein product
  misc_feature (1)..(288): Homolog of NCBI NO: 18402871 NR Description: putative purine-rich single-stranded DNA-binding protein id: At2g32080.1, supported by cDNA: gi_15450692, by cDNA: gi_17386137, supported by cDNA: gi_5081611 [Arabidopsis
  misc_feature (1)..(288): Homolog of NCBI NO: 30685174 NR Description: purine-rich single-stranded DNA-binding protein [Arabidopsis thaliana] >gi|16930405|gb|AAL31888.1|AF419556_1
  misc_feature (1)..(206): Homolog of NCBI NO: 25408208 NR Description: hypothetical protein At2g32080 [imported] -
  misc_feature (235)..(273): Homolog of NCBI NO: 25408208 NR Description: hypothetical protein At2g32080 [imported] -
  misc_feature (1)..(144): Homolog of NCBI NO: 31211141 NR Description: ENSANGP00000016990 [Anopheles gambiae]
  misc_feature (214)..(278): Homolog of NCBI NO: 31211141 NR Description: ENSANGP00000016990 [Anopheles gambiae]
  misc_feature (9)..(161): Homolog of NCBI NO: 24638642 NR Description: Purine-rich binding protein-alpha CG1507-PD
  misc_feature (214)..(286): Homolog of NCBI NO: 24638642 NR Description: Purine-rich binding protein-alpha CG1507-PD
  misc_feature (9)..(161): Homolog of NCBI NO: 24638638 NR Description: Purine-rich binding protein-alpha CG1507-PA
MVGGGVVPGGGGGDVELVSKTLQFEHKLFYFDLKENPRGRYLKISEKTSATRSTIIVPIDGVAWFLDLFDYYIRTDERDVFSKELRLQTKVFYFDIGENKRGRFLKVSEASVNRNRSTIIVPAGSSGEEGWEAFRNVLLEINNEASRLYVLPNHPNQQHMEPPERLPGLSDDVGAGFIAGHGSQSASGPEVDVERLVDLPPQEEISGMGMSKVIRADQKRFFFDLGSNNRGHYLRISEVAGVDRSSIILPLSGLKQFHEMVGHFVDIMKDRLEGMTGANVRTVESSQR

SEQ ID NO: 5124 - DNA, 1389 bp, Zea mays subsp. mays
  misc_feature (1)..(1389): Ceres Seq. ID no. 12413988
  misc_feature: MA Experiment ID: 108526 Result: Up-regulated in Transcription
  misc_feature: MA Experiment 108526 PARAMETER Experiment Name: Zm_5mM_NO_P Parameter: Age (day) Value: 8
  misc_feature: MA Experiment 108526 PARAMETER Experiment Name: Zm_5mM_NO_P Parameter: Organism Value: Zea mays
  misc_feature: MA Experiment 108526 PARAMETER Experiment Name: Zm_5mM_NO_P Parameter: Plant Line Value: 35A19
  misc_feature: MA Experiment 108526 PARAMETER Experiment Name: Zm_5mM_NO_P Parameter: Timepoint (hr) Value: 1
  misc_feature: MA Experiment 108526 PARAMETER Experiment Name: Zm_5mM_NO_P Parameter: Tissue Value: Aerial
  misc_feature: MA Experiment 108526 PARAMETER Experiment Name: Zm_5mM_NO_P Parameter: Treatment Value: 5mM NO vs. No Treatment
  misc_feature: MA Experiment ID: 108527 Result: Up-regulated in Transcription
  misc_feature: MA Experiment 108527 PARAMETER Experiment Name: Zm_5mM_NO_P Parameter: Age (day) Value: 8
  misc_feature: MA Experiment 108527 PARAMETER Experiment Name: Zm_5mM_NO_P Parameter: Organism Value: Zea mays
  misc_feature: MA Experiment 108527 PARAMETER Experiment Name: Zm_5mM_NO_P Parameter: Plant Line Value: 35A19
  misc_feature: MA Experiment 108527 PARAMETER Experiment Name: Zm_5mM_NO_P Parameter: Timepoint (hr) Value: 6
  misc_feature: MA Experiment 108527 PARAMETER Experiment Name: Zm_5mM_NO_P Parameter: Tissue Value: Aerial
  misc_feature: MA Experiment 108527 PARAMETER Experiment Name: Zm_5mM_NO_P Parameter: Treatment Value: 5mM NO vs. No Treatment
  misc_feature: MA Experiment ID: 108529 Result: Up-regulated in Transcription
  misc_feature: MA Experiment 108529 PARAMETER Experiment Name: Zm_Imbibed_Seeds_P Parameter: Age (day) Value: 5 vs. 2
  misc_feature: MA Experiment 108529 PARAMETER Experiment Name: Zm_Imbibed_Seeds_P Parameter: Organism Value: Zea mays
  misc_feature: MA Experiment 108529 PARAMETER Experiment Name: Zm_Imbibed_Seeds_P Parameter: Plant Line Value: 35A19
  misc_feature: MA Experiment 108529 PARAMETER Experiment Name: Zm_Imbibed_Seeds_P Parameter: Tissue Value: Roots vs. Embryo
  misc_feature: MA Experiment ID: 108536 Result: Up-regulated in Transcription
  misc_feature: MA Experiment 108536 PARAMETER Experiment Name: Zm_Meristem_P Parameter: Age (day) Value: 8
  misc_feature: MA Experiment 108536 PARAMETER Experiment Name: Zm_Meristem_P Parameter: Organism Value: Zea mays
  misc_feature: MA Experiment 108536 PARAMETER Experiment Name: Zm_Meristem_P Parameter: Plant Line Value: 35A19
  misc_feature: MA Experiment 108536 PARAMETER Experiment Name: Zm_Meristem_P Parameter: Tissue Value: Shoot Meristem vs. Above Shoot Meristem
  misc_feature: MA Experiment ID: 20000478 Result: Up-regulated in Transcription
  misc_feature: MA Experiment 20000478 PARAMETER Experiment Name: Zm_5mM_SA_P Parameter: Age (day) Value: 11
  misc_feature: MA Experiment 20000478 PARAMETER Experiment Name: Zm_5mM_SA_P Parameter: Organism Value: Zea mays
  misc_feature: MA Experiment 20000478 PARAMETER Experiment Name: Zm_5mM_SA_P Parameter: Plant Line Value: 35A19
  misc_feature: MA Experiment 20000478 PARAMETER Experiment Name: Zm_5mM_SA_P Parameter: Timepoint (hr) Value: 72
  misc_feature: MA Experiment 20000478 PARAMETER Experiment Name: Zm_5mM_SA_P Parameter: Tissue Value: Aerial
  misc_feature: MA Experiment 20000478 PARAMETER Experiment Name: Zm_5mM_SA_P Parameter: Treatment Value: 5mM SA vs. No Treatment
  misc_feature: MA Experiment ID: 20000532 Result: Up-regulated in Transcription
  misc_feature: MA Experiment 20000532 PARAMETER Experiment Name: Zm_0.001percent_MeJA_P Parameter: Age (day) Value: 10
  misc_feature: MA Experiment 20000532 PARAMETER Experiment Name: Zm_0.001percent_MeJA_P Parameter: Organism Value: Zea mays
  misc_feature: MA Experiment 20000532 PARAMETER Experiment Name: Zm_0.001percent_MeJA_P Parameter: Plant Line Value: 35A19
  misc_feature: MA Experiment 20000532 PARAMETER Experiment Name: Zm_0.001percent_MeJA_P Parameter: Timepoint (hr) Value: 48
  misc_feature: MA Experiment 20000532 PARAMETER Experiment Name: Zm_0.001percent_MeJA_P Parameter: Tissue Value: Aerial
  misc_feature: MA Experiment 20000532 PARAMETER Experiment Name: Zm_0.001percent_MeJA_P Parameter: Treatment Value: 0.001percent MeJA vs. No Treatment
  misc_feature: MA Experiment ID: 20000533 Result: Up-regulated in Transcription
  misc_feature: MA Experiment 20000533 PARAMETER Experiment Name: Zm_0.001percent_MeJA_P Parameter: Age (day) Value: 11
  misc_feature: MA Experiment 20000533 PARAMETER Experiment Name: Zm_0.001percent_MeJA_P Parameter: Organism Value: Zea mays
  misc_feature: MA Experiment 20000533 PARAMETER Experiment Name: Zm_0.001percent_MeJA_P Parameter: Plant Line Value: 35A19
  misc_feature: MA Experiment 20000533 PARAMETER Experiment Name: Zm_0.001percent_MeJA_P Parameter: Timepoint (hr) Value: 72
  misc_feature: MA Experiment 20000533 PARAMETER Experiment Name: Zm_0.001percent_MeJA_P Parameter: Tissue Value: Aerial
  misc_feature: MA Experiment 20000533 PARAMETER Experiment Name: Zm_0.001percent_MeJA_P Parameter: Treatment Value: 0.001percent MeJA vs. No Treatment
  misc_feature: MA Experiment ID: 20000535 Result: Down-regulated in Transcription
  misc_feature: MA Experiment 20000535 PARAMETER Experiment Name: Zm_Hybrid_Seed_Dev_P Parameter: DAP Value: 30 vs. 12
  misc_feature: MA Experiment 20000535 PARAMETER Experiment Name: Zm_Hybrid_Seed_Dev_P Parameter: Organism Value: Zea mays
  misc_feature: MA Experiment 20000535 PARAMETER Experiment Name: Zm_Hybrid_Seed_Dev_P Parameter: Plant Line Value: 35A19
  misc_feature: MA Experiment 20000535 PARAMETER Experiment Name: Zm_Hybrid_Seed_Dev_P Parameter: Tissue Value: Embryo vs. Unfert Floret
gttcaattcgatcacttcttccattccaatttccacacacacacgtctcagctcactccctcctccagtttcgtcagctcgtcatcataaaccgaacacagagctctcgattccattccaggatgctgctgaacccggcgtcagagacgtcggtgctagacaccatccggcagcacctcctcgaggagccagcggcgncggaggcgcggccggccgacgagagcttcgggagcctggtggcggaccagtggagcggctcgctcccgttccgcaccgacgacgccgacgacatggtggtgttcggggtgctgcaggacgccttcgcctacggctggctgcccgacggctcattcgtgcacgtgaagcccgagccagtgcggtcccccgactcgtcctcctaccacccctgctcctacgacggctcaccctgcttcggcctcctggacccggagccgccgctgacgcccggcaccaccacgcccgggagggggcaggaggaggccgcggcggccatggcccggggcaagcactacaggggggtgaggcagcgcccgtggggcaagttcgcggcggagatcagggaccccgccaggaacggcgcgcgcgtctggctcggcacgtacgacaccgccgaggacgccgcgctcgcctacgaccgcgccgcctaccgcatgcgcggctcgcgcgcgctcctcaacttcccgctccgcatcggctccggggacaagcgcccgtcgccggcgccgcccgagcccaccacctcctcggactcctcctcgtcttcggccagcggctcgcacaagaggcggaagcgaggcgaggccgcggctgccaacatggccatggcgctggtgccctcgccctcccagcttaaccggccggcccagccgtggttccctgccgcgccggtcgagcaggcggcgatggctccgcgcgtggagcagatcgtcgtctagtctagccatgcgccggcgaaagcgggggcaaggccctgcgctgcacttgcgtgacagctccaccggatggaatgcgaatatgcgataaagctcgggagcaactggggtccgtccggatgccgctgttgctccgtgcaactggcgcaagtggaagaagctgtctattggaagtcaaattgagccgcgcggacagtccggcgctgaggccggacggtccgcggtccggacagtctgcggtggtggcgcggacggtccgcgcgcgcgcagagtcagttagggttcctagtttctcgcgggatttgttacctaaaaccgcgggattaactcgggaaacagttggaaacggatccagacctccccctttatatagatgaaggtctacggccgattgaaccccaacaatcgaacaaatcaagtctatttctcgtttttt

SEQ ID NO: 5125 - protein, 317 aa, Zea mays subsp. mays
  peptide (1)..(317): Ceres Seq. ID no. 12413989
  misc_feature (174)..(239): Pfam Name: AP2 domain Pfam Description: AP2 domain
  misc_feature (39)..(263): Homolog of NCBI NO: 38346167 NR Description: OSJNBa0079A21.14 [Oryza sativa (japonica
  misc_feature (239)..(317): Homolog of NCBI NO: 38346167 NR Description: OSJNBa0079A21.14 [Oryza sativa (japonica
  misc_feature (41)..(316): Homolog of NCBI NO: 14140141 NR Description: putative AP2-related transcription factor [Oryza
  misc_feature (41)..(290): Homolog of NCBI NO: 7528276 NR Description: AP2-related transcription factor
  misc_feature (150)..(288): Homolog of NCBI NO: 7489113 NR Description: DNA binding protein EREBP-2 - common tobacco
  misc_feature (62)..(124): Homolog of NCBI NO: 7489113 NR Description: DNA binding protein EREBP-2 - common tobacco
  misc_feature (147)..(275): Homolog of NCBI NO: 28274828 NR Description: ethylene response factor 1 [Lycopersicon
  misc_feature (63)..(124): Homolog of NCBI NO: 28274828 NR Description: ethylene response factor 1 [Lycopersicon
  misc_feature (33)..(283): Homolog of NCBI NO: 21264420 NR Description: Ethylene responsive element binding factor 1
  misc_feature (33)..(283): Homolog of NCBI NO: 25350258 NR Description: ethylene responsive element binding factor 1 - Arabidopsis thaliana >gi|3434967|dbj|BAA32418.1| ethylene
  misc_feature (66)..(66): Xaa is any aa, unknown or other
SIRSLLPFQFPHTHVSAHSLLQFRQLVIINRTQSSRFHSRMLLNPASETSVLDTIRQHLLEEPAAXEARPADESFGSLVADQWSGSLPFRTDDADDMVVFGVLQDAFAYGWLPDGSFVHVKPEPVRSPDSSSYHPCSYDGSPCFGLLDPEPPLTPGTTTPGRGQEEAAAAMARGKHYRGVRQRPWGKFAAEIRDPARNGARVWLGTYDTAEDAALAYDRAAYRMRGSRALLNFPLRIGSGDKRPSPAPPEPTTSSDSSSSSASGSHKRRKRGEAAAANMAMALVPSPSQLNRPAQPWFPAAPVEQAAMAPRVEQIVV

SEQ ID NO: 5126 - protein, 290 aa, Zea mays subsp. mays
  peptide (1)..(290): Ceres Seq. ID no. 12413990
  misc_feature (66)..(66): Xaa is any aa, unknown or other
FNSITSSIPISTHTRLSSLPPPVSSARHHKPNTELSIPFQDAAEPGVRDVGARHHPAAPPRGASGXGGAAGRRELREPGGGPVERLAPVPHRRRRRHGGVRGAAGRLRLRLAARRLIRAREARASAVPRLVLLPPLLLRRLTLLRPPGPGAAADARHHHAREGAGGGRGGHGPGQALQGGEAAPVGQVRGGDQGPRQERRARLARHVRHRRGRRARLRPRRLPHARLARAPQLPAPHRLRGQAPVAGAARAHHLLGLLLVFGQRLAQEAEARRGRGCQHGHGAGALALPA

SEQ ID NO: 5127 - protein, 277 aa, Zea mays subsp. mays
  peptide (1)..(277): Ceres Seq. ID no. 12413991
  misc_feature (134)..(199): Pfam Name: AP2 domain Pfam Description: AP2 domain
  misc_feature (110)..(248): Homolog of NCBI NO: 7489113 NR Description: DNA binding protein EREBP-2 - common tobacco
  misc_feature (22)..(84): Homolog of NCBI NO: 7489113 NR Description: DNA binding protein EREBP-2 - common tobacco
  misc_feature (107)..(235): Homolog of NCBI NO: 28274828 NR Description: ethylene response factor 1 [Lycopersicon
  misc_feature (1)..(223): Homolog of NCBI NO: 38346167 NR Description: OSJNBa0079A21.14 [Oryza sativa (japonica
  misc_feature (1)..(276): Homolog of NCBI NO: 14140141 NR Description: putative AP2-related transcription factor [Oryza
  misc_feature (1)..(250): Homolog of NCBI NO: 7528276 NR Description: AP2-related transcription factor
  misc_feature (199)..(277): Homolog of NCBI NO: 38346167 NR Description: OSJNBa0079A21.14 [Oryza sativa (japonica
  misc_feature (23)..(84): Homolog of NCBI NO: 28274828 NR Description: ethylene response factor 1 [Lycopersicon
  misc_feature (1)..(243): Homolog of NCBI NO: 21264420 NR Description: Ethylene responsive element binding factor 1
  misc_feature (1)..(243): Homolog of NCBI NO: 25350258 NR Description: ethylene responsive element binding factor 1 - Arabidopsis thaliana >gi|3434967|dbj|BAA32418.1| ethylene
  misc_feature (26)..(26): Xaa is any aa, unknown or other
MLLNPASETSVLDTIRQHLLEEPAAXEARPADESFGSLVADQWSGSLPFRTDDADDMVVFGVLQDAFAYGWLPDGSFVHVKPEPVRSPDSSSYHPCSYDGSPCFGLLDPEPPLTPGTTTPGRGQEEAAAAMARGKHYRGVRQRPWGKFAAEIRDPARNGARVWLGTYDTAEDAALAYDRAAYRMRGSRALLNFPLRIGSGDKRPSPAPPEPTTSSDSSSSSASGSHKRRKRGEAAAANMAMALVPSPSQLNRPAQPWFPAAPVEQAAMAPRVEQIVV

SEQ ID NO: 5128 - DNA, 1232 bp, Zea mays subsp. mays
  misc_feature (1)..(1232): Ceres Seq. ID no. 12343790
  misc_feature: MA Experiment ID: 20000535 Result: Up-regulated in Transcription
  misc_feature: MA Experiment 20000535 PARAMETER Experiment Name: Zm_Hybrid_Seed_Dev_P Parameter: DAP Value: 30 vs. 12
  misc_feature: MA Experiment 20000535 PARAMETER Experiment Name: Zm_Hybrid_Seed_Dev_P Parameter: Organism Value: Zea mays
  misc_feature: MA Experiment 20000535 PARAMETER Experiment Name: Zm_Hybrid_Seed_Dev_P Parameter: Plant Line Value: 35A19
  misc_feature: MA Experiment 20000535 PARAMETER Experiment Name: Zm_Hybrid_Seed_Dev_P Parameter: Tissue Value: Embryo vs. Unfert Floret
atcagttactactgcctgcctgcctgcctgcgtctctcctccaggtccaggctccaggaatccaccccccacctcctcggattctttccccctctccagctcccccgtcctgcagccgcctgcactgtgctgccgccccgttcgcctcccggcctccagcctcctcggttcccgcgggagggccatgaagttaaggacaaaacgacctgaatggaagtcccttgtgcctctacaactgagcagattgagcaggaaatctgccatgcgtttctttttgttccccaaggttcagtcggctggtcaatcgccagatgataccccagtttatcttaatgtgtatgatttgacgccaatgaacggttatatatattgggcaggcctgggcatatttcactcaggaattgaagttcatggtgttgaatatgcattcggagcacatgactttcccaccagtggggtctttgaggtagaacctcgccaatgccctggtttcagattcagaaaatcaatatttcttggtacaacatgcttggatccaatccaagttaggcagttcatggagctgcagtcagtaaactacaacggcgatacttaccatcttatcacgaagaactgtaaccacttctgcaaggatatgtgctacaagttgaccggtaacaaaattcccaaatgggtgaatcggctcgccagaataggcgccatttgcaactgccttctcccggagtcgcttaagatctctccggttggccatgacccaaacagtcaatccgaagactcggagaagaggcgtctgaggaacccattcagctgcttctcttcgatctcgagccaccggcagctgccgtcgtcatctcctttcccaccatctcctgtgaaagggggcctcccccgttgctcgtcgaggaaaagcagcacggcgtctccgaaaaataggtagcctgccctggggcgcgcccctgcgtaacttccgagtcgtcgtgctaattcctgcggtgtcaacatctggatccgcacggcgagtgctgtgctgtgctgcgctgtagctttctgtcaggtacttgttttttggtcggtaaaaatcagatgcctgatgttgtatcatgtaaaaaacccctagcgacgtgtgctgctgatctgcctcgcaagatctgttgggagggtgaattgccactcggttctacccgccgcctatgtactctactcagggatttgtatattaatccattattctt

SEQ ID NO: 5129 - protein, 311 aa, Zea mays subsp. mays
  peptide (1)..(311): Ceres Seq. ID no. 12343791
  misc_feature (107)..(229): Pfam Name: Eukaryotic protein of unknown function (DUF862) Pfam Description: Eukaryotic protein of unknown function (DUF862)
  misc_feature (51)..(311): Homolog of NCBI NO: 18401869 NR Description: expressed protein; protein id: At1g47740.1, by cDNA: 40816. [Arabidopsis thaliana] unknown protein [Arabidopsis thaliana]
  misc_feature (62)..(311): Homolog of NCBI NO: 21593644 NR Description: unknown [Arabidopsis thaliana]
  misc_feature (51)..(311): Homolog of NCBI NO: 9802596 NR Description: T2E6.19 [Arabidopsis thaliana]
  misc_feature (101)..(290): Homolog of NCBI NO: 18420889 NR Description: putative protein; protein id: At5g25170.1,
  misc_feature (105)..(308): Homolog of NCBI NO: 18412886 NR Description: expressed protein; protein id: At1g80690.1, by cDNA: 40037. [Arabidopsis thaliana]
  misc_feature (107)..(311): Homolog of NCBI NO: 18400749 NR Description: expressed protein; protein id: At2g25190.1, by cDNA: 14105., supported by cDNA: gi_13877550, supported by gi_20148724 [Arabidopsis thaliana] >gi|25354456|pir||D84645
  misc_feature (105)..(308): Homolog of NCBI NO: 25354458 NR Description: hypothetical protein F23A5.4 [imported] - thaliana >gi|6503281|gb|AAF14657.1|AC011713_5 Contains similarity
  misc_feature (106)..(259): Homolog of NCBI NO: 15238059 NR Description: putative protein; protein id: At5g47310.1
  misc_feature (97)..(252): Homolog of NCBI NO: 30684058 NR Description: expressed protein [Arabidopsis thaliana] AT4g17486/AT4g17486 [Arabidopsis thaliana]
  misc_feature (129)..(252): Homolog of NCBI NO: 7488100 NR Description: probable EREBP-4 - Arabidopsis thaliana
SVTTACLPACVSPPGPGSRNPPPTSSDSFPLSSSPVLQPPALCCRPVRLPASSLLGSRGRAMKLRTKRPEWKSLVPLQLSRLSRKSAMRFFLFPKVQSAGQSPDDTPVYLNVYDLTPMNGYIYWAGLGIFHSGIEVHGVEYAFGAHDFPTSGVFEVEPRQCPGFRFRKSIFLGTTCLDPIQVRQFMELQSVNYNGDTYHLITKNCNHFCKDMCYKLTGNKIPKWVNRLARIGAICNCLLPESLKISPVGHDPNSQSEDSEKRRLRNPFSCFSSISSHRQLPSSSPFPPSPVKGGLPRCSSRKSSTASPKNR

SEQ ID NO: 5130 - protein, 250 aa, Zea mays subsp. mays
  peptide (1)..(250): Ceres Seq. ID no. 12343792
  misc_feature (46)..(168): Pfam Name: Eukaryotic protein of unknown function (DUF862) Pfam Description: Eukaryotic protein of unknown function (DUF862)
  misc_feature (1)..(250): Homolog of NCBI NO: 18401869 NR Description: expressed protein; protein id: At1g47740.1, by cDNA: 40816. [Arabidopsis thaliana] unknown protein [Arabidopsis thaliana]
  misc_feature (1)..(250): Homolog of NCBI NO: 21593644 NR Description: unknown [Arabidopsis thaliana]
  misc_feature (1)..(250): Homolog of NCBI NO: 9802596 NR Description: T2E6.19 [Arabidopsis thaliana]
  misc_feature (40)..(229): Homolog of NCBI NO: 18420889 NR Description: putative protein; protein id: At5g25170.1,
  misc_feature (44)..(247): Homolog of NCBI NO: 18412886 NR Description: expressed protein; protein id: At1g80690.1, by cDNA: 40037. [Arabidopsis thaliana]
  misc_feature (46)..(250): Homolog of NCBI NO: 18400749 NR Description: expressed protein; protein id: At2g25190.1, by cDNA: 14105., supported by cDNA: gi_13877550, supported by gi_20148724 [Arabidopsis thaliana] >gi|25354456|pir||D84645
  misc_feature (44)..(247): Homolog of NCBI NO: 25354458 NR Description: hypothetical protein F23A5.4 [imported] - thaliana >gi|6503281|gb|AAF14657.1|AC011713_5 Contains similarity
  misc_feature (45)..(198): Homolog of NCBI NO: 15238059 NR Description: putative protein; protein id: At5g47310.1
  misc_feature (36)..(191): Homolog of NCBI NO: 30684058 NR Description: expressed protein [Arabidopsis thaliana] AT4g17486/AT4g17486 [Arabidopsis thaliana]
  misc_feature (68)..(191): Homolog of NCBI NO: 7488100 NR Description: probable EREBP-4 - Arabidopsis thaliana
MKLRTKRPEWKSLVPLQLSRLSRKSAMRFFLFPKVQSAGQSPDDTPVYLNVYDLTPMNGYIYWAGLGIFHSGIEVHGVEYAFGAHDFPTSGVFEVEPRQCPGFRFRKSIFLGTTCLDPIQVRQFMELQSVNYNGDTYHLITKNCNHFCKDMCYKLTGNKIPKWVNRLARIGAICNCLLPESLKISPVGHDPNSQSEDSEKRRLRNPFSCFSSISSHRQLPSSSPFPPSPVKGGLPRCSSRKSSTASPKNR

SEQ ID NO: 5131 - protein, 224 aa, Zea mays subsp. mays
  peptide (1)..(224): Ceres Seq. ID no. 12343793
  misc_feature (20)..(142): Pfam Name: Eukaryotic protein of unknown function (DUF862) Pfam Description: Eukaryotic protein of unknown function (DUF862)
  misc_feature (1)..(224): Homolog of NCBI NO: 18401869 NR Description: expressed protein; protein id: At1g47740.1, by cDNA: 40816. [Arabidopsis thaliana] unknown protein [Arabidopsis thaliana]
  misc_feature (1)..(224): Homolog of NCBI NO: 21593644 NR Description: unknown [Arabidopsis thaliana]
  misc_feature (1)..(224): Homolog of NCBI NO: 9802596 NR Description: T2E6.19 [Arabidopsis thaliana]
  misc_feature (14)..(203): Homolog of NCBI NO: 18420889 NR Description: putative protein; protein id: At5g25170.1,
  misc_feature (18)..(221): Homolog of NCBI NO: 18412886 NR Description: expressed protein; protein id: At1g80690.1, by cDNA: 40037. [Arabidopsis thaliana]
  misc_feature (20)..(224): Homolog of NCBI NO: 18400749 NR Description: expressed protein; protein id: At2g25190.1, by cDNA: 14105., supported by cDNA: gi_13877550, supported by gi_20148724 [Arabidopsis thaliana] >gi|25354456|pir||D84645
  misc_feature (18)..(221): Homolog of NCBI NO: 25354458 NR Description: hypothetical protein F23A5.4 [imported] - thaliana >gi|6503281|gb|AAF14657.1|AC011713_5 Contains similarity
  misc_feature (19)..(172): Homolog of NCBI NO: 15238059 NR Description: putative protein; protein id: At5g47310.1
  misc_feature (10)..(165): Homolog of NCBI NO: 30684058 NR Description: expressed protein [Arabidopsis thaliana] AT4g17486/AT4g17486 [Arabidopsis thaliana]
  misc_feature (42)..(165): Homolog of NCBI NO: 7488100 NR Description: probable EREBP-4 - Arabidopsis thaliana
MRFFLFPKVQSAGQSPDDTPVYLNVYDLTPMNGYIYWAGLGIFHSGIEVHGVEYAFGAHDFPTSGVFEVEPRQCPGFRFRKSIFLGTTCLDPIQVRQFMELQSVNYNGDTYHLITKNCNHFCKDMCYKLTGNKIPKWVNRLARIGAICNCLLPESLKISPVGHDPNSQSEDSEKRRLRNPFSCFSSISSHRQLPSSSPFPPSPVKGGLPRCSSRKSSTASPKNR

SEQ ID NO: 5132 - DNA, 1623 bp, Zea mays subsp. mays
  misc_feature (1)..(1623): Ceres Seq. ID no. 12373676
  misc_feature: MA Experiment ID: 108504 Result: Up-regulated in Transcription
  misc_feature: MA Experiment 108504 PARAMETER Experiment Name: Zm_Drought_P Parameter: Age (day) Value: 8
  misc_feature: MA Experiment 108504 PARAMETER Experiment Name: Zm_Drought_P Parameter: Organism Value: Zea mays
  misc_feature: MA Experiment 108504 PARAMETER Experiment Name: Zm_Drought_P Parameter: Plant Line Value: 35A19
  misc_feature: MA Experiment 108504 PARAMETER Experiment Name: Zm_Drought_P Parameter: Timepoint (hr) Value: 12
  misc_feature: MA Experiment 108504 PARAMETER Experiment Name: Zm_Drought_P Parameter: Tissue Value: Aerial
  misc_feature: MA Experiment 108504 PARAMETER Experiment Name: Zm_Drought_P Parameter: Treatment Value: Drought vs. No Drought
  misc_feature: MA Experiment ID: 108523 Result: Up-regulated in Transcription
  misc_feature: MA Experiment 108523 PARAMETER Experiment Name: Zm_42deg_Heat_P Parameter: Age (day) Value: 8
  misc_feature: MA Experiment 108523 PARAMETER Experiment Name: Zm_42deg_Heat_P Parameter: Organism Value: Zea mays
  misc_feature: MA Experiment 108523 PARAMETER Experiment Name: Zm_42deg_Heat_P Parameter: Plant Line Value: 35A19
  misc_feature: MA Experiment 108523 PARAMETER Experiment Name: Zm_42deg_Heat_P Parameter: Temperature (deg C) Value: 42 vs. 22
  misc_feature: MA Experiment 108523 PARAMETER Experiment Name: Zm_42deg_Heat_P Parameter: Timepoint (hr) Value: 6
  misc_feature: MA Experiment 108523 PARAMETER Experiment Name: Zm_42deg_Heat_P Parameter: Tissue Value: Aerial
  misc_feature: MA Experiment ID: 108687 Result: Up-regulated in Transcription
  misc_feature: MA Experiment 108687 PARAMETER Experiment Name: Zm_Embryos-Flowers__P Parameter: Tissue Value: Embryo vs. Aerial+
  misc_feature: MA Experiment ID: 20000492 Result: Up-regulated in Transcription
  misc_feature: MA Experiment 20000492 PARAMETER Experiment Name: Zm_Hybrid_Seed_Dev_P Parameter: DAP Value: 12
  misc_feature: MA Experiment 20000492 PARAMETER Experiment Name: Zm_Hybrid_Seed_Dev_P Parameter: Organism Value: Zea mays
  misc_feature: MA Experiment 20000492 PARAMETER Experiment Name: Zm_Hybrid_Seed_Dev_P Parameter: Plant Line Value: 35A19
  misc_feature: MA Experiment 20000492 PARAMETER Experiment Name: Zm_Hybrid_Seed_Dev_P Parameter: Tissue Value: Fert Kernel vs. Unfert Floret
  misc_feature: MA Experiment ID: 20000535 Result: Up-regulated in Transcription
  misc_feature: MA Experiment 20000535 PARAMETER Experiment Name: Zm_Hybrid_Seed_Dev_P Parameter: DAP Value: 30 vs. 12
  misc_feature: MA Experiment 20000535 PARAMETER Experiment Name: Zm_Hybrid_Seed_Dev_P Parameter: Organism Value: Zea mays
  misc_feature: MA Experiment 20000535 PARAMETER Experiment Name: Zm_Hybrid_Seed_Dev_P Parameter: Plant Line Value: 35A19
  misc_feature: MA Experiment 20000535 PARAMETER Experiment Name: Zm_Hybrid_Seed_Dev_P Parameter: Tissue Value: Embryo vs. Unfert Floret
agcaggcggcccgggcagatagcaggcgtgttgctcgcgcctcggcacataaatcgtctccgatctccaggtgcccggccaccctggttcgtcgaagcaccctagtcgtcgtagcggcctacgggctcttgggcagagagagaagctgcatagccagtcgctcctgcatatgctccagctgctgcgcgcaatgatggcactgacggagcggcagccgcagctggagaagaagccggcgcgcgggagggcgccgctgtcggggaaggccgtcgcggcgctgtgcgtgacgagcttcgtcgtggggctgctgcttagcggcaacgtgtcgctcatgtcggcctcggcgtcgccgtcgtcctcgagcacggacagcgccgacagcgacaagagcattcgtgtttccggttgcgacaatgagcgtaaactcggagagaaccaccccaaggatctcctgaacgaggtgtcgagaactcatcaagcaatccagtcgctggacaaggcggtgtccaccctggagatggagatggccgtggaacgcgctaggggcggtggcggcggcggcggcgccgcgtccatggcgtccagcaggactcctcagaaggccttcgtcgtggtcggcatcaacacggccttcaccagcaagaagcggcgcgactcgctccgcgacacctgggtccccagaggggataagctgaggaagctggagcgggagaaggggatcgtggtccggttcgtgatcgggcacagcggcacgccgggcggcggcgcgctggaccgcgccctggacgcggaggaggccgagaccagggacttcatgcggctggaccacgccgagggctaccacgagctgtcgtccaagaccaggacctacttcaccaccgccgtcgccacctgggacgccgacttctacgtcaaggtcgacgacgacatccacctcaacctcgggatgctggcgagcaggctggcgaaacacaggacgcgcccgagggtgtacgtcggctgcatgaagtccgggcctgtcctgtcacagaaaggagtcaagtaccacgagccagagtactggaagttcggcgacgagggcaacaagtacttccgccacgccaccggccaaatctacgccatctccaaggacctcgccgcctacatctccatcaaccagccgatcctgcacaggttcgcgaacgaggacgtctcgctgggggcgtggctgatcgggctcgaggtcgagcacgtcgacgaccggagcatgtgctgcgcgacgcctccagactgcgagtggaagaagcgagccgggaacgtgtgcgtggcgtccttcgactggtcgtgcagcggcgtctgtaagtcggtggaccggatgcgccacatccacaaggcgtgcggcgaaggcgaaggcgccgtctggaacgccgccacatgagacgagattgccattctcgtcggaacacttgttgtatgcggagcttcacttgatgaaaacgcgaaggcgagagggaagcgcctgcgccactgtttggcatgacacattccgcatggcaagcgtggttgtttcacttgagacggcatgctatgatccacgtaaaagcgcatggattattattggtgtgtcaacgtgatcctttttgg

SEQ ID NO: 5133 - protein, 415 aa, Zea mays subsp. mays
  peptide (1)..(415): Ceres Seq. ID no. 12373677
  misc_feature (159)..(358): Pfam Name: Galactosyltransferase Pfam Description: Galactosyltransferase
  misc_feature (8)..(415): Homolog of NCBI NO: 34907342 NR Description: putative elicitor response protein [Oryza sativa
  misc_feature (24)..(412): Homolog of NCBI NO: 15217544 NR Description: elicitor response protein, putative; protein id: [Arabidopsis thaliana] >gi|25370623|pir||A86458 probasble
  misc_feature (24)..(413): Homolog of NCBI NO: 4138265 NR Description: Avr9 elicitor response protein [Nicotiana tabacum]
  misc_feature (29)..(414): Homolog of NCBI NO: 15223337 NR Description: Avr9 elicitor response protein, putative; protein At1g32930.1 [Arabidopsis thaliana] >gi|25370618|pir||H86453 avr9
  misc_feature (29)..(412): Homolog of NCBI NO: 30699558 NR Description: Avr9 elicitor response protein -related
  misc_feature (29)..(412): Homolog of NCBI NO: 12323294 NR Description: putative (Avr9) elicitor response protein;
  misc_feature (26)..(413): Homolog of NCBI NO: 15220440 NR Description: putative AVR9 elicitor response protein; protein At1g05170.1, supported by cDNA: gi_14488077 [Arabidopsis
  misc_feature (26)..(413): Homolog of NCBI NO: 15225684 NR Description: unknown protein; protein id: At2g32430.1
  misc_feature (29)..(412): Homolog of NCBI NO: 34365705 NR Description: At1g77810 [Arabidopsis thaliana]
  misc_feature (29)..(414): Homolog of NCBI NO: 18416895 NR Description: Avr9 elicitor response like protein; protein id:
MLQLLRAMMALTERQPQLEKKPARGRAPLSGKAVAALCVTSFVVGLLLSGNVSLMSASASPSSSSTDSADSDKSIRVSGCDNERKLGENHPKDLLNEVSRTHQAIQSLDKAVSTLEMEMAVERARGGGGGGGAASMASSRTPQKAFVVVGINTAFTSKKRRDSLRDTWVPRGDKLRKLEREKGIVVRFVIGHSGTPGGGALDRALDAEEAETRDFMRLDHAEGYHELSSKTRTYFTTAVATWDADFYVKVDDDIHLNLGMLASRLAKHRTRPRVYVGCMKSGPVLSQKGVKYHEPEYWKFGDEGNKYFRHATGQIYAISKDLAAYISINQPILHRFANEDVSLGAWLIGLEVEHVDDRSMCCATPPDCEWKKRAGNVCVASFDWSCSGVCKSVDRMRHIHKACGEGEGAVWNAAT

SEQ ID NO: 5134 - protein, 408 aa, Zea mays subsp. mays
  peptide (1)..(408): Ceres Seq. ID no. 12373678
  misc_feature (152)..(351): Pfam Name: Galactosyltransferase Pfam Description: Galactosyltransferase
  misc_feature (1)..(408): Homolog of NCBI NO: 34907342 NR Description: putative elicitor response protein [Oryza sativa
  misc_feature (17)..(405): Homolog of NCBI NO: 15217544 NR Description: elicitor response protein, putative; protein id: [Arabidopsis thaliana] >gi|25370623|pir||A86458 probasble
  misc_feature (17)..(406): Homolog of NCBI NO: 4138265 NR Description: Avr9 elicitor response protein [Nicotiana tabacum]
  misc_feature (22)..(407): Homolog of NCBI NO: 15223337 NR Description: Avr9 elicitor response protein, putative; protein At1g32930.1 [Arabidopsis thaliana] >gi|25370618|pir||H86453 avr9
  misc_feature (22)..(405): Homolog of NCBI NO: 30699558 NR Description: Avr9 elicitor response protein -related
  misc_feature (22)..(405): Homolog of NCBI NO: 12323294 NR Description: putative (Avr9) elicitor response protein;
  misc_feature (19)..(406): Homolog of NCBI NO: 15220440 NR Description: putative AVR9 elicitor response protein; protein At1g05170.1, supported by cDNA: gi_14488077 [Arabidopsis
  misc_feature (19)..(406): Homolog of NCBI NO: 15225684 NR Description: unknown protein; protein id: At2g32430.1
  misc_feature (22)..(405): Homolog of NCBI NO: 34365705 NR Description: At1g77810 [Arabidopsis thaliana]
  misc_feature (22)..(407): Homolog of NCBI NO: 18416895 NR Description: Avr9 elicitor response like protein; protein id:
MMALTERQPQLEKKPARGRAPLSGKAVAALCVTSFVVGLLLSGNVSLMSASASPSSSSTDSADSDKSIRVSGCDNERKLGENHPKDLLNEVSRTHQAIQSLDKAVSTLEMEMAVERARGGGGGGGAASMASSRTPQKAFVVVGINTAFTSKKRRDSLRDTWVPRGDKLRKLEREKGIVVRFVIGHSGTPGGGALDRALDAEEAETRDFMRLDHAEGYHELSSKTRTYFTTAVATWDADFYVKVDDDIHLNLGMLASRLAKHRTRPRVYVGCMKSGPVLSQKGVKYHEPEYWKFGDEGNKYFRHATGQIYAISKDLAAYISINQPILHRFANEDVSLGAWLIGLEVEHVDDRSMCCATPPDCEWKKRAGNVCVASFDWSCSGVCKSVDRMRHIHKACGEGEGAVWNAAT

SEQ ID NO: 5135 - protein, 407 aa, Zea mays subsp. mays
  peptide (1)..(407): Ceres Seq. ID no. 12373679
  misc_feature (151)..(350): Pfam Name: Galactosyltransferase Pfam Description: Galactosyltransferase
  misc_feature (1)..(407): Homolog of NCBI NO: 34907342 NR Description: putative elicitor response protein [Oryza sativa
  misc_feature (16)..(404): Homolog of NCBI NO: 15217544 NR Description: elicitor response protein, putative; protein id: [Arabidopsis thaliana] >gi|25370623|pir||A86458 probasble
  misc_feature (16)..(405): Homolog of NCBI NO: 4138265 NR Description: Avr9 elicitor response protein [Nicotiana tabacum]
  misc_feature (21)..(406): Homolog of NCBI NO: 15223337 NR Description: Avr9 elicitor response protein, putative; protein At1g32930.1 [Arabidopsis thaliana] >gi|25370618|pir||H86453 avr9
  misc_feature (21)..(404): Homolog of NCBI NO: 30699558 NR Description: Avr9 elicitor response protein -related
  misc_feature (21)..(404): Homolog of NCBI NO: 12323294 NR Description: putative (Avr9) elicitor response protein;
  misc_feature (18)..(405): Homolog of NCBI NO: 15220440 NR Description: putative AVR9 elicitor response protein; protein At1g05170.1, supported by cDNA: gi_14488077 [Arabidopsis
  misc_feature (18)..(405): Homolog of NCBI NO: 15225684 NR Description: unknown protein; protein id: At2g32430.1
  misc_feature (21)..(404): Homolog of NCBI NO: 34365705 NR Description: At1g77810 [Arabidopsis thaliana]
  misc_feature (21)..(406): Homolog of NCBI NO: 18416895 NR Description: Avr9 elicitor response like protein; protein id:
MALTERQPQLEKKPARGRAPLSGKAVAALCVTSFVVGLLLSGNVSLMSASASPSSSSTDSADSDKSIRVSGCDNERKLGENHPKDLLNEVSRTHQAIQSLDKAVSTLEMEMAVERARGGGGGGGAASMASSRTPQKAFVVVGINTAFTSKKRRDSLRDTWVPRGDKLRKLEREKGIVVRFVIGHSGTPGGGALDRALDAEEAETRDFMRLDHAEGYHELSSKTRTYFTTAVATWDADFYVKVDDDIHLNLGMLASRLAKHRTRPRVYVGCMKSGPVLSQKGVKYHEPEYWKFGDEGNKYFRHATGQIYAISKDLAAYISINQPILHRFANEDVSLGAWLIGLEVEHVDDRSMCCATPPDCEWKKRAGNVCVASFDWSCSGVCKSVDRMRHIHKACGEGEGAVWNAAT

SEQ ID NO: 5136 - DNA, 1387 bp, Zea mays subsp. mays
  misc_feature (1)..(1387): Ceres Seq. ID no. 12353776
  misc_feature: MA Experiment ID: 108536 Result: Up-regulated in Transcription
  misc_feature: MA Experiment 108536 PARAMETER Experiment Name: Zm_Meristem_P Parameter: Age (day) Value: 8
  misc_feature: MA Experiment 108536 PARAMETER Experiment Name: Zm_Meristem_P Parameter: Organism Value: Zea mays
  misc_feature: MA Experiment 108536 PARAMETER Experiment Name: Zm_Meristem_P Parameter: Plant Line Value: 35A19
  misc_feature: MA Experiment 108536 PARAMETER Experiment Name: Zm_Meristem_P Parameter: Tissue Value: Shoot Meristem vs. Above Shoot Meristem
  misc_feature: MA Experiment ID: 108687 Result: Down-regulated in Transcription
  misc_feature: MA Experiment 108687 PARAMETER Experiment Name: Zm_Embryos-Flowers__P Parameter: Tissue Value: Embryo vs. Aerial+
  misc_feature: MA Experiment ID: 20000108 Result: Down-regulated in Transcription
  misc_feature: MA Experiment 20000108 PARAMETER Experiment Name: Zm_Root-Tips_P Parameter: Age (day) Value: 12
  misc_feature: MA Experiment 20000108 PARAMETER Experiment Name: Zm_Root-Tips_P Parameter: Organism Value: Zea mays
  misc_feature: MA Experiment 20000108 PARAMETER Experiment Name: Zm_Root-Tips_P Parameter: Tissue Value: Root tips vs. Root mid region    35
  misc_feature: MA Experiment 20000108 PARAMETER Experiment Name: Zm_Root-Tips_P Parameter: Tissue Value: Root tips vs. Root mid region   Sequence Listing-Misc Features (4)
attcagtgtagccagcaggtagctgcatcagctagctagctagatagacacttagacaggcataaaaccatctcgggcactcgttccctgcacaagtgtaggagagagctgaggcctgctggccatggacaccaccagcaagaaagcctacggggttgccgtcgtcatacagctcatctacaccggcatgtacgtcgtctccaaggcggcattcgaccatggcatgagcacctacgtgttcatcttctaccgccaggcggccgccactgcgctgttgctccccatagccattgtgcttgaaaggaagaatgcaccacccatgtcattcaggctgtttctgaagctgttcttctatgcattgcttggcaacacattgagcatgaatctgtacaacataagcctcaagtacacctctgcaacagtggcatcggcaacgagcaactctgtccctgtggtcaccttcttcctggcagtcctgttaaggctggaagtggttcggctgagaagcccgtcaggcatggcgaaggcggcgggcgtggcgctgtgcctggccggggtcctgaccatcgcgctgtacacggggccgtcgatgagcccggtgaaccaccaccgcgccttcgcgtcgcaccagcagcacccccatccccatgccgatggcggcggcggcggcaaggggacgtggatcaagggcacgttcctgatgctgctgtccaacacgacgtggtccctctggatcgtgctgcaggcgtcgctgctcaaggagtaccccaacaagctgttgtccacgctggtgcagtgcgcgctcagcaccgcccagtccttcctcctcgccgtcgccgtcgagcgggaccccgccgcctggaagctgcagctcgacgtcggcctcctcgccgtcgcctactccggtctggtggtgacgggcgtgtcgttctacctgcaggcgtggtgcatcgagaagcgcgggcccgtgttcctggccatgtccaacccgctgggcctgctgctcaccatcttctgctcctccttcttcctcggcgagatcgtgcgcctgggcagcctcctcggcagcggcctcctcgtcggagggctctacagcgtcctctggggcaagagcaaggaccacctccaccaggagcatcaagacgacgaagagaagcagcagcagcagccgagcgcagcaggcggagacaaccagaagcagctcaaggagcagttcgcaatggagccatcatcgccactgcgccatcagtccggatgatgaggaatggtctacgcgtgtatgtgtgtgagtaggttctacgtacgtgcctatatatgtcttaatgtctatgtggtgggtctgggcgtatccaactccgatgcacatggatggtctcttgttcgcccg

SEQ ID NO: 5137 - protein, 377 aa, Zea mays subsp. mays
  peptide (1)..(377): Ceres Seq. ID no. 12353777
  misc_feature (17)..(150): Pfam Name: Integral membrane protein DUF6 Pfam Description: Integral membrane protein DUF6
  misc_feature (5)..(332): Homolog of NCBI NO: 34903802 NR Description: OSJNBa0016I09.14 [Oryza sativa (japonica
  misc_feature (82)..(365): Homolog of NCBI NO: 34903796 NR Description: OSJNBa0016I09.11 [Oryza sativa (japonica
  misc_feature (5)..(71): Homolog of NCBI NO: 34903796 NR Description: OSJNBa0016I09.11 [Oryza sativa (japonica
  misc_feature (5)..(333): Homolog of NCBI NO: 34903800 NR Description: OSJNBa0016I09.13 [Oryza sativa (japonica
  misc_feature (84)..(359): Homolog of NCBI NO: 15088548 NR Description: putative nodulin-like-like protein [Triticum
  misc_feature (1)..(105): Homolog of NCBI NO: 15088548 NR Description: putative nodulin-like-like protein [Triticum
  misc_feature (1)..(348): Homolog of NCBI NO: 15238227 NR Description: nodulin-like protein; protein id: At5g64700.1
  misc_feature (5)..(332): Homolog of NCBI NO: 34913776 NR Description: nodulin-like protein [Oryza sativa (japonica
  misc_feature (24)..(363): Homolog of NCBI NO: 34913778 NR Description: nodulin-like protein [Oryza sativa (japonica
  misc_feature (7)..(348): Homolog of NCBI NO: 30693682 NR Description: nodulin N21 family protein [Arabidopsis thaliana]
MDTTSKKAYGVAVVIQLIYTGMYVVSKAAFDHGMSTYVFIFYRQAAATALLLPIAIVLERKNAPPMSFRLFLKLFFYALLGNTLSMNLYNISLKYTSATVASATSNSVPVVTFFLAVLLRLEVVRLRSPSGMAKAAGVALCLAGVLTIALYTGPSMSPVNHHRAFASHQQHPHPHADGGGGGKGTWIKGTFLMLLSNTTWSLWIVLQASLLKEYPNKLLSTLVQCALSTAQSFLLAVAVERDPAAWKLQLDVGLLAVAYSGLVVTGVSFYLQAWCIEKRGPVFLAMSNPLGLLLTIFCSSFFLGEIVRLGSLLGSGLLVGGLYSVLWGKSKDHLHQEHQDDEEKQQQQPSAAGGDNQKQLKEQFAMEPSSPLRHQSG

SEQ ID NO: 5138 - protein, 356 aa, Zea mays subsp. mays
  peptide (1)..(356): Ceres Seq. ID no. 12353778
  misc_feature (1)..(129): Pfam Name: Integral membrane protein DUF6 Pfam Description: Integral membrane protein DUF6
  misc_feature (1)..(311): Homolog of NCBI NO: 34903802 NR Description: OSJNBa0016I09.14 [Oryza sativa (japonica
  misc_feature (61)..(344): Homolog of NCBI NO: 34903796 NR Description: OSJNBa0016I09.11 [Oryza sativa (japonica
  misc_feature (1)..(50): Homolog of NCBI NO: 34903796 NR Description: OSJNBa0016I09.11 [Oryza sativa (japonica
  misc_feature (1)..(312): Homolog of NCBI NO: 34903800 NR Description: OSJNBa0016I09.13 [Oryza sativa (japonica
  misc_feature (63)..(338): Homolog of NCBI NO: 15088548 NR Description: putative nodulin-like-like protein [Triticum
  misc_feature (1)..(84): Homolog of NCBI NO: 15088548 NR Description: putative nodulin-like-like protein [Triticum
  misc_feature (1)..(327): Homolog of NCBI NO: 15238227 NR Description: nodulin-like protein; protein id: At5g64700.1
  misc_feature (1)..(311): Homolog of NCBI NO: 34913776 NR Description: nodulin-like protein [Oryza sativa (japonica
  misc_feature (3)..(342): Homolog of NCBI NO: 34913778 NR Description: nodulin-like protein [Oryza sativa (japonica
  misc_feature (1)..(327): Homolog of NCBI NO: 30693682 NR Description: nodulin N21 family protein [Arabidopsis thaliana]
MYVVSKAAFDHGMSTYVFIFYRQAAATALLLPIAIVLERKNAPPMSFRLFLKLFFYALLGNTLSMNLYNISLKYTSATVASATSNSVPVVTFFLAVLLRLEVVRLRSPSGMAKAAGVALCLAGVLTIALYTGPSMSPVNHHRAFASHQQHPHPHADGGGGGKGTWIKGTFLMLLSNTTWSLWIVLQASLLKEYPNKLLSTLVQCALSTAQSFLLAVAVERDPAAWKLQLDVGLLAVAYSGLVVTGVSFYLQAWCIEKRGPVFLAMSNPLGLLLTIFCSSFFLGEIVRLGSLLGSGLLVGGLYSVLWGKSKDHLHQEHQDDEEKQQQQPSAAGGDNQKQLKEQFAMEPSSPLRHQSG

SEQ ID NO: 5139 - protein, 344 aa, Zea mays subsp. mays
  peptide (1)..(344): Ceres Seq. ID no. 12353779
  misc_feature (1)..(117): Pfam Name: Integral membrane protein DUF6 Pfam Description: Integral membrane protein DUF6
  misc_feature (1)..(299): Homolog of NCBI NO: 34903802 NR Description: OSJNBa0016I09.14 [Oryza sativa (japonica
  misc_feature (49)..(332): Homolog of NCBI NO: 34903796 NR Description: OSJNBa0016I09.11 [Oryza sativa (japonica
  misc_feature (1)..(38): Homolog of NCBI NO: 34903796 NR Description: OSJNBa0016I09.11 [Oryza sativa (japonica
  misc_feature (1)..(300): Homolog of NCBI NO: 34903800 NR Description: OSJNBa0016I09.13 [Oryza sativa (japonica
  misc_feature (51)..(326): Homolog of NCBI NO: 15088548 NR Description: putative nodulin-like-like protein [Triticum
  misc_feature (1)..(72): Homolog of NCBI NO: 15088548 NR Description: putative nodulin-like-like protein [Triticum
  misc_feature (1)..(315): Homolog of NCBI NO: 15238227 NR Description: nodulin-like protein; protein id: At5g64700.1
  misc_feature (1)..(299): Homolog of NCBI NO: 34913776 NR Description: nodulin-like protein [Oryza sativa (japonica
  misc_feature (1)..(330): Homolog of NCBI NO: 34913778 NR Description: nodulin-like protein [Oryza sativa (japonica
  misc_feature (1)..(315): Homolog of NCBI NO: 30693682 NR Description: nodulin N21 family protein [Arabidopsis thaliana]
MSTYVFIFYRQAAATALLLPIAIVLERKNAPPMSFRLFLKLFFYALLGNTLSMNLYNISLKYTSATVASATSNSVPVVTFFLAVLLRLEVVRLRSPSGMAKAAGVALCLAGVLTIALYTGPSMSPVNHHRAFASHQQHPHPHADGGGGGKGTWIKGTFLMLLSNTTWSLWIVLQASLLKEYPNKLLSTLVQCALSTAQSFLLAVAVERDPAAWKLQLDVGLLAVAYSGLVVTGVSFYLQAWCIEKRGPVFLAMSNPLGLLLTIFCSSFFLGEIVRLGSLLGSGLLVGGLYSVLWGKSKDHLHQEHQDDEEKQQQQPSAAGGDNQKQLKEQFAMEPSSPLRHQSG

SEQ ID NO: 5140 - DNA, 1116 bp, Zea mays subsp. mays
  misc_feature (1)..(1116): Ceres Seq. ID no. 12434957
  misc_feature: MA Experiment ID: 108528 Result: Up-regulated in Transcription
  misc_feature: MA Experiment 108528 PARAMETER Experiment Name: Zm_Imbibed_Seeds_P Parameter: Age (day) Value: 5 vs. 2
  misc_feature: MA Experiment 108528 PARAMETER Experiment Name: Zm_Imbibed_Seeds_P Parameter: Organism Value: Zea mays
  misc_feature: MA Experiment 108528 PARAMETER Experiment Name: Zm_Imbibed_Seeds_P Parameter: Plant Line Value: 35A19
  misc_feature: MA Experiment 108528 PARAMETER Experiment Name: Zm_Imbibed_Seeds_P Parameter: Tissue Value: Aerial vs. Embryo
  misc_feature: MA Experiment ID: 108529 Result: Down-regulated in Transcription
  misc_feature: MA Experiment 108529 PARAMETER Experiment Name: Zm_Imbibed_Seeds_P Parameter: Age (day) Value: 5 vs. 2
  misc_feature: MA Experiment 108529 PARAMETER Experiment Name: Zm_Imbibed_Seeds_P Parameter: Organism Value: Zea mays
  misc_feature: MA Experiment 108529 PARAMETER Experiment Name: Zm_Imbibed_Seeds_P Parameter: Plant Line Value: 35A19
  misc_feature: MA Experiment 108529 PARAMETER Experiment Name: Zm_Imbibed_Seeds_P Parameter: Tissue Value: Roots vs. Embryo
  misc_feature: MA Experiment ID: 108530 Result: Up-regulated in Transcription
  misc_feature: MA Experiment 108530 PARAMETER Experiment Name: Zm_Imbibed_Seeds_P Parameter: Age (day) Value: 6 vs. 2
  misc_feature: MA Experiment 108530 PARAMETER Experiment Name: Zm_Imbibed_Seeds_P Parameter: Organism Value: Zea mays
  misc_feature: MA Experiment 108530 PARAMETER Experiment Name: Zm_Imbibed_Seeds_P Parameter: Plant Line Value: 35A19
  misc_feature: MA Experiment 108530 PARAMETER Experiment Name: Zm_Imbibed_Seeds_P Parameter: Tissue Value: Aerial vs. Embryo
  misc_feature: MA Experiment ID: 108543 Result: Up-regulated in Transcription
  misc_feature: MA Experiment ID: 108544 Result: Up-regulated in Transcription
  misc_feature: MA Experiment ID: 108545 Result: Up-regulated in Transcription
  misc_feature: MA Experiment 108545 PARAMETER Experiment Name: Zm_Imbibed_Seeds_P Parameter: Age (day) Value: 3 vs. 2
  misc_feature: MA Experiment 108545 PARAMETER Experiment Name: Zm_Imbibed_Seeds_P Parameter: Organism Value: Zea mays
  misc_feature: MA Experiment 108545 PARAMETER Experiment Name: Zm_Imbibed_Seeds_P Parameter: Plant Line Value: 35A19
  misc_feature: MA Experiment 108545 PARAMETER Experiment Name: Zm_Imbibed_Seeds_P Parameter: Tissue Value: Aerial vs. Embryo
  misc_feature: MA Experiment ID: 108546 Result: Down-regulated in Transcription
  misc_feature: MA Experiment 108546 PARAMETER Experiment Name: Zm_Imbibed_Seeds_P Parameter: Age (day) Value: 3 vs. 2
  misc_feature: MA Experiment 108546 PARAMETER Experiment Name: Zm_Imbibed_Seeds_P Parameter: Organism Value: Zea mays
  misc_feature: MA Experiment 108546 PARAMETER Experiment Name: Zm_Imbibed_Seeds_P Parameter: Plant Line Value: 35A19
  misc_feature: MA Experiment 108546 PARAMETER Experiment Name: Zm_Imbibed_Seeds_P Parameter: Tissue Value: Roots vs. Embryo
  misc_feature: MA Experiment ID: 108547 Result: Up-regulated in Transcription
  misc_feature: MA Experiment 108547 PARAMETER Experiment Name: Zm_Imbibed_Seeds_P Parameter: Age (day) Value: 4 vs. 2
  misc_feature: MA Experiment 108547 PARAMETER Experiment Name: Zm_Imbibed_Seeds_P Parameter: Organism Value: Zea mays
  misc_feature: MA Experiment 108547 PARAMETER Experiment Name: Zm_Imbibed_Seeds_P Parameter: Plant Line Value: 35A19
  misc_feature: MA Experiment 108547 PARAMETER Experiment Name: Zm_Imbibed_Seeds_P Parameter: Tissue Value: Aerial vs. Embryo
  misc_feature: MA Experiment ID: 108687 Result: Down-regulated in Transcription
  misc_feature: MA Experiment 108687 PARAMETER Experiment Name: Zm_Embryos-Flowers__P Parameter: Tissue Value: Embryo vs. Aerial+
  misc_feature: MA Experiment ID: 108689 Result: Up-regulated in Transcription
  misc_feature: MA Experiment 108689 PARAMETER Experiment Name: Zm_Drought_Roots_P Parameter: Age (day) Value: 9
  misc_feature: MA Experiment 108689 PARAMETER Experiment Name: Zm_Drought_Roots_P Parameter: Organism Value: Zea mays
  misc_feature: MA Experiment 108689 PARAMETER Experiment Name: Zm_Drought_Roots_P Parameter: Plant Line Value: 35A19
  misc_feature: MA Experiment 108689 PARAMETER Experiment Name: Zm_Drought_Roots_P Parameter: Timepoint (hr) Value: 24
  misc_feature: MA Experiment 108689 PARAMETER Experiment Name: Zm_Drought_Roots_P Parameter: Tissue Value: Roots
  misc_feature: MA Experiment 108689 PARAMETER Experiment Name: Zm_Drought_Roots_P Parameter: Treatment Value: Drought vs. No Drought
  misc_feature: MA Experiment ID: 20000477 Result: Down-regulated in Transcription
  misc_feature: MA Experiment 20000477 PARAMETER Experiment Name: Zm_5mM_SA_P Parameter: Age (day) Value: 10
  misc_feature: MA Experiment 20000477 PARAMETER Experiment Name: Zm_5mM_SA_P Parameter: Organism Value: Zea mays
  misc_feature: MA Experiment 20000477 PARAMETER Experiment Name: Zm_5mM_SA_P Parameter: Plant Line Value: 35A19
  misc_feature: MA Experiment 20000477 PARAMETER Experiment Name: Zm_5mM_SA_P Parameter: Timepoint (hr) Value: 48
  misc_feature: MA Experiment 20000477 PARAMETER Experiment Name: Zm_5mM_SA_P Parameter: Tissue Value: Aerial
  misc_feature: MA Experiment 20000477 PARAMETER Experiment Name: Zm_5mM_SA_P Parameter: Treatment Value: 5mM SA vs. No Treatment
  misc_feature: MA Experiment ID: 20000478 Result: Down-regulated in Transcription
  misc_feature: MA Experiment 20000478 PARAMETER Experiment Name: Zm_5mM_SA_P Parameter: Age (day) Value: 11
  misc_feature: MA Experiment 20000478 PARAMETER Experiment Name: Zm_5mM_SA_P Parameter: Organism Value: Zea mays
  misc_feature: MA Experiment 20000478 PARAMETER Experiment Name: Zm_5mM_SA_P Parameter: Plant Line Value: 35A19
  misc_feature: MA Experiment 20000478 PARAMETER Experiment Name: Zm_5mM_SA_P Parameter: Timepoint (hr) Value: 72
  misc_feature: MA Experiment 20000478 PARAMETER Experiment Name: Zm_5mM_SA_P Parameter: Tissue Value: Aerial
  misc_feature: MA Experiment 20000478 PARAMETER Experiment Name: Zm_5mM_SA_P Parameter: Treatment Value: 5mM SA vs. No Treatment
  misc_feature: MA Experiment ID: 20001613 Result: Down-regulated in Transcription
  misc_feature: MA Experiment 20001613 PARAMETER Experiment Name: Zm_50ppm_KNO3_L-to-H_P Parameter: Age (day) Value: 20
  misc_feature: MA Experiment 20001613 PARAMETER Experiment Name: Zm_50ppm_KNO3_L-to-H_P Parameter: Organism Value: Zea mays
  misc_feature: MA Experiment 20001613 PARAMETER Experiment Name: Zm_50ppm_KNO3_L-to-H_P Parameter: Plant Line Value: 35A19
  misc_feature: MA Experiment 20001613 PARAMETER Experiment Name: Zm_50ppm_KNO3_L-to-H_P Parameter: Timepoint (hr) Value: 24
  misc_feature: MA Experiment 20001613 PARAMETER Experiment Name: Zm_50ppm_KNO3_L-to-H_P Parameter: Tissue Value: Roots
  misc_feature: MA Experiment 20001613 PARAMETER Experiment Name: Zm_50ppm_KNO3_L-to-H_P Parameter: Treatment Value: 50ppm KNO3 vs. 50ppm KCl
  misc_feature: MA Experiment ID: 20001614 Result: Down-regulated in Transcription
  misc_feature: MA Experiment 20001614 PARAMETER Experiment Name: Zm_50ppm_KNO3_L-to-H_P Parameter: Age (day) Value: 21
  misc_feature: MA Experiment 20001614 PARAMETER Experiment Name: Zm_50ppm_KNO3_L-to-H_P Parameter: Organism Value: Zea mays
  misc_feature: MA Experiment 20001614 PARAMETER Experiment Name: Zm_50ppm_KNO3_L-to-H_P Parameter: Plant Line Value: 35A19
  misc_feature: MA Experiment 20001614 PARAMETER Experiment Name: Zm_50ppm_KNO3_L-to-H_P Parameter: Timepoint (hr) Value: 48
  misc_feature: MA Experiment 20001614 PARAMETER Experiment Name: Zm_50ppm_KNO3_L-to-H_P Parameter: Tissue Value: Roots
  misc_feature: MA Experiment 20001614 PARAMETER Experiment Name: Zm_50ppm_KNO3_L-to-H_P Parameter: Treatment Value: 50ppm KNO3 vs. 50ppm KCl
atatacctgtcactcacgctaccgccgtgaccgatcgttcgttccttccttctccctcccttcgcgggccgcgcgcctattttattatttactactctattcatatcattatattgtttggtttccttcttcccggccagatctctcactctctcgtcagatcctctcggctagctagctaggacagaggagggaggggaaggcgctggctatggcgactgcggcggcggcggcggcggcggccatggaggagccggacgtcgtcaacggccgcgacgtggtgagctgggtggcgtccggggtggtgctgtggtcgaccgccttcttgctggtgcgggcgctgttccccaagcgctcctacgacttctgcaaccgcgccgtctccaccatgcacgccgtcgccgccgtgtgcctcgcctgcctctccgtcgacgactggtcgtgccccgtctgcccgctcgccgccgcatcctcccgtcgccagatgaaggcgctggcggttacgctggcgtacatggtgtacgacgcggcgtgctgccacctcaacggcgacacgcggctggacaacgccgtgcaccacctggtcagcatcgtcggcatcggcgcggggctcgcctaccagaggtgcgggacggagatggtggccagcatgctcgtgacggagatgtccagcccgctgctgcacctgcgggagatgctcaaggagctgggcgtgcgggacacggagctgaacctcctcgtcgacgtgctcttcgccgccaccttctccgccgcccggatgggcgtcgggccgtacctcacctacgtcaccgtgacggcccgacaaccccatcctcatcaaggcgatggcgacggggctgcagctggtgagcgcctactggttcctgcggatcctccggatggtcaggtacaagctcgccggcaagaagaagccgacgccggccaagctcgccgccgccgccgccaactgacgtaataagcgccggcgacgaccttcacgagctacgcacatttatgataccgggagttggattcgacagaggccgtgctgtacatatagtacaaatacacacacacgcccgcctctgaagcaatgcaatgcaatgcaatttctcc

SEQ ID NO: 5141 - protein, 254 aa, Zea mays subsp. mays
  peptide (1)..(254): Ceres Seq. ID no. 12434958
  misc_feature (23)..(206): Homolog of NCBI NO: 34903030 NR Description: unnamed protein product [Oryza sativa (japonica group)] >gi|7228458|dbj|BAA92418.1| unnamed protein product
  misc_feature (23)..(206): Homolog of NCBI NO: 30693154 NR Description: expressed protein [Arabidopsis thaliana]
  misc_feature (12)..(206): Homolog of NCBI NO: 22330031 NR Description: hypothetical protein; protein id: At1g45010.1, by cDNA: gi_17380925 [Arabidopsis thaliana] unknown protein [Arabidopsis thaliana]
  misc_feature (23)..(206): Homolog of NCBI NO: 15219511 NR Description: hypothetical protein; protein id: At1g35170.1
  misc_feature (23)..(185): Homolog of NCBI NO: 25518603 NR Description: hypothetical protein T32G9.28 - Arabidopsis >gi|12320960|gb|AAG50605.1|AC079605_10 hypothetical protein
  misc_feature (12)..(91): Homolog of NCBI NO: 25405881 NR Description: protein F27F5.9 [imported] - Arabidopsis thaliana
  misc_feature (135)..(179): Homolog of NCBI NO: 25405881 NR Description: protein F27F5.9 [imported] - Arabidopsis thaliana
  misc_feature (34)..(206): Homolog of NCBI NO: 34535216 NR Description: unnamed protein product [Homo sapiens]
  misc_feature (34)..(206): Homolog of NCBI NO: 27661880 NR Description: hypothetical protein XP_236191 [Rattus norvegicus]
MATAAAAAAAAMEEPDVVNGRDVVSWVASGVVLWSTAFLLVRALFPKRSYDFCNRAVSTMHAVAAVCLACLSVDDWSCPVCPLAAASSRRQMKALAVTLAYMVYDAACCHLNGDTRLDNAVHHLVSIVGIGAGLAYQRCGTEMVASMLVTEMSSPLLHLREMLKELGVRDTELNLLVDVLFAATFSAARMGVGPYLTYVTVTARQPHPHQGDGDGAAAGERLLVPADPPDGQVQARRQEEADAGQARRRRRQLT

SEQ ID NO: 5142 - protein, 243 aa, Zea mays subsp. mays
  peptide (1)..(243): Ceres Seq. ID no. 12434959
  misc_feature (12)..(174): Homolog of NCBI NO: 25518603 NR Description: hypothetical protein T32G9.28 - Arabidopsis >gi|12320960|gb|AAG50605.1|AC079605_10 hypothetical protein
  misc_feature (1)..(80): Homolog of NCBI NO: 25405881 NR Description: protein F27F5.9 [imported] - Arabidopsis thaliana
  misc_feature (124)..(168): Homolog of NCBI NO: 25405881 NR Description: protein F27F5.9 [imported] - Arabidopsis thaliana
  misc_feature (23)..(195): Homolog of NCBI NO: 34535216 NR Description: unnamed protein product [Homo sapiens]
  misc_feature (23)..(195): Homolog of NCBI NO: 27661880 NR Description: hypothetical protein XP_236191 [Rattus norvegicus]
  misc_feature (12)..(195): Homolog of NCBI NO: 34903030 NR Description: unnamed protein product [Oryza sativa (japonica group)] >gi|7228458|dbj|BAA92418.1| unnamed protein product
  misc_feature (12)..(195): Homolog of NCBI NO: 30693154 NR Description: expressed protein [Arabidopsis thaliana]
  misc_feature (1)..(195): Homolog of NCBI NO: 22330031 NR Description: hypothetical protein; protein id: At1g45010.1, by cDNA: gi_17380925 [Arabidopsis thaliana] unknown protein [Arabidopsis thaliana]
  misc_feature (12)..(195): Homolog of NCBI NO: 15219511 NR Description: hypothetical protein; protein id: At1g35170.1
MEEPDVVNGRDVVSWVASGVVLWSTAFLLVRALFPKRSYDFCNRAVSTMHAVAAVCLACLSVDDWSCPVCPLAAASSRRQMKALAVTLAYMVYDAACCHLNGDTRLDNAVHHLVSIVGIGAGLAYQRCGTEMVASMLVTEMSSPLLHLREMLKELGVRDTELNLLVDVLFAATFSAARMGVGPYLTYVTVTARQPHPHQGDGDGAAAGERLLVPADPPDGQVQARRQEEADAGQARRRRRQLT

SEQ ID NO: 5143 - protein, 195 aa, Zea mays subsp. mays
  peptide (1)..(195): Ceres Seq. ID no. 12434960
  misc_feature (1)..(147): Homolog of NCBI NO: 34903030 NR Description: unnamed protein product [Oryza sativa (japonica group)] >gi|7228458|dbj|BAA92418.1| unnamed protein product
  misc_feature (1)..(147): Homolog of NCBI NO: 30693154 NR Description: expressed protein [Arabidopsis thaliana]
  misc_feature (1)..(147): Homolog of NCBI NO: 22330031 NR Description: hypothetical protein; protein id: At1g45010.1, by cDNA: gi_17380925 [Arabidopsis thaliana] unknown protein [Arabidopsis thaliana]
  misc_feature (1)..(147): Homolog of NCBI NO: 15219511 NR Description: hypothetical protein; protein id: At1g35170.1
  misc_feature (1)..(126): Homolog of NCBI NO: 25518603 NR Description: hypothetical protein T32G9.28 - Arabidopsis >gi|12320960|gb|AAG50605.1|AC079605_10 hypothetical protein
  misc_feature (1)..(32): Homolog of NCBI NO: 25405881 NR Description: protein F27F5.9 [imported] - Arabidopsis thaliana
  misc_feature (76)..(120): Homolog of NCBI NO: 25405881 NR Description: protein F27F5.9 [imported] - Arabidopsis thaliana
  misc_feature (1)..(147): Homolog of NCBI NO: 34535216 NR Description: unnamed protein product [Homo sapiens]
  misc_feature (1)..(147): Homolog of NCBI NO: 27661880 NR Description: hypothetical protein XP_236191 [Rattus norvegicus]
MHAVAAVCLACLSVDDWSCPVCPLAAASSRRQMKALAVTLAYMVYDAACCHLNGDTRLDNAVHHLVSIVGIGAGLAYQRCGTEMVASMLVTEMSSPLLHLREMLKELGVRDTELNLLVDVLFAATFSAARMGVGPYLTYVTVTARQPHPHQGDGDGAAAGERLLVPADPPDGQVQARRQEEADAGQARRRRRQLT

SEQ ID NO: 5144 - DNA, 1661 bp, Zea mays subsp. mays
  misc_feature (1)..(1661): Ceres Seq. ID no. 12409686
  misc_feature: MA Experiment ID: 108522 Result: Down-regulated in Transcription
  misc_feature: MA Experiment 108522 PARAMETER Experiment Name: Zm_42deg_Heat_P Parameter: Age (day) Value: 8
  misc_feature: MA Experiment 108522 PARAMETER Experiment Name: Zm_42deg_Heat_P Parameter: Organism Value: Zea mays
  misc_feature: MA Experiment 108522 PARAMETER Experiment Name: Zm_42deg_Heat_P Parameter: Plant Line Value: 35A19
  misc_feature: MA Experiment 108522 PARAMETER Experiment Name: Zm_42deg_Heat_P Parameter: Temperature (deg C) Value: 42 vs. 22
  misc_feature: MA Experiment 108522 PARAMETER Experiment Name: Zm_42deg_Heat_P Parameter: Timepoint (hr) Value: 1
  misc_feature: MA Experiment 108522 PARAMETER Experiment Name: Zm_42deg_Heat_P Parameter: Tissue Value: Aerial
  misc_feature: MA Experiment ID: 108523 Result: Down-regulated in Transcription
  misc_feature: MA Experiment 108523 PARAMETER Experiment Name: Zm_42deg_Heat_P Parameter: Age (day) Value: 8
  misc_feature: MA Experiment 108523 PARAMETER Experiment Name: Zm_42deg_Heat_P Parameter: Organism Value: Zea mays
  misc_feature: MA Experiment 108523 PARAMETER Experiment Name: Zm_42deg_Heat_P Parameter: Plant Line Value: 35A19
  misc_feature: MA Experiment 108523 PARAMETER Experiment Name: Zm_42deg_Heat_P Parameter: Temperature (deg C) Value: 42 vs. 22
  misc_feature: MA Experiment 108523 PARAMETER Experiment Name: Zm_42deg_Heat_P Parameter: Timepoint (hr) Value: 6
  misc_feature: MA Experiment 108523 PARAMETER Experiment Name: Zm_42deg_Heat_P Parameter: Tissue Value: Aerial
  misc_feature: MA Experiment ID: 108527 Result: Down-regulated in Transcription
  misc_feature: MA Experiment 108527 PARAMETER Experiment Name: Zm_5mM_NO_P Parameter: Age (day) Value: 8
  misc_feature: MA Experiment 108527 PARAMETER Experiment Name: Zm_5mM_NO_P Parameter: Organism Value: Zea mays
  misc_feature: MA Experiment 108527 PARAMETER Experiment Name: Zm_5mM_NO_P Parameter: Plant Line Value: 35A19
  misc_feature: MA Experiment 108527 PARAMETER Experiment Name: Zm_5mM_NO_P Parameter: Timepoint (hr) Value: 6
  misc_feature: MA Experiment 108527 PARAMETER Experiment Name: Zm_5mM_NO_P Parameter: Tissue Value: Aerial
  misc_feature: MA Experiment 108527 PARAMETER Experiment Name: Zm_5mM_NO_P Parameter: Treatment Value: 5mM NO vs. No Treatment
  misc_feature: MA Experiment ID: 108528 Result: Down-regulated in Transcription
  misc_feature: MA Experiment 108528 PARAMETER Experiment Name: Zm_Imbibed_Seeds_P Parameter: Age (day) Value: 5 vs. 2
  misc_feature: MA Experiment 108528 PARAMETER Experiment Name: Zm_Imbibed_Seeds_P Parameter: Organism Value: Zea mays
  misc_feature: MA Experiment 108528 PARAMETER Experiment Name: Zm_Imbibed_Seeds_P Parameter: Plant Line Value: 35A19
  misc_feature: MA Experiment 108528 PARAMETER Experiment Name: Zm_Imbibed_Seeds_P Parameter: Tissue Value: Aerial vs. Embryo
  misc_feature: MA Experiment ID: 108534 Result: Down-regulated in Transcription
  misc_feature: MA Experiment 108534 PARAMETER Experiment Name: Zm_4deg_Cold_P Parameter: Age (hr) Value: 8
  misc_feature: MA Experiment 108534 PARAMETER Experiment Name: Zm_4deg_Cold_P Parameter: Organism Value: Zea mays
  misc_feature: MA Experiment 108534 PARAMETER Experiment Name: Zm_4deg_Cold_P Parameter: Plant Line Value: 35A19
  misc_feature: MA Experiment 108534 PARAMETER Experiment Name: Zm_4deg_Cold_P Parameter: Temperature (deg C) Value: 4 vs. 22
  misc_feature: MA Experiment 108534 PARAMETER Experiment Name: Zm_4deg_Cold_P Parameter: Timepoint (hr) Value: 6
  misc_feature: MA Experiment 108534 PARAMETER Experiment Name: Zm_4deg_Cold_P Parameter: Tissue Value: Aerial
  misc_feature: MA Experiment ID: 108535 Result: Up-regulated in Transcription
  misc_feature: MA Experiment 108535 PARAMETER Experiment Name: Zm_Meristem_P Parameter: Age (day) Value: 8
  misc_feature: MA Experiment 108535 PARAMETER Experiment Name: Zm_Meristem_P Parameter: Organism Value: Zea mays
  misc_feature: MA Experiment 108535 PARAMETER Experiment Name: Zm_Meristem_P Parameter: Plant Line Value: 35A19
  misc_feature: MA Experiment 108535 PARAMETER Experiment Name: Zm_Meristem_P Parameter: Tissue Value: Root Meristem vs. Above Root Meristem
  misc_feature: MA Experiment ID: 108543 Result: Up-regulated in Transcription
  misc_feature: MA Experiment ID: 108544 Result: Down-regulated in Transcription
  misc_feature: MA Experiment ID: 108556 Result: Down-regulated in Transcription
  misc_feature: MA Experiment 108556 PARAMETER Experiment Name: Zm_Drought_P Parameter: Age (day) Value: 9
  misc_feature: MA Experiment 108556 PARAMETER Experiment Name: Zm_Drought_P Parameter: Organism Value: Zea mays
  misc_feature: MA Experiment 108556 PARAMETER Experiment Name: Zm_Drought_P Parameter: Plant Line Value: 35A19
  misc_feature: MA Experiment 108556 PARAMETER Experiment Name: Zm_Drought_P Parameter: Timepoint (hr) Value: 24
  misc_feature: MA Experiment 108556 PARAMETER Experiment Name: Zm_Drought_P Parameter: Tissue Value: Aerial
  misc_feature: MA Experiment 108556 PARAMETER Experiment Name: Zm_Drought_P Parameter: Treatment Value: Drought vs. No Drought
  misc_feature: MA Experiment ID: 20000478 Result: Down-regulated in Transcription
  misc_feature: MA Experiment 20000478 PARAMETER Experiment Name: Zm_5mM_SA_P Parameter: Age (day) Value: 11
  misc_feature: MA Experiment 20000478 PARAMETER Experiment Name: Zm_5mM_SA_P Parameter: Organism Value: Zea mays
  misc_feature: MA Experiment 20000478 PARAMETER Experiment Name: Zm_5mM_SA_P Parameter: Plant Line Value: 35A19
  misc_feature: MA Experiment 20000478 PARAMETER Experiment Name: Zm_5mM_SA_P Parameter: Timepoint (hr) Value: 72
  misc_feature: MA Experiment 20000478 PARAMETER Experiment Name: Zm_5mM_SA_P Parameter: Tissue Value: Aerial
  misc_feature: MA Experiment 20000478 PARAMETER Experiment Name: Zm_5mM_SA_P Parameter: Treatment Value: 5mM SA vs. No Treatment
  misc_feature: MA Experiment ID: 20000479 Result: Down-regulated in Transcription
  misc_feature: MA Experiment 20000479 PARAMETER Experiment Name: Zm_Drought_P Parameter: Age (day) Value: 10
  misc_feature: MA Experiment 20000479 PARAMETER Experiment Name: Zm_Drought_P Parameter: Organism Value: Zea mays
  misc_feature: MA Experiment 20000479 PARAMETER Experiment Name: Zm_Drought_P Parameter: Plant Line Value: 35A19
  misc_feature: MA Experiment 20000479 PARAMETER Experiment Name: Zm_Drought_P Parameter: Timepoint (hr) Value: 48
  misc_feature: MA Experiment 20000479 PARAMETER Experiment Name: Zm_Drought_P Parameter: Tissue Value: Aerial
  misc_feature: MA Experiment 20000479 PARAMETER Experiment Name: Zm_Drought_P Parameter: Treatment Value: Drought vs. No Drought
  misc_feature: MA Experiment ID: 20000535 Result: Up-regulated in Transcription
  misc_feature: MA Experiment 20000535 PARAMETER Experiment Name: Zm_Hybrid_Seed_Dev_P Parameter: DAP Value: 30 vs. 12
  misc_feature: MA Experiment 20000535 PARAMETER Experiment Name: Zm_Hybrid_Seed_Dev_P Parameter: Organism Value: Zea mays
  misc_feature: MA Experiment 20000535 PARAMETER Experiment Name: Zm_Hybrid_Seed_Dev_P Parameter: Plant Line Value: 35A19
  misc_feature: MA Experiment 20000535 PARAMETER Experiment Name: Zm_Hybrid_Seed_Dev_P Parameter: Tissue Value: Embryo vs. Unfert Floret
gtgttcacaaagccggcgccttttgctccccgatctcagttcccgcccacctctaagctcccaaggcgacgctgcggcggcgggacaagcggaaggacaagaggcggacttgtctccctgcccccaccccctccctcgcttcgcgcgtacccccttcagttcagccgggcggtaccgtcgacggcgccggcattgtacttctgctgcgcagctatcactgctctgagaaaatggttgcagcagcctttactgttgatttggacaagcctctagtattccaggttggccatctagaggagcagtatcaggagtgggttcaccagccgattgtttgcaaggaagggccacggttttttgaaaatgatatattggagttcttaacacgcacgaaatggtgggcagttcctcttatctggttgcctgttgtatgttggtgcctgagtacttctatcaagatgggcaatactatcacagatgtagctatgatgattgggtttggaatatttctgtggacactgatcgaatatgtgttacaccgattcttgttccacataaaaaccaaaagttactggggaaacacagcacattatcttcttcatggatgtcatcacaagcatccgatggatggacttcgacttgtctttccaccagctgccgcagctattttgtgctttccggtaaataatcttccttatgtattacgtaccagggtatgggtatctactctgctgttgctgacaatatgtcagatttccacaacactgatgttgaaattacttactacatttgttaaatgttgcatcctaatccttttttttctaaagctggttgaagtggcctgtttgtacatggaaatcgtcatggtttcaagctaatcagaattccttttaactttgttaactttcagttggatatcgataattttaatgccttttttttctgaactgttcatatagttctggaacatgatcaagctattttcgaccccgtctacaactcctggtctgtttggaggtggcctgttgggctacgtgatctatgattgcacacactactacctgcatcatggccagccatcatcagatcctgcaaagtatctccaagaagtaccatctcaaccatcacttcagaattcaaacaaagggctttggaataacttcgaccctgtgggatcatgtatttggcacgctgccttctacgaaaactgtcgacaagagcatttgattttgactggatcttctgctttgcaaagctcttatagtgatgttaggctttgctcgcattgcctgtgtccactttttgaggccagcttccctgttccatcatgtagatttggctttggcagtgtctctatttttttttatctctagcagaggactttaaaatcatcaattacagattggtcatcatcggtggaggttctgttggacaaatttctatccagtttctgattcttctccatggaccaactgtatgaaggcgatcaccagttgctggctcacagacgcgactgaagcgatcaccagtttggtttcaagtcaatgccatcagcggtcgtgttcacattatgtctagctagtgccagctgttagatcagcatgtaatgtatgtacagtgttttcttctctagtagcgtagcctctctgcaagggctgtttggc

SEQ ID NO: 5145 - protein, 214 aa, Zea mays subsp. mays
  peptide (1)..(214): Ceres Seq. ID no. 12409687
  misc_feature (89)..(149): Pfam Name: Fatty acid hydroxylase Pfam Description: Fatty acid hydroxylase
  misc_feature (1)..(149): Homolog of NCBI NO: 34897078 NR Description: putative fatty acid hydroxylase [Oryza sativa
  misc_feature (1)..(159): Homolog of NCBI NO: 15226828 NR Description: fatty acid hydroxylase (FAH1); protein id: supported by cDNA: gi_15215595, supported by cDNA: gi_2736146
  misc_feature (1)..(167): Homolog of NCBI NO: 15233426 NR Description: fatty acid hydroxylase - like protein; protein At4g20870.1, supported by cDNA: gi_14994242, supported by cDNA: supported by cDNA: gi_20856314 [Arabidopsis thaliana]
  misc_feature (8)..(172): Homolog of NCBI NO: 18447515 NR Description: RE63157p [Drosophila melanogaster]
  misc_feature (14)..(146): Homolog of NCBI NO: 17505701 NR Description: Fatty acid hydroxylase (36.3 kD) [Caenorhabditis
  misc_feature (14)..(146): Homolog of NCBI NO: 39589620 NR Description: Hypothetical protein CBG12227 [Caenorhabditis
  misc_feature (8)..(127): Homolog of NCBI NO: 12053843 NR Description: fatty acid hydroxylase [Homo sapiens] Fatty acid hydroxylase domain containing 1 [Homo sapiens] Fatty acid hydroxylase domain containing 1 [Homo sapiens]
  misc_feature (8)..(162): Homolog of NCBI NO: 6323928 NR Description: Required for the hydroxylation of the very long fatty acid (VLCFA), located in the endoplasmic reticulum; Scs7p
  misc_feature (8)..(167): Homolog of NCBI NO: 40746791 NR Description: hypothetical protein AN0918.2 [Aspergillus
  misc_feature (90)..(146): Homolog of NCBI NO: 20071844 NR Description: Unknown (protein for IMAGE:4983638) [Mus musculus]
MVAAAFTVDLDKPLVFQVGHLEEQYQEWVHQPIVCKEGPRFFENDILEFLTRTKWWAVPLIWLPVVCWCLSTSIKMGNTITDVAMMIGFGIFLWTLIEYVLHRFLFHIKTKSYWGNTAHYLLHGCHHKHPMDGLRLVFPPAAAAILCFPVNNLPYVLRTRVWVSTLLLLTICQISTTLMLKLLTTFVKCCILILFFLKLVEVACLYMEIVMVSS

SEQ ID NO: 5146 - protein, 139 aa, Zea mays subsp. mays
  peptide (1)..(139): Ceres Seq. ID no. 12409688
  misc_feature (14)..(74): Pfam Name: Fatty acid hydroxylase Pfam Description: Fatty acid hydroxylase
  misc_feature (1)..(74): Homolog of NCBI NO: 34897078 NR Description: putative fatty acid hydroxylase [Oryza sativa
  misc_feature (1)..(84): Homolog of NCBI NO: 15226828 NR Description: fatty acid hydroxylase (FAH1); protein id: supported by cDNA: gi_15215595, supported by cDNA: gi_2736146
  misc_feature (1)..(92): Homolog of NCBI NO: 15233426 NR Description: fatty acid hydroxylase - like protein; protein At4g20870.1, supported by cDNA: gi_14994242, supported by cDNA: supported by cDNA: gi_20856314 [Arabidopsis thaliana]
  misc_feature (1)..(97): Homolog of NCBI NO: 18447515 NR Description: RE63157p [Drosophila melanogaster]
  misc_feature (1)..(71): Homolog of NCBI NO: 17505701 NR Description: Fatty acid hydroxylase (36.3 kD) [Caenorhabditis
  misc_feature (1)..(71): Homolog of NCBI NO: 39589620 NR Description: Hypothetical protein CBG12227 [Caenorhabditis
  misc_feature (1)..(52): Homolog of NCBI NO: 12053843 NR Description: fatty acid hydroxylase [Homo sapiens] Fatty acid hydroxylase domain containing 1 [Homo sapiens] Fatty acid hydroxylase domain containing 1 [Homo sapiens]
  misc_feature (1)..(87): Homolog of NCBI NO: 6323928 NR Description: Required for the hydroxylation of the very long fatty acid (VLCFA), located in the endoplasmic reticulum; Scs7p
  misc_feature (1)..(92): Homolog of NCBI NO: 40746791 NR Description: hypothetical protein AN0918.2 [Aspergillus
  misc_feature (15)..(71): Homolog of NCBI NO: 20071844 NR Description: Unknown (protein for IMAGE:4983638) [Mus musculus]
MGNTITDVAMMIGFGIFLWTLIEYVLHRFLFHIKTKSYWGNTAHYLLHGCHHKHPMDGLRLVFPPAAAAILCFPVNNLPYVLRTRVWVSTLLLLTICQISTTLMLKLLTTFVKCCILILFFLKLVEVACLYMEIVMVSS

SEQ ID NO: 5147 - protein, 134 aa, Zea mays subsp. mays
  peptide (1)..(134): Ceres Seq. ID no. 12409689
  misc_feature (1)..(77): Pfam Name: Fatty acid hydroxylase Pfam Description: Fatty acid hydroxylase
  misc_feature (1)..(77): Homolog of NCBI NO: 34897078 NR Description: putative fatty acid hydroxylase [Oryza sativa
  misc_feature (1)..(77): Homolog of NCBI NO: 15226828 NR Description: fatty acid hydroxylase (FAH1); protein id: supported by cDNA: gi_15215595, supported by cDNA: gi_2736146
  misc_feature (1)..(77): Homolog of NCBI NO: 15233426 NR Description: fatty acid hydroxylase - like protein; protein At4g20870.1, supported by cDNA: gi_14994242, supported by cDNA: supported by cDNA: gi_20856314 [Arabidopsis thaliana]
  misc_feature (14)..(38): Homolog of NCBI NO: 18447515 NR Description: RE63157p [Drosophila melanogaster]
  misc_feature (15)..(37): Homolog of NCBI NO: 17505701 NR Description: Fatty acid hydroxylase (36.3 kD) [Caenorhabditis
  misc_feature (15)..(37): Homolog of NCBI NO: 39589620 NR Description: Hypothetical protein CBG12227 [Caenorhabditis
  misc_feature (1)..(37): Homolog of NCBI NO: 12053843 NR Description: fatty acid hydroxylase [Homo sapiens] Fatty acid hydroxylase domain containing 1 [Homo sapiens] Fatty acid hydroxylase domain containing 1 [Homo sapiens]
  misc_feature (17)..(34): Homolog of NCBI NO: 40746791 NR Description: hypothetical protein AN0918.2 [Aspergillus
  misc_feature (1)..(37): Homolog of NCBI NO: 30017399 NR Description: fatty acid hydroxylase domain containing 1 [Mus >gi|26355544|dbj|BAC41174.1| unnamed protein product [Mus
  misc_feature (15)..(36): Homolog of NCBI NO: 6323928 NR Description: Required for the hydroxylation of the very long fatty acid (VLCFA), located in the endoplasmic reticulum; Scs7p
MIKLFSTPSTTPGLFGGGLLGYVIYDCTHYYLHHGQPSSDPAKYLQEVPSQPSLQNSNKGLWNNFDPVGSCIWHAAFYENCRQEHLILTGSSALQSSYSDVRLCSHCLCPLFEASFPVPSCRFGFGSVSIFFYL

SEQ ID NO: 5148 - DNA, 1192 bp, Zea mays subsp. mays
  misc_feature (1)..(1192): Ceres Seq. ID no. 12409683
  misc_feature: MA Experiment ID: 108523 Result: Up-regulated in Transcription
  misc_feature: MA Experiment 108523 PARAMETER Experiment Name: Zm_42deg_Heat_P Parameter: Age (day) Value: 8
  misc_feature: MA Experiment 108523 PARAMETER Experiment Name: Zm_42deg_Heat_P Parameter: Organism Value: Zea mays
  misc_feature: MA Experiment 108523 PARAMETER Experiment Name: Zm_42deg_Heat_P Parameter: Plant Line Value: 35A19
  misc_feature: MA Experiment 108523 PARAMETER Experiment Name: Zm_42deg_Heat_P Parameter: Temperature (deg C) Value: 42 vs. 22
  misc_feature: MA Experiment 108523 PARAMETER Experiment Name: Zm_42deg_Heat_P Parameter: Timepoint (hr) Value: 6
  misc_feature: MA Experiment 108523 PARAMETER Experiment Name: Zm_42deg_Heat_P Parameter: Tissue Value: Aerial
  misc_feature: MA Experiment ID: 108527 Result: Up-regulated in Transcription
  misc_feature: MA Experiment 108527 PARAMETER Experiment Name: Zm_5mM_NO_P Parameter: Age (day) Value: 8
  misc_feature: MA Experiment 108527 PARAMETER Experiment Name: Zm_5mM_NO_P Parameter: Organism Value: Zea mays
  misc_feature: MA Experiment 108527 PARAMETER Experiment Name: Zm_5mM_NO_P Parameter: Plant Line Value: 35A19
  misc_feature: MA Experiment 108527 PARAMETER Experiment Name: Zm_5mM_NO_P Parameter: Timepoint (hr) Value: 6
  misc_feature: MA Experiment 108527 PARAMETER Experiment Name: Zm_5mM_NO_P Parameter: Tissue Value: Aerial
  misc_feature: MA Experiment 108527 PARAMETER Experiment Name: Zm_5mM_NO_P Parameter: Treatment Value: 5mM NO vs. No Treatment
  misc_feature: MA Experiment ID: 108559 Result: Up-regulated in Transcription
  misc_feature: MA Experiment 108559 PARAMETER Experiment Name: Zm_5mM_NO_P Parameter: Age (day) Value: 8
  misc_feature: MA Experiment 108559 PARAMETER Experiment Name: Zm_5mM_NO_P Parameter: Organism Value: Zea mays
  misc_feature: MA Experiment 108559 PARAMETER Experiment Name: Zm_5mM_NO_P Parameter: Plant Line Value: 35A19
  misc_feature: MA Experiment 108559 PARAMETER Experiment Name: Zm_5mM_NO_P Parameter: Timepoint (hr) Value: 12
  misc_feature: MA Experiment 108559 PARAMETER Experiment Name: Zm_5mM_NO_P Parameter: Tissue Value: Aerial
  misc_feature: MA Experiment 108559 PARAMETER Experiment Name: Zm_5mM_NO_P Parameter: Treatment Value: 5mM NO vs. No Treatment
  misc_feature: MA Experiment ID: 20000534 Result: Down-regulated in Transcription
  misc_feature: MA Experiment 20000534 PARAMETER Experiment Name: Zm_Hybrid_Pollen_P Parameter: Age (day) Value: 8
  misc_feature: MA Experiment 20000534 PARAMETER Experiment Name: Zm_Hybrid_Pollen_P Parameter: Organism Value: Zea mays
  misc_feature: MA Experiment 20000534 PARAMETER Experiment Name: Zm_Hybrid_Pollen_P Parameter: Plant Line Value: 35A19
  misc_feature: MA Experiment 20000534 PARAMETER Experiment Name: Zm_Hybrid_Pollen_P Parameter: Tissue Value: Pollen vs. Aerial
acaaacgaacaaggcattaatctcctccaatcctccagtgatcccgggtaaccaaatcaaatcagccctttcttttgctacggttttgtatttcatcgtgtcgcccaagaaaatcgaaggaacgcgccgccaccggccgcaacaaagcaaagcaggcctccggcctccctgaactgacttcagaagtcaccaacgcacccagcacagacagaagaccctcgccggacgctcgctctcgccggggacaactcaatcccgaggccaggatggcccgctacgatcgcgcgatcaccgtgttctcacccgacggccacctcttccaggtcgagtacgccctcgaggccgtccgcaagggcaacgccgctgtcggcgtccgcggcgtcgacaccgtcgtcctcggcgtcgagaagaagtccacccccaagctccaggactccaggtccgtgcgcaagatcgtgagcctggacacccacatcgcgctggcgtgcgcggggctcaaggccgacgcgcgcgtgctcatcaaccgcgctcgcgtggagtgccagagccaccgcctcacagtcgaggaccccgtcaccgtcgagtacatcacgcgctacatcgccggcctgcagcagaagtacacgcagagcggaggggtgcgccccttcggcctctccacgctcatcgtcggcttcgatccctacacccagaagccccgcgctgtaccagactgacccctcagggaccttctccgcttggaaggccaacgcaaccggccgcaactccaactccatgcgcgagtttctcgagaagaattacaaggagacgtccggtaaggagaccatcaagctcgccatcagagcactccttgaggttgttgagagtggtggcaagaacatagagattgcagtgatgacacacgaggacggccttcatgaactcgaagaggctgagattgatgagtatgttgccgaaattgaagcagagaaggccgctgccgaggctgcaaagaagggtgcaccaaaggggaactgactccgcacaagcttagattccgcctcttgttccagagcatgtcttatgattcacctcttagatggatgcccggatgtttggatacaggaatatttataaaaaaaattaagatgaagccgcttggatgaaaacatgctatgtgatgcatagtattgcaataccatggtggtttgtg

SEQ ID NO: 5149 - protein, 149 aa, Zea mays subsp. mays
  peptide (1)..(149): Ceres Seq. ID no. 12409684
  misc_feature (27)..(144): Pfam Name: Proteasome A-type and B-type Pfam Description: Proteasome A-type and B-type
  misc_feature (1)..(144): Homolog of NCBI NO: 7435885 NR Description: probable C 3.4.25.1 proteasome endopeptidase
  misc_feature (1)..(144): Homolog of NCBI NO: 12644044 NR Description: Proteasome subunit alpha type 7 (20S proteasome
  misc_feature (1)..(144): Homolog of NCBI NO: 12229936 NR Description: Proteasome subunit alpha type 7 (20S proteasome
  misc_feature (1)..(144): Homolog of NCBI NO: 15239271 NR Description: 20S proteasome alpha subunit D2 (PAD2); protein
  misc_feature (1)..(144): Homolog of NCBI NO: 15230435 NR Description: 20S proteasome alpha subunit D (PAD1); protein At3g51260.1, supported by cDNA: 35498., supported by cDNA: supported by cDNA: gi_15450440, supported by cDNA: gi_16974444,
  misc_feature (1)..(144): Homolog of NCBI NO: 21593040 NR Description: multicatalytic endopeptidase complex alpha chain
  misc_feature (1)..(144): Homolog of NCBI NO: 3334299 NR Description: Proteasome subunit alpha type 7 (20S proteasome
  misc_feature (1)..(144): Homolog of NCBI NO: 2511580 NR Description: multicatalytic endopeptidase [Arabidopsis >gi|2511582|emb|CAA73623.1| multicatalytic endopeptidase
  misc_feature (35)..(144): Homolog of NCBI NO: 14594917 NR Description: putative alpha4 proteasome subunit [Nicotiana
  misc_feature (2)..(145): Homolog of NCBI NO: 12229928 NR Description: Proteasome subunit alpha type 7 (Proteasome alpha 4) >gi|6683668|dbj|BAA89276.1| alpha 4 subunit of 20S
MARYDRAITVFSPDGHLFQVEYALEAVRKGNAAVGVRGVDTVVLGVEKKSTPKLQDSRSVRKIVSLDTHIALACAGLKADARVLINRARVECQSHRLTVEDPVTVEYITRYIAGLQQKYTQSGGVRPFGLSTLIVGFDPYTQKPRAVPD

SEQ ID NO: 5150 - protein, 80 aa, Zea mays subsp. mays
  peptide (1)..(80): Ceres Seq. ID no. 12409685
  misc_feature (1)..(78): Homolog of NCBI NO: 7435885 NR Description: probable C 3.4.25.1 proteasome endopeptidase
  misc_feature (1)..(78): Homolog of NCBI NO: 12644044 NR Description: Proteasome subunit alpha type 7 (20S proteasome
  misc_feature (1)..(78): Homolog of NCBI NO: 12229936 NR Description: Proteasome subunit alpha type 7 (20S proteasome
  misc_feature (1)..(78): Homolog of NCBI NO: 15239271 NR Description: 20S proteasome alpha subunit D2 (PAD2); protein
  misc_feature (1)..(78): Homolog of NCBI NO: 15230435 NR Description: 20S proteasome alpha subunit D (PAD1); protein At3g51260.1, supported by cDNA: 35498., supported by cDNA: supported by cDNA: gi_15450440, supported by cDNA: gi_16974444,
  misc_feature (1)..(78): Homolog of NCBI NO: 21593040 NR Description: multicatalytic endopeptidase complex alpha chain
  misc_feature (1)..(74): Homolog of NCBI NO: 3334299 NR Description: Proteasome subunit alpha type 7 (20S proteasome
  misc_feature (1)..(65): Homolog of NCBI NO: 2511580 NR Description: multicatalytic endopeptidase [Arabidopsis >gi|2511582|emb|CAA73623.1| multicatalytic endopeptidase
  misc_feature (1)..(78): Homolog of NCBI NO: 14594917 NR Description: putative alpha4 proteasome subunit [Nicotiana
  misc_feature (1)..(80): Homolog of NCBI NO: 12229928 NR Description: Proteasome subunit alpha type 7 (Proteasome alpha 4) >gi|6683668|dbj|BAA89276.1| alpha 4 subunit of 20S
MREFLEKNYKETSGKETIKLAIRALLEVVESGGKNIEIAVMTHEDGLHELEEAEIDEYVAEIEAEKAAAEAAKKGAPKGN

SEQ ID NO: 5151 - DNA, 1105 bp, Zea mays subsp. mays
  misc_feature (1)..(1105): Ceres Seq. ID no. 12373368
  misc_feature: MA Experiment ID: 20000535 Result: Down-regulated in Transcription
  misc_feature: MA Experiment 20000535 PARAMETER Experiment Name: Zm_Hybrid_Seed_Dev_P Parameter: DAP Value: 30 vs. 12
  misc_feature: MA Experiment 20000535 PARAMETER Experiment Name: Zm_Hybrid_Seed_Dev_P Parameter: Organism Value: Zea mays
  misc_feature: MA Experiment 20000535 PARAMETER Experiment Name: Zm_Hybrid_Seed_Dev_P Parameter: Plant Line Value: 35A19
  misc_feature: MA Experiment 20000535 PARAMETER Experiment Name: Zm_Hybrid_Seed_Dev_P Parameter: Tissue Value: Embryo vs. Unfert Floret
gcacgagaccattacctagaacatcctaatcgaaaagaatccgcatttccccttccccgcaccgcaccgcaccgcacccaacccccgtcggagagagagatggcatcggtggcggagatgcagcccctcgcgccggcggggtaccgccgcgcgccggagatgaaggagaaggtggaggcgtcggtggtggacctggaggccgggaccggggagacgctgtacccggggatctcgcgcggggagagcgccctccgatggggcttcgtccgcaaggtctacggcatcctcgctgcgcagctgctcctcaccaccgccgtctccgccctcaccgttctccaccccaccctcaacgccacgctctccgactccccgggcctcgcgctcgtgctcgccgtcctgcccttcatcctgatgatcccattgtaccattatcagcacaagcacccacacaatttcgttttcctgggtctgttcacgttgtgcttgagcttcagcatcggcgtggcttgtgctaacacccaaggaaaaatcgttctggaggctttagtgctgacggctggcgtggtggtttctctgactgcgtatgctttctgggcgtcaaagaagggcaaggaatttgggtacctggggcctatcctgtcttccgcgcttactatcctcgtcctaactagctttcttcaggttttcttcccactgggacccgtgtcggtgggcttgttcggtggtctaggggctctggtcttctcaggcttcatcctgtacgacaccgagaacctgatcaagcgccacacctacgacgagtacatctgggcgtcggttgggctgtacctcgacatcctgaacctgttcctctccatcctgaacatgctcaggagcatgcaatccgacaactagcctcttgatcgaacacggtatacccccatggtaaatgcggtcctgtgctctggttgttagaggacgggatcgacgtgcgacatatgtattgtgtgagcccactcgtgtcaacactgcaaacaattgtggtcatgtcaccttgtatgttcttggtcacttttcaaacaattgtaagtacctcatatcgttttgcgctcgtgctattcgcgcc

SEQ ID NO: 5152 - protein, 297 aa, Zea mays subsp. mays
  peptide (1)..(297): Ceres Seq. ID no. 12373369
  misc_feature (81)..(291): Pfam Name: Uncharacterised protein family UPF0005 Pfam Description: Uncharacterised protein family UPF0005
  misc_feature (63)..(297): Homolog of NCBI NO: 18414455 NR Description: Expressed protein; protein id: At4g15470.1, by cDNA: gi_15215826, supported by cDNA: gi_15810200, supported cDNA: gi_20453266 [Arabidopsis thaliana]
  misc_feature (63)..(255): Homolog of NCBI NO: 15810201 NR Description: AT4g15470/dl3775w [Arabidopsis thaliana]
  misc_feature (64)..(292): Homolog of NCBI NO: 34393841 NR Description: putative z-protein [Oryza sativa (japonica
  misc_feature (64)..(295): Homolog of NCBI NO: 15229411 NR Description: putative protein; protein id: At3g63310.1
  misc_feature (64)..(294): Homolog of NCBI NO: 15218701 NR Description: putative glutamate/aspartate-binding peptide;
  misc_feature (64)..(294): Homolog of NCBI NO: 15235466 NR Description: putative glutamate-/aspartate-binding peptide; id: At4g02690.1 [Arabidopsis thaliana] >gi|7486855|pir||T01080
  misc_feature (73)..(295): Homolog of NCBI NO: 14626300 NR Description: putative receptor-associated protein [Oryza
  misc_feature (63)..(138): Homolog of NCBI NO: 7485070 NR Description: hypothetical protein - Arabidopsis thaliana hypothetical protein [Arabidopsis thaliana]
  misc_feature (175)..(246): Homolog of NCBI NO: 7485070 NR Description: hypothetical protein - Arabidopsis thaliana hypothetical protein [Arabidopsis thaliana]
  misc_feature (135)..(175): Homolog of NCBI NO: 7485070 NR Description: hypothetical protein - Arabidopsis thaliana hypothetical protein [Arabidopsis thaliana]
ARDHYLEHPNRKESAFPLPRTAPHRTQPPSEREMASVAEMQPLAPAGYRRAPEMKEKVEASVVDLEAGTGETLYPGISRGESALRWGFVRKVYGILAAQLLLTTAVSALTVLHPTLNATLSDSPGLALVLAVLPFILMIPLYHYQHKHPHNFVFLGLFTLCLSFSIGVACANTQGKIVLEALVLTAGVVVSLTAYAFWASKKGKEFGYLGPILSSALTILVLTSFLQVFFPLGPVSVGLFGGLGALVFSGFILYDTENLIKRHTYDEYIWASVGLYLDILNLFLSILNMLRSMQSDN

SEQ ID NO: 5153 - protein, 264 aa, Zea mays subsp. mays
  peptide (1)..(264): Ceres Seq. ID no. 12373370
  misc_feature (48)..(258): Pfam Name: Uncharacterised protein family UPF0005 Pfam Description: Uncharacterised protein family UPF0005
  misc_feature (30)..(264): Homolog of NCBI NO: 18414455 NR Description: Expressed protein; protein id: At4g15470.1, by cDNA: gi_15215826, supported by cDNA: gi_15810200, supported cDNA: gi_20453266 [Arabidopsis thaliana]
  misc_feature (30)..(222): Homolog of NCBI NO: 15810201 NR Description: AT4g15470/dl3775w [Arabidopsis thaliana]
  misc_feature (31)..(259): Homolog of NCBI NO: 34393841 NR Description: putative z-protein [Oryza sativa (japonica
  misc_feature (31)..(262): Homolog of NCBI NO: 15229411 NR Description: putative protein; protein id: At3g63310.1
  misc_feature (31)..(261): Homolog of NCBI NO: 15218701 NR Description: putative glutamate/aspartate-binding peptide;
  misc_feature (31)..(261): Homolog of NCBI NO: 15235466 NR Description: putative glutamate-/aspartate-binding peptide; id: At4g02690.1 [Arabidopsis thaliana] >gi|7486855|pir||T01080
  misc_feature (40)..(262): Homolog of NCBI NO: 14626300 NR Description: putative receptor-associated protein [Oryza
  misc_feature (30)..(105): Homolog of NCBI NO: 7485070 NR Description: hypothetical protein - Arabidopsis thaliana hypothetical protein [Arabidopsis thaliana]
  misc_feature (142)..(213): Homolog of NCBI NO: 7485070 NR Description: hypothetical protein - Arabidopsis thaliana hypothetical protein [Arabidopsis thaliana]
  misc_feature (102)..(142): Homolog of NCBI NO: 7485070 NR Description: hypothetical protein - Arabidopsis thaliana hypothetical protein [Arabidopsis thaliana]
MASVAEMQPLAPAGYRRAPEMKEKVEASVVDLEAGTGETLYPGISRGESALRWGFVRKVYGILAAQLLLTTAVSALTVLHPTLNATLSDSPGLALVLAVLPFILMIPLYHYQHKHPHNFVFLGLFTLCLSFSIGVACANTQGKIVLEALVLTAGVVVSLTAYAFWASKKGKEFGYLGPILSSALTILVLTSFLQVFFPLGPVSVGLFGGLGALVFSGFILYDTENLIKRHTYDEYIWASVGLYLDILNLFLSILNMLRSMQSDN

SEQ ID NO: 5154 - protein, 258 aa, Zea mays subsp. mays
  peptide (1)..(258): Ceres Seq. ID no. 12373371
  misc_feature (42)..(252): Pfam Name: Uncharacterised protein family UPF0005 Pfam Description: Uncharacterised protein family UPF0005
  misc_feature (24)..(258): Homolog of NCBI NO: 18414455 NR Description: Expressed protein; protein id: At4g15470.1, by cDNA: gi_15215826, supported by cDNA: gi_15810200, supported cDNA: gi_20453266 [Arabidopsis thaliana]
  misc_feature (24)..(216): Homolog of NCBI NO: 15810201 NR Description: AT4g15470/dl3775w [Arabidopsis thaliana]
  misc_feature (25)..(253): Homolog of NCBI NO: 34393841 NR Description: putative z-protein [Oryza sativa (japonica
  misc_feature (25)..(256): Homolog of NCBI NO: 15229411 NR Description: putative protein; protein id: At3g63310.1
  misc_feature (25)..(255): Homolog of NCBI NO: 15218701 NR Description: putative glutamate/aspartate-binding peptide;
  misc_feature (25)..(255): Homolog of NCBI NO: 15235466 NR Description: putative glutamate-/aspartate-binding peptide; id: At4g02690.1 [Arabidopsis thaliana] >gi|7486855|pir||T01080
  misc_feature (34)..(256): Homolog of NCBI NO: 14626300 NR Description: putative receptor-associated protein [Oryza
  misc_feature (24)..(99): Homolog of NCBI NO: 7485070 NR Description: hypothetical protein - Arabidopsis thaliana hypothetical protein [Arabidopsis thaliana]
  misc_feature (136)..(207): Homolog of NCBI NO: 7485070 NR Description: hypothetical protein - Arabidopsis thaliana hypothetical protein [Arabidopsis thaliana]
  misc_feature (96)..(136): Homolog of NCBI NO: 7485070 NR Description: hypothetical protein - Arabidopsis thaliana hypothetical protein [Arabidopsis thaliana]
MQPLAPAGYRRAPEMKEKVEASVVDLEAGTGETLYPGISRGESALRWGFVRKVYGILAAQLLLTTAVSALTVLHPTLNATLSDSPGLALVLAVLPFILMIPLYHYQHKHPHNFVFLGLFTLCLSFSIGVACANTQGKIVLEALVLTAGVVVSLTAYAFWASKKGKEFGYLGPILSSALTILVLTSFLQVFFPLGPVSVGLFGGLGALVFSGFILYDTENLIKRHTYDEYIWASVGLYLDILNLFLSILNMLRSMQSDN

SEQ ID NO: 5155 - DNA, 1536 bp, Zea mays subsp. mays
  misc_feature (1)..(1536): Ceres Seq. ID no. 12409679
  misc_feature: MA Experiment ID: 20000479 Result: Up-regulated in Transcription
  misc_feature: MA Experiment 20000479 PARAMETER Experiment Name: Zm_Drought_P Parameter: Age (day) Value: 10
  misc_feature: MA Experiment 20000479 PARAMETER Experiment Name: Zm_Drought_P Parameter: Organism Value: Zea mays
  misc_feature: MA Experiment 20000479 PARAMETER Experiment Name: Zm_Drought_P Parameter: Plant Line Value: 35A19
  misc_feature: MA Experiment 20000479 PARAMETER Experiment Name: Zm_Drought_P Parameter: Timepoint (hr) Value: 48
  misc_feature: MA Experiment 20000479 PARAMETER Experiment Name: Zm_Drought_P Parameter: Tissue Value: Aerial
  misc_feature: MA Experiment 20000479 PARAMETER Experiment Name: Zm_Drought_P Parameter: Treatment Value: Drought vs. No Drought
  misc_feature: MA Experiment ID: 20000535 Result: Up-regulated in Transcription
  misc_feature: MA Experiment 20000535 PARAMETER Experiment Name: Zm_Hybrid_Seed_Dev_P Parameter: DAP Value: 30 vs. 12
  misc_feature: MA Experiment 20000535 PARAMETER Experiment Name: Zm_Hybrid_Seed_Dev_P Parameter: Organism Value: Zea mays
  misc_feature: MA Experiment 20000535 PARAMETER Experiment Name: Zm_Hybrid_Seed_Dev_P Parameter: Plant Line Value: 35A19
  misc_feature: MA Experiment 20000535 PARAMETER Experiment Name: Zm_Hybrid_Seed_Dev_P Parameter: Tissue Value: Embryo vs. Unfert Floret
atggtggcaagtgagcagcaaacacacagctagactccgcgagaaccgtcaatgggttctataggaggacccacagccacagccaccgccgaccggcgccgccgcgtgctgttcttcccgctcccgtaccagggccatatcaaccccatgttccaactcgccggcctcctccacttgcgcggtttctccgtcaccgtcttccacaccgacttcaacgctcccgacaagtcccgccaccctgcctacgacttcgtccccgttcccgtccgcggctgcttgccgaagggcagctcggatgccttgcaggtgaccgtggagcgcatcctcgccgtgaaccgcgcctgcgaggctccgttccgggagcgcctggccgctctgctggcgcgggaggacgtcgcgtgcctggtcgctgacgcccacctgctgacgctgctggacgtggcgcgggggctcggcgtgccgacgctggtgctgcgcaccggcagcgcggcgtgcctccgcatgttcgcggcgttccccgcgctctgcgacaaggggtatcagccggcgcaagagtcgcagctggaggcgccggtgactgagctgccgccgtaccgcgtccgggacctgccgtccaccaccagcgcctgccacggcgtaataagcgaggtgatttcccgtttagtgacggccgtgacgacctcctcgggtctcatcctcaacaccatggacgctctcgagtgcggcgagctggcgtcgctccggcgagacctcggcgtccccgtgttcgacatcggcccgctccacatgctctctccggcggcctcgagcagcttgctactgcaagaccgcggctgcctcgagtggctcgacgcgcaagccccggcgtccgtgctctacgtcagcttcggcagcctcgccagcatgtccgccgccgagctggtggaaacagcctggggcatagccaacagcggctatcccttcctgtgggttctccggccgggcctcgtccgcggctcgcagacgtcggaggcggcgccacccctgcccgacggcttcgacgccgcgacgcgcgggcggggcatggtcgtgagctgggcggccgcaggaggaggtcctggcgcaccctgccgtgggcgcgttctggacgcactgtggctggaactcgacgctagagagcttgtgcgcgggcgtgccggtcattgcccgcccgtgcttcggcgaccagatggggaacgcgaggtacgtggaccacgtgtggcggaccggcctcacgctcgacggcgtgctcgagaggggcgaggtggaggcggccgtcgcggcgttgatggcgcctggagagcccggcgacggactgcgtcggagggcgcgggagctcaagagcagcgcggcggagtgcatggccaaggatgggtcgtcctgcacgaatgtcgacaagctggtagaccacattctgacactgtaggcgtttggtacaggagcagccacgtggtgctgttcttgggtactgtttttctttgcggttgaaaaataaataaataaaacccgatggagctt

SEQ ID NO: 5156 - protein, 484 aa, Zea mays subsp. mays
  peptide (1)..(484): Ceres Seq. ID no. 12409680
  misc_feature (17)..(440): Pfam Name: UDP-glucoronosyl and UDP-glucosyl transferase Pfam Description: UDP-glucoronosyl and UDP-glucosyl transferase
  misc_feature (3)..(440): Homolog of NCBI NO: 34900662 NR Description: glucuronosyl transferase-like protein [Oryza
  misc_feature (1)..(436): Homolog of NCBI NO: 34897378 NR Description: putative UDP-glucosyltransferase [Oryza sativa
  misc_feature (15)..(343): Homolog of NCBI NO: 33146633 NR Description: putative UDP-glucosyltransferase [Oryza sativa
  misc_feature (16)..(343): Homolog of NCBI NO: 34900682 NR Description: glucuronosyl transferase-like protein [Oryza
  misc_feature (15)..(343): Homolog of NCBI NO: 34900678 NR Description: glucuronosyl transferase-like protein [Oryza
  misc_feature (18)..(343): Homolog of NCBI NO: 18033228 NR Description: UDP-glucosyltransferase BX8 [Zea mays]
  misc_feature (17)..(343): Homolog of NCBI NO: 33146634 NR Description: putative UDP-glucosyltransferase [Oryza sativa
  misc_feature (18)..(343): Homolog of NCBI NO: 18033230 NR Description: UDP-glucosyltransferase BX9 [Zea mays]
  misc_feature (17)..(343): Homolog of NCBI NO: 15228174 NR Description: glucuronosyl transferase - like protein; protein
  misc_feature (44)..(343): Homolog of NCBI NO: 34395172 NR Description: putative UDP-glucosyltransferase [Oryza sativa
MGSIGGPTATATADRRRRVLFFPLPYQGHINPMFQLAGLLHLRGFSVTVFHTDFNAPDKSRHPAYDFVPVPVRGCLPKGSSDALQVTVERILAVNRACEAPFRERLAALLAREDVACLVADAHLLTLLDVARGLGVPTLVLRTGSAACLRMFAAFPALCDKGYQPAQESQLEAPVTELPPYRVRDLPSTTSACHGVISEVISRLVTAVTTSSGLILNTMDALECGELASLRRDLGVPVFDIGPLHMLSPAASSSLLLQDRGCLEWLDAQAPASVLYVSFGSLASMSAAELVETAWGIANSGYPFLWVLRPGLVRGSQTSEAAPPLPDGFDAATRGRGMVVSWAAAGGGPGAPCRGRVLDALWLELDARELVRGRAGHCPPVLRRPDGEREVRGPRVADRPHARRRAREGRGGGGRRGVDGAWRARRRTASEGAGAQEQRGGVHGQGWVVLHECRQAGRPHSDTVGVWYRSSHVVLFLGTVFLCG

SEQ ID NO: 5157 - protein, 452 aa, Zea mays subsp. mays
  peptide (1)..(452): Ceres Seq. ID no. 12409681
  misc_feature (1)..(408): Pfam Name: UDP-glucoronosyl and UDP-glucosyl transferase Pfam Description: UDP-glucoronosyl and UDP-glucosyl transferase
  misc_feature (1)..(408): Homolog of NCBI NO: 34900662 NR Description: glucuronosyl transferase-like protein [Oryza
  misc_feature (1)..(404): Homolog of NCBI NO: 34897378 NR Description: putative UDP-glucosyltransferase [Oryza sativa
  misc_feature (1)..(311): Homolog of NCBI NO: 33146633 NR Description: putative UDP-glucosyltransferase [Oryza sativa
  misc_feature (1)..(311): Homolog of NCBI NO: 34900682 NR Description: glucuronosyl transferase-like protein [Oryza
  misc_feature (1)..(311): Homolog of NCBI NO: 34900678 NR Description: glucuronosyl transferase-like protein [Oryza
  misc_feature (1)..(311): Homolog of NCBI NO: 18033228 NR Description: UDP-glucosyltransferase BX8 [Zea mays]
  misc_feature (1)..(311): Homolog of NCBI NO: 33146634 NR Description: putative UDP-glucosyltransferase [Oryza sativa
  misc_feature (1)..(311): Homolog of NCBI NO: 18033230 NR Description: UDP-glucosyltransferase BX9 [Zea mays]
  misc_feature (1)..(311): Homolog of NCBI NO: 15228174 NR Description: glucuronosyl transferase - like protein; protein
  misc_feature (12)..(311): Homolog of NCBI NO: 34395172 NR Description: putative UDP-glucosyltransferase [Oryza sativa
MFQLAGLLHLRGFSVTVFHTDFNAPDKSRHPAYDFVPVPVRGCLPKGSSDALQVTVERILAVNRACEAPFRERLAALLAREDVACLVADAHLLTLLDVARGLGVPTLVLRTGSAACLRMFAAFPALCDKGYQPAQESQLEAPVTELPPYRVRDLPSTTSACHGVISEVISRLVTAVTTSSGLILNTMDALECGELASLRRDLGVPVFDIGPLHMLSPAASSSLLLQDRGCLEWLDAQAPASVLYVSFGSLASMSAAELVETAWGIANSGYPFLWVLRPGLVRGSQTSEAAPPLPDGFDAATRGRGMVVSWAAAGGGPGAPCRGRVLDALWLELDARELVRGRAGHCPPVLRRPDGEREVRGPRVADRPHARRRAREGRGGGGRRGVDGAWRARRRTASEGAGAQEQRGGVHGQGWVVLHECRQAGRPHSDTVGVWYRSSHVVLFLGTVFLCG

SEQ ID NO: 5158 - protein, 334 aa, Zea mays subsp. mays
  peptide (1)..(334): Ceres Seq. ID no. 12409682
  misc_feature (1)..(290): Pfam Name: UDP-glucoronosyl and UDP-glucosyl transferase Pfam Description: UDP-glucoronosyl and UDP-glucosyl transferase
  misc_feature (1)..(290): Homolog of NCBI NO: 34900662 NR Description: glucuronosyl transferase-like protein [Oryza
  misc_feature (1)..(286): Homolog of NCBI NO: 34897378 NR Description: putative UDP-glucosyltransferase [Oryza sativa
  misc_feature (1)..(193): Homolog of NCBI NO: 33146633 NR Description: putative UDP-glucosyltransferase [Oryza sativa
  misc_feature (1)..(193): Homolog of NCBI NO: 34900682 NR Description: glucuronosyl transferase-like protein [Oryza
  misc_feature (1)..(193): Homolog of NCBI NO: 34900678 NR Description: glucuronosyl transferase-like protein [Oryza
  misc_feature (1)..(193): Homolog of NCBI NO: 18033228 NR Description: UDP-glucosyltransferase BX8 [Zea mays]
  misc_feature (1)..(193): Homolog of NCBI NO: 33146634 NR Description: putative UDP-glucosyltransferase [Oryza sativa
  misc_feature (1)..(193): Homolog of NCBI NO: 18033230 NR Description: UDP-glucosyltransferase BX9 [Zea mays]
  misc_feature (1)..(193): Homolog of NCBI NO: 15228174 NR Description: glucuronosyl transferase - like protein; protein
  misc_feature (1)..(193): Homolog of NCBI NO: 34395172 NR Description: putative UDP-glucosyltransferase [Oryza sativa
MFAAFPALCDKGYQPAQESQLEAPVTELPPYRVRDLPSTTSACHGVISEVISRLVTAVTTSSGLILNTMDALECGELASLRRDLGVPVFDIGPLHMLSPAASSSLLLQDRGCLEWLDAQAPASVLYVSFGSLASMSAAELVETAWGIANSGYPFLWVLRPGLVRGSQTSEAAPPLPDGFDAATRGRGMVVSWAAAGGGPGAPCRGRVLDALWLELDARELVRGRAGHCPPVLRRPDGEREVRGPRVADRPHARRRAREGRGGGGRRGVDGAWRARRRTASEGAGAQEQRGGVHGQGWVVLHECRQAGRPHSDTVGVWYRSSHVVLFLGTVFLCG

SEQ ID NO: 5159 - DNA, 1517 bp, Zea mays subsp. mays
  misc_feature (1)..(1517): Ceres Seq. ID no. 12414097
  misc_feature: MA Experiment ID: 108527 Result: Down-regulated in Transcription
  misc_feature: MA Experiment 108527 PARAMETER Experiment Name: Zm_5mM_NO_P Parameter: Age (day) Value: 8
  misc_feature: MA Experiment 108527 PARAMETER Experiment Name: Zm_5mM_NO_P Parameter: Organism Value: Zea mays
  misc_feature: MA Experiment 108527 PARAMETER Experiment Name: Zm_5mM_NO_P Parameter: Plant Line Value: 35A19
  misc_feature: MA Experiment 108527 PARAMETER Experiment Name: Zm_5mM_NO_P Parameter: Timepoint (hr) Value: 6
  misc_feature: MA Experiment 108527 PARAMETER Experiment Name: Zm_5mM_NO_P Parameter: Tissue Value: Aerial
  misc_feature: MA Experiment 108527 PARAMETER Experiment Name: Zm_5mM_NO_P Parameter: Treatment Value: 5mM NO vs. No Treatment
  misc_feature: MA Experiment ID: 108528 Result: Up-regulated in Transcription
  misc_feature: MA Experiment 108528 PARAMETER Experiment Name: Zm_Imbibed_Seeds_P Parameter: Age (day) Value: 5 vs. 2
  misc_feature: MA Experiment 108528 PARAMETER Experiment Name: Zm_Imbibed_Seeds_P Parameter: Organism Value: Zea mays
  misc_feature: MA Experiment 108528 PARAMETER Experiment Name: Zm_Imbibed_Seeds_P Parameter: Plant Line Value: 35A19
  misc_feature: MA Experiment 108528 PARAMETER Experiment Name: Zm_Imbibed_Seeds_P Parameter: Tissue Value: Aerial vs. Embryo
  misc_feature: MA Experiment ID: 108530 Result: Up-regulated in Transcription
  misc_feature: MA Experiment 108530 PARAMETER Experiment Name: Zm_Imbibed_Seeds_P Parameter: Age (day) Value: 6 vs. 2
  misc_feature: MA Experiment 108530 PARAMETER Experiment Name: Zm_Imbibed_Seeds_P Parameter: Organism Value: Zea mays
  misc_feature: MA Experiment 108530 PARAMETER Experiment Name: Zm_Imbibed_Seeds_P Parameter: Plant Line Value: 35A19
  misc_feature: MA Experiment 108530 PARAMETER Experiment Name: Zm_Imbibed_Seeds_P Parameter: Tissue Value: Aerial vs. Embryo
  misc_feature: MA Experiment ID: 108536 Result: Down-regulated in Transcription
  misc_feature: MA Experiment 108536 PARAMETER Experiment Name: Zm_Meristem_P Parameter: Age (day) Value: 8
  misc_feature: MA Experiment 108536 PARAMETER Experiment Name: Zm_Meristem_P Parameter: Organism Value: Zea mays
  misc_feature: MA Experiment 108536 PARAMETER Experiment Name: Zm_Meristem_P Parameter: Plant Line Value: 35A19
  misc_feature: MA Experiment 108536 PARAMETER Experiment Name: Zm_Meristem_P Parameter: Tissue Value: Shoot Meristem vs. Above Shoot Meristem
  misc_feature: MA Experiment ID: 108543 Result: Up-regulated in Transcription
  misc_feature: MA Experiment ID: 108545 Result: Up-regulated in Transcription
  misc_feature: MA Experiment 108545 PARAMETER Experiment Name: Zm_Imbibed_Seeds_P Parameter: Age (day) Value: 3 vs. 2
  misc_feature: MA Experiment 108545 PARAMETER Experiment Name: Zm_Imbibed_Seeds_P Parameter: Organism Value: Zea mays
  misc_feature: MA Experiment 108545 PARAMETER Experiment Name: Zm_Imbibed_Seeds_P Parameter: Plant Line Value: 35A19
  misc_feature: MA Experiment 108545 PARAMETER Experiment Name: Zm_Imbibed_Seeds_P Parameter: Tissue Value: Aerial vs. Embryo
  misc_feature: MA Experiment ID: 108546 Result: Down-regulated in Transcription
  misc_feature: MA Experiment 108546 PARAMETER Experiment Name: Zm_Imbibed_Seeds_P Parameter: Age (day) Value: 3 vs. 2
  misc_feature: MA Experiment 108546 PARAMETER Experiment Name: Zm_Imbibed_Seeds_P Parameter: Organism Value: Zea mays
  misc_feature: MA Experiment 108546 PARAMETER Experiment Name: Zm_Imbibed_Seeds_P Parameter: Plant Line Value: 35A19
  misc_feature: MA Experiment 108546 PARAMETER Experiment Name: Zm_Imbibed_Seeds_P Parameter: Tissue Value: Roots vs. Embryo
  misc_feature: MA Experiment ID: 108547 Result: Up-regulated in Transcription
  misc_feature: MA Experiment 108547 PARAMETER Experiment Name: Zm_Imbibed_Seeds_P Parameter: Age (day) Value: 4 vs. 2
  misc_feature: MA Experiment 108547 PARAMETER Experiment Name: Zm_Imbibed_Seeds_P Parameter: Organism Value: Zea mays
  misc_feature: MA Experiment 108547 PARAMETER Experiment Name: Zm_Imbibed_Seeds_P Parameter: Plant Line Value: 35A19
  misc_feature: MA Experiment 108547 PARAMETER Experiment Name: Zm_Imbibed_Seeds_P Parameter: Tissue Value: Aerial vs. Embryo
  misc_feature: MA Experiment ID: 108559 Result: Down-regulated in Transcription
  misc_feature: MA Experiment 108559 PARAMETER Experiment Name: Zm_5mM_NO_P Parameter: Age (day) Value: 8
  misc_feature: MA Experiment 108559 PARAMETER Experiment Name: Zm_5mM_NO_P Parameter: Organism Value: Zea mays
  misc_feature: MA Experiment 108559 PARAMETER Experiment Name: Zm_5mM_NO_P Parameter: Plant Line Value: 35A19
  misc_feature: MA Experiment 108559 PARAMETER Experiment Name: Zm_5mM_NO_P Parameter: Timepoint (hr) Value: 12
  misc_feature: MA Experiment 108559 PARAMETER Experiment Name: Zm_5mM_NO_P Parameter: Tissue Value: Aerial
  misc_feature: MA Experiment 108559 PARAMETER Experiment Name: Zm_5mM_NO_P Parameter: Treatment Value: 5mM NO vs. No Treatment
  misc_feature: MA Experiment ID: 108688 Result: Down-regulated in Transcription
  misc_feature: MA Experiment 108688 PARAMETER Experiment Name: Zm_Embryos-Flowers__P Parameter: Tissue Value: Immature Flowers vs. Aerial+
  misc_feature: MA Experiment ID: 108689 Result: Up-regulated in Transcription
  misc_feature: MA Experiment 108689 PARAMETER Experiment Name: Zm_Drought_Roots_P Parameter: Age (day) Value: 9
  misc_feature: MA Experiment 108689 PARAMETER Experiment Name: Zm_Drought_Roots_P Parameter: Organism Value: Zea mays
  misc_feature: MA Experiment 108689 PARAMETER Experiment Name: Zm_Drought_Roots_P Parameter: Plant Line Value: 35A19
  misc_feature: MA Experiment 108689 PARAMETER Experiment Name: Zm_Drought_Roots_P Parameter: Timepoint (hr) Value: 24
  misc_feature: MA Experiment 108689 PARAMETER Experiment Name: Zm_Drought_Roots_P Parameter: Tissue Value: Roots
  misc_feature: MA Experiment 108689 PARAMETER Experiment Name: Zm_Drought_Roots_P Parameter: Treatment Value: Drought vs. No Drought
  misc_feature: MA Experiment ID: 20000534 Result: Down-regulated in Transcription
  misc_feature: MA Experiment 20000534 PARAMETER Experiment Name: Zm_Hybrid_Pollen_P Parameter: Age (day) Value: 8
  misc_feature: MA Experiment 20000534 PARAMETER Experiment Name: Zm_Hybrid_Pollen_P Parameter: Organism Value: Zea mays
  misc_feature: MA Experiment 20000534 PARAMETER Experiment Name: Zm_Hybrid_Pollen_P Parameter: Plant Line Value: 35A19
  misc_feature: MA Experiment 20000534 PARAMETER Experiment Name: Zm_Hybrid_Pollen_P Parameter: Tissue Value: Pollen vs. Aerial
aacacacaaacccacaccaattgatgtgaaacccacacaatcccatcgtcacgacgccaagatcgtgtgcgagtgcgactgtgcgcacgtctccgtctcgcttgttttaagcacggcaagggaagaggacgacgacgggtggacgcttggacaaacagccttgtcgtgtactctctctttctctcctcccacagttccgctcgattcgaagagtccagcgccacacgacatcctccgcgcggccggccatgggggaagctgcggatccagcgacggggagggtgtcaccgccgatgtcgtggcgtacgcggctctccgtgctcgccgcggggtacctcaccgacgccacgcgccgcgccgacggcacagtcaaccgccgcctgctcggcatgctcgacaagggcgtggcggcgtccgcggtcccgcgcaacggcgtcgcctcgcgggacgtgaccatcgacccggccgtgcccctccgcgcgcgcctcttctacccctgcgctcccgccgccgccgaggacgacgacgcgggggcggagcgtccggcggtgcccgtcgtcgtgttcttccacggcggcggcttcgcgtacctctccgcggcatcccccgcctacgacgctgcgtgccgccgcatcgccaggtacgccggcgcggcggtgctgtccgtcgactaccgccgctcgcccgagcaccggttccccgccgcctacgacgacggcttcgcggccctccgcttcctcgacggcgggcccgaccccgaccccggcgcgatcgcgggcgccccgccgatcgacgccgcgcgctgcttcctcgcgggggacagcgctggcggtaacatcgcgcaccacgtcgcccgccgctacgcgctggacccttccgccttcgcgaacctccgcctcgccggcctcatcgccatccagcccttcttcggcggccaggagcgcacgcccgccgagctgcggctcgtcggcgcgcccatcgtctccgttccgcgcaccgactggatgtggcgcgcgttccttccccacggcgcggaccgcacccacgaggcgtcatcccccgacgtcgccaccgcgggcatcgacggcgcccctgatttcccgcctgccacggtcgtcatcggcgggtacgacccgctgcaggactggcagcgccggtactgcgacgcgttgcgcggtaaggggaaggaggtgcgggtgctcgagtaccccgacgccatccacgccttctacgtgttcccggagttcgcggagtccaaggacctcatgctacggatcaaggagatcgtcgccagcagcgagtgatgggggacggacggcgtgggcgcgcgcagctgtcgctcagatgcgtggtggatgtatctgcgactgtgctaagtggctagggtcagtgttgtggttgtggactggacggtgctgtctagtgtgtgacgtggttcgtcgtgtgggacgcgccacaattaaactagtgttaaataatgatgcgatcggcaatgataattctaattttcgtgtttg

SEQ ID NO: 5160 - protein, 351 aa, Zea mays subsp. mays
  peptide (1)..(351): Ceres Seq. ID no. 12414098
  misc_feature (94)..(146): Pfam Name: Carboxylesterase Pfam Description: Carboxylesterase
  misc_feature (3)..(344): Homolog of NCBI NO: 34904770 NR Description: similar to carboxylesterase [Oryza sativa
  misc_feature (14)..(350): Homolog of NCBI NO: 34393714 NR Description: putative esterase [Oryza sativa (japonica
  misc_feature (14)..(350): Homolog of NCBI NO: 34904774 NR Description: similar to carboxylesterase [Oryza sativa
  misc_feature (14)..(347): Homolog of NCBI NO: 34904760 NR Description: similar to carboxylesterase [Oryza sativa
  misc_feature (5)..(347): Homolog of NCBI NO: 34904758 NR Description: hypothetical protein~predicted by GeneMark.hmm
  misc_feature (19)..(347): Homolog of NCBI NO: 15237783 NR Description: putative protein; protein id: At5g23530.1, by cDNA: 9482. [Arabidopsis thaliana] >gi|8809707|dbj|BAA97248.1| similarity to unknown protein~gb|AAF27018.1~gene_id:MQM1.21
  misc_feature (19)..(347): Homolog of NCBI NO: 21618039 NR Description: unknown [Arabidopsis thaliana]
  misc_feature (11)..(333): Homolog of NCBI NO: 34904772 NR Description: similar to carboxylesterase [Oryza sativa
  misc_feature (12)..(331): Homolog of NCBI NO: 15240483 NR Description: putative protein; protein id: At5g27320.1, by cDNA: gi_15451145 [Arabidopsis thaliana] Unknown protein [Arabidopsis thaliana]
  misc_feature (12)..(347): Homolog of NCBI NO: 15229905 NR Description: unknown protein; protein id: At3g05120.1 thaliana] >gi|6729022|gb|AAF27018.1|AC009177_8 unknown protein thaliana] >gi|22530934|gb|AAM96971.1| unknown protein
MGEAADPATGRVSPPMSWRTRLSVLAAGYLTDATRRADGTVNRRLLGMLDKGVAASAVPRNGVASRDVTIDPAVPLRARLFYPCAPAAAEDDDAGAERPAVPVVVFFHGGGFAYLSAASPAYDAACRRIARYAGAAVLSVDYRRSPEHRFPAAYDDGFAALRFLDGGPDPDPGAIAGAPPIDAARCFLAGDSAGGNIAHHVARRYALDPSAFANLRLAGLIAIQPFFGGQERTPAELRLVGAPIVSVPRTDWMWRAFLPHGADRTHEASSPDVATAGIDGAPDFPPATVVIGGYDPLQDWQRRYCDALRGKGKEVRVLEYPDAIHAFYVFPEFAESKDLMLRIKEIVASSE

SEQ ID NO: 5161 - protein, 336 aa, Zea mays subsp. mays
  peptide (1)..(336): Ceres Seq. ID no. 12414099
  misc_feature (79)..(131): Pfam Name: Carboxylesterase Pfam Description: Carboxylesterase
  misc_feature (1)..(329): Homolog of NCBI NO: 34904770 NR Description: similar to carboxylesterase [Oryza sativa
  misc_feature (1)..(335): Homolog of NCBI NO: 34393714 NR Description: putative esterase [Oryza sativa (japonica
  misc_feature (1)..(335): Homolog of NCBI NO: 34904774 NR Description: similar to carboxylesterase [Oryza sativa
  misc_feature (1)..(332): Homolog of NCBI NO: 34904760 NR Description: similar to carboxylesterase [Oryza sativa
  misc_feature (1)..(332): Homolog of NCBI NO: 34904758 NR Description: hypothetical protein~predicted by GeneMark.hmm
  misc_feature (4)..(332): Homolog of NCBI NO: 15237783 NR Description: putative protein; protein id: At5g23530.1, by cDNA: 9482. [Arabidopsis thaliana] >gi|8809707|dbj|BAA97248.1| similarity to unknown protein~gb|AAF27018.1~gene_id:MQM1.21
  misc_feature (4)..(332): Homolog of NCBI NO: 21618039 NR Description: unknown [Arabidopsis thaliana]
  misc_feature (1)..(318): Homolog of NCBI NO: 34904772 NR Description: similar to carboxylesterase [Oryza sativa
  misc_feature (1)..(316): Homolog of NCBI NO: 15240483 NR Description: putative protein; protein id: At5g27320.1, by cDNA: gi_15451145 [Arabidopsis thaliana] Unknown protein [Arabidopsis thaliana]
  misc_feature (1)..(332): Homolog of NCBI NO: 15229905 NR Description: unknown protein; protein id: At3g05120.1 thaliana] >gi|6729022|gb|AAF27018.1|AC009177_8 unknown protein thaliana] >gi|22530934|gb|AAM96971.1| unknown protein
MSWRTRLSVLAAGYLTDATRRADGTVNRRLLGMLDKGVAASAVPRNGVASRDVTIDPAVPLRARLFYPCAPAAAEDDDAGAERPAVPVVVFFHGGGFAYLSAASPAYDAACRRIARYAGAAVLSVDYRRSPEHRFPAAYDDGFAALRFLDGGPDPDPGAIAGAPPIDAARCFLAGDSAGGNIAHHVARRYALDPSAFANLRLAGLIAIQPFFGGQERTPAELRLVGAPIVSVPRTDWMWRAFLPHGADRTHEASSPDVATAGIDGAPDFPPATVVIGGYDPLQDWQRRYCDALRGKGKEVRVLEYPDAIHAFYVFPEFAESKDLMLRIKEIVASSE

SEQ ID NO: 5162 - protein, 304 aa, Zea mays subsp. mays
  peptide (1)..(304): Ceres Seq. ID no. 12414100
  misc_feature (47)..(99): Pfam Name: Carboxylesterase Pfam Description: Carboxylesterase
  misc_feature (1)..(297): Homolog of NCBI NO: 34904770 NR Description: similar to carboxylesterase [Oryza sativa
  misc_feature (1)..(303): Homolog of NCBI NO: 34393714 NR Description: putative esterase [Oryza sativa (japonica
  misc_feature (1)..(303): Homolog of NCBI NO: 34904774 NR Description: similar to carboxylesterase [Oryza sativa
  misc_feature (1)..(300): Homolog of NCBI NO: 34904760 NR Description: similar to carboxylesterase [Oryza sativa
  misc_feature (1)..(300): Homolog of NCBI NO: 34904758 NR Description: hypothetical protein~predicted by GeneMark.hmm
  misc_feature (1)..(300): Homolog of NCBI NO: 15237783 NR Description: putative protein; protein id: At5g23530.1, by cDNA: 9482. [Arabidopsis thaliana] >gi|8809707|dbj|BAA97248.1| similarity to unknown protein~gb|AAF27018.1~gene_id:MQM1.21
  misc_feature (1)..(300): Homolog of NCBI NO: 21618039 NR Description: unknown [Arabidopsis thaliana]
  misc_feature (1)..(286): Homolog of NCBI NO: 34904772 NR Description: similar to carboxylesterase [Oryza sativa
  misc_feature (1)..(284): Homolog of NCBI NO: 15240483 NR Description: putative protein; protein id: At5g27320.1, by cDNA: gi_15451145 [Arabidopsis thaliana] Unknown protein [Arabidopsis thaliana]
  misc_feature (1)..(300): Homolog of NCBI NO: 15229905 NR Description: unknown protein; protein id: At3g05120.1 thaliana] >gi|6729022|gb|AAF27018.1|AC009177_8 unknown protein thaliana] >gi|22530934|gb|AAM96971.1| unknown protein
MLDKGVAASAVPRNGVASRDVTIDPAVPLRARLFYPCAPAAAEDDDAGAERPAVPVVVFFHGGGFAYLSAASPAYDAACRRIARYAGAAVLSVDYRRSPEHRFPAAYDDGFAALRFLDGGPDPDPGAIAGAPPIDAARCFLAGDSAGGNIAHHVARRYALDPSAFANLRLAGLIAIQPFFGGQERTPAELRLVGAPIVSVPRTDWMWRAFLPHGADRTHEASSPDVATAGIDGAPDFPPATVVIGGYDPLQDWQRRYCDALRGKGKEVRVLEYPDAIHAFYVFPEFAESKDLMLRIKEIVASSE

SEQ ID NO: 5163 - DNA, 793 bp, Zea mays subsp. mays
  misc_feature (1)..(793): Ceres Seq. ID no. 12349701
  misc_feature: MA Experiment ID: 108515 Result: Down-regulated in Transcription
  misc_feature: MA Experiment 108515 PARAMETER Experiment Name: Zm_2mM_SA_P Parameter: Age (day) Value: 8
  misc_feature: MA Experiment 108515 PARAMETER Experiment Name: Zm_2mM_SA_P Parameter: Organism Value: Zea mays
  misc_feature: MA Experiment 108515 PARAMETER Experiment Name: Zm_2mM_SA_P Parameter: Plant Line Value: 35A19
  misc_feature: MA Experiment 108515 PARAMETER Experiment Name: Zm_2mM_SA_P Parameter: Timepoint (hr) Value: 12
  misc_feature: MA Experiment 108515 PARAMETER Experiment Name: Zm_2mM_SA_P Parameter: Tissue Value: Aerial
  misc_feature: MA Experiment 108515 PARAMETER Experiment Name: Zm_2mM_SA_P Parameter: Treatment Value: 2mM SA vs. No Treatment
  misc_feature: MA Experiment ID: 108527 Result: Down-regulated in Transcription
  misc_feature: MA Experiment 108527 PARAMETER Experiment Name: Zm_5mM_NO_P Parameter: Age (day) Value: 8
  misc_feature: MA Experiment 108527 PARAMETER Experiment Name: Zm_5mM_NO_P Parameter: Organism Value: Zea mays
  misc_feature: MA Experiment 108527 PARAMETER Experiment Name: Zm_5mM_NO_P Parameter: Plant Line Value: 35A19
  misc_feature: MA Experiment 108527 PARAMETER Experiment Name: Zm_5mM_NO_P Parameter: Timepoint (hr) Value: 6
  misc_feature: MA Experiment 108527 PARAMETER Experiment Name: Zm_5mM_NO_P Parameter: Tissue Value: Aerial
  misc_feature: MA Experiment 108527 PARAMETER Experiment Name: Zm_5mM_NO_P Parameter: Treatment Value: 5mM NO vs. No Treatment
  misc_feature: MA Experiment ID: 108528 Result: Up-regulated in Transcription
  misc_feature: MA Experiment 108528 PARAMETER Experiment Name: Zm_Imbibed_Seeds_P Parameter: Age (day) Value: 5 vs. 2
  misc_feature: MA Experiment 108528 PARAMETER Experiment Name: Zm_Imbibed_Seeds_P Parameter: Organism Value: Zea mays
  misc_feature: MA Experiment 108528 PARAMETER Experiment Name: Zm_Imbibed_Seeds_P Parameter: Plant Line Value: 35A19
  misc_feature: MA Experiment 108528 PARAMETER Experiment Name: Zm_Imbibed_Seeds_P Parameter: Tissue Value: Aerial vs. Embryo
  misc_feature: MA Experiment ID: 108529 Result: Up-regulated in Transcription
  misc_feature: MA Experiment 108529 PARAMETER Experiment Name: Zm_Imbibed_Seeds_P Parameter: Age (day) Value: 5 vs. 2
  misc_feature: MA Experiment 108529 PARAMETER Experiment Name: Zm_Imbibed_Seeds_P Parameter: Organism Value: Zea mays
  misc_feature: MA Experiment 108529 PARAMETER Experiment Name: Zm_Imbibed_Seeds_P Parameter: Plant Line Value: 35A19
  misc_feature: MA Experiment 108529 PARAMETER Experiment Name: Zm_Imbibed_Seeds_P Parameter: Tissue Value: Roots vs. Embryo
  misc_feature: MA Experiment ID: 108530 Result: Up-regulated in Transcription
  misc_feature: MA Experiment 108530 PARAMETER Experiment Name: Zm_Imbibed_Seeds_P Parameter: Age (day) Value: 6 vs. 2
  misc_feature: MA Experiment 108530 PARAMETER Experiment Name: Zm_Imbibed_Seeds_P Parameter: Organism Value: Zea mays
  misc_feature: MA Experiment 108530 PARAMETER Experiment Name: Zm_Imbibed_Seeds_P Parameter: Plant Line Value: 35A19
  misc_feature: MA Experiment 108530 PARAMETER Experiment Name: Zm_Imbibed_Seeds_P Parameter: Tissue Value: Aerial vs. Embryo
  misc_feature: MA Experiment ID: 108535 Result: Down-regulated in Transcription
  misc_feature: MA Experiment 108535 PARAMETER Experiment Name: Zm_Meristem_P Parameter: Age (day) Value: 8
  misc_feature: MA Experiment 108535 PARAMETER Experiment Name: Zm_Meristem_P Parameter: Organism Value: Zea mays
  misc_feature: MA Experiment 108535 PARAMETER Experiment Name: Zm_Meristem_P Parameter: Plant Line Value: 35A19
  misc_feature: MA Experiment 108535 PARAMETER Experiment Name: Zm_Meristem_P Parameter: Tissue Value: Root Meristem vs. Above Root Meristem
  misc_feature: MA Experiment ID: 108536 Result: Down-regulated in Transcription
  misc_feature: MA Experiment 108536 PARAMETER Experiment Name: Zm_Meristem_P Parameter: Age (day) Value: 8
  misc_feature: MA Experiment 108536 PARAMETER Experiment Name: Zm_Meristem_P Parameter: Organism Value: Zea mays
  misc_feature: MA Experiment 108536 PARAMETER Experiment Name: Zm_Meristem_P Parameter: Plant Line Value: 35A19
  misc_feature: MA Experiment 108536 PARAMETER Experiment Name: Zm_Meristem_P Parameter: Tissue Value: Shoot Meristem vs. Above Shoot Meristem
  misc_feature: MA Experiment ID: 108545 Result: Up-regulated in Transcription
  misc_feature: MA Experiment 108545 PARAMETER Experiment Name: Zm_Imbibed_Seeds_P Parameter: Age (day) Value: 3 vs. 2
  misc_feature: MA Experiment 108545 PARAMETER Experiment Name: Zm_Imbibed_Seeds_P Parameter: Organism Value: Zea mays
  misc_feature: MA Experiment 108545 PARAMETER Experiment Name: Zm_Imbibed_Seeds_P Parameter: Plant Line Value: 35A19
  misc_feature: MA Experiment 108545 PARAMETER Experiment Name: Zm_Imbibed_Seeds_P Parameter: Tissue Value: Aerial vs. Embryo
  misc_feature: MA Experiment ID: 108547 Result: Up-regulated in Transcription
  misc_feature: MA Experiment 108547 PARAMETER Experiment Name: Zm_Imbibed_Seeds_P Parameter: Age (day) Value: 4 vs. 2
  misc_feature: MA Experiment 108547 PARAMETER Experiment Name: Zm_Imbibed_Seeds_P Parameter: Organism Value: Zea mays
  misc_feature: MA Experiment 108547 PARAMETER Experiment Name: Zm_Imbibed_Seeds_P Parameter: Plant Line Value: 35A19
  misc_feature: MA Experiment 108547 PARAMETER Experiment Name: Zm_Imbibed_Seeds_P Parameter: Tissue Value: Aerial vs. Embryo
  misc_feature: MA Experiment ID: 108559 Result: Down-regulated in Transcription
  misc_feature: MA Experiment 108559 PARAMETER Experiment Name: Zm_5mM_NO_P Parameter: Age (day) Value: 8
  misc_feature: MA Experiment 108559 PARAMETER Experiment Name: Zm_5mM_NO_P Parameter: Organism Value: Zea mays
  misc_feature: MA Experiment 108559 PARAMETER Experiment Name: Zm_5mM_NO_P Parameter: Plant Line Value: 35A19
  misc_feature: MA Experiment 108559 PARAMETER Experiment Name: Zm_5mM_NO_P Parameter: Timepoint (hr) Value: 12
  misc_feature: MA Experiment 108559 PARAMETER Experiment Name: Zm_5mM_NO_P Parameter: Tissue Value: Aerial
  misc_feature: MA Experiment 108559 PARAMETER Experiment Name: Zm_5mM_NO_P Parameter: Treatment Value: 5mM NO vs. No Treatment
  misc_feature: MA Experiment ID: 108689 Result: Up-regulated in Transcription
  misc_feature: MA Experiment 108689 PARAMETER Experiment Name: Zm_Drought_Roots_P Parameter: Age (day) Value: 9
  misc_feature: MA Experiment 108689 PARAMETER Experiment Name: Zm_Drought_Roots_P Parameter: Organism Value: Zea mays
  misc_feature: MA Experiment 108689 PARAMETER Experiment Name: Zm_Drought_Roots_P Parameter: Plant Line Value: 35A19
  misc_feature: MA Experiment 108689 PARAMETER Experiment Name: Zm_Drought_Roots_P Parameter: Timepoint (hr) Value: 24
  misc_feature: MA Experiment 108689 PARAMETER Experiment Name: Zm_Drought_Roots_P Parameter: Tissue Value: Roots
  misc_feature: MA Experiment 108689 PARAMETER Experiment Name: Zm_Drought_Roots_P Parameter: Treatment Value: Drought vs. No Drought
  misc_feature: MA Experiment ID: 20000480 Result: Down-regulated in Transcription
  misc_feature: MA Experiment 20000480 PARAMETER Experiment Name: Zm_Drought_P Parameter: Age (day) Value: 11
  misc_feature: MA Experiment 20000480 PARAMETER Experiment Name: Zm_Drought_P Parameter: Organism Value: Zea mays
  misc_feature: MA Experiment 20000480 PARAMETER Experiment Name: Zm_Drought_P Parameter: Plant Line Value: 35A19
  misc_feature: MA Experiment 20000480 PARAMETER Experiment Name: Zm_Drought_P Parameter: Timepoint (hr) Value: 72
  misc_feature: MA Experiment 20000480 PARAMETER Experiment Name: Zm_Drought_P Parameter: Tissue Value: Aerial
  misc_feature: MA Experiment 20000480 PARAMETER Experiment Name: Zm_Drought_P Parameter: Treatment Value: Drought vs. No Drought
  misc_feature: MA Experiment ID: 20000626 Result: Down-regulated in Transcription
  misc_feature: MA Experiment 20000626 PARAMETER Experiment Name: Zm_Herbicide-Treatments_P Parameter: Timepoint (hr) Value: 12
  misc_feature: MA Experiment 20000626 PARAMETER Experiment Name: Zm_Herbicide-Treatments_P Parameter: Tissue Value: Aerial
  misc_feature: MA Experiment 20000626 PARAMETER Experiment Name: Zm_Herbicide-Treatments_P Parameter: Treatment Value: Roundup vs. No Treatment
  misc_feature: MA Experiment ID: 20001614 Result: Down-regulated in Transcription
  misc_feature: MA Experiment 20001614 PARAMETER Experiment Name: Zm_50ppm_KNO3_L-to-H_P Parameter: Age (day) Value: 21
  misc_feature: MA Experiment 20001614 PARAMETER Experiment Name: Zm_50ppm_KNO3_L-to-H_P Parameter: Organism Value: Zea mays
  misc_feature: MA Experiment 20001614 PARAMETER Experiment Name: Zm_50ppm_KNO3_L-to-H_P Parameter: Plant Line Value: 35A19
  misc_feature: MA Experiment 20001614 PARAMETER Experiment Name: Zm_50ppm_KNO3_L-to-H_P Parameter: Timepoint (hr) Value: 48
  misc_feature: MA Experiment 20001614 PARAMETER Experiment Name: Zm_50ppm_KNO3_L-to-H_P Parameter: Tissue Value: Roots
  misc_feature: MA Experiment 20001614 PARAMETER Experiment Name: Zm_50ppm_KNO3_L-to-H_P Parameter: Treatment Value: 50ppm KNO3 vs. 50ppm KCl
aagatttgccttggcttgccgtgccctgcgggagccaagccaaggacggctagcgctcgccacgcgcgatgtccgggcttcctccggccgcgcgaccgctgctaccgtctccctgcgcctcttcctccgttgttcgggcgaaggcagcgtcggcatgctgctccagcctaaagcagtcgcgcccaggccgaagtgctgccgccccttccaccgtcgccgcgcgtcaggccgcgccgctcttggctgcggcgctcgtccttgtagcggcaccccctggcctgcctgctgctatctcaccagcatttgcacagcccagtttcagaaggcgcagcgctgttccggaaggcttgtattggttgccatgacatgggaggaaacattctacagccaggagccactcttttcctgaaggacctcgagagaaacggagttgccacggaggaggaactgtataacatcacatactatgggaaaggaagaatgcccggttttggagagaaatgcaccccaagaggacagtgcaccttcggcccccggctatcggaagacgacatcaagatcctagctttgtttgtcaagtcgcaagcccagaacgggtggccgaagattgagggggatggagattgatcaaactgaaaaaacgatgagaagacggtgcttgttagtcagatgaaaatggtgacgggaagatagtgtttgtatagtttaggaatctggtctttctgaacttgtaaccttttagtctctgtttctgaactgaacttgtaaccttctggtccgtgtttcagttttc

SEQ ID NO: 5164 - protein, 135 aa, Zea mays subsp. mays
  peptide (1)..(135): Ceres Seq. ID no. 12349702
RFALACRALREPSQGRLALATRDVRASSGRATAATVSLRLFLRCSGEGSVGMLLQPKAVAPRPKCCRPFHRRRASGRAALGCGARPCSGTPWPACCYLTSICTAQFQKAQRCSGRLVLVAMTWEETFYSQEPLFS

SEQ ID NO: 5165 - protein, 98 aa, Zea mays subsp. mays
  peptide (1)..(98): Ceres Seq. ID no. 12349703
MSGLPPAARPLLPSPCASSSVVRAKAASACCSSLKQSRPGRSAAAPSTVAARQAAPLLAAALVLVAAPPGLPAAISPAFAQPSFRRRSAVPEGLYWLP

SEQ ID NO: 5166 - protein, 86 aa, Zea mays subsp. mays
  peptide (1)..(86): Ceres Seq. ID no. 12349704
  misc_feature (1)..(86): Homolog of NCBI NO: 34899810 NR Description: putative c6 type cytochrome [Oryza sativa
  misc_feature (1)..(84): Homolog of NCBI NO: 10177496 NR Description: gene_id:K21C13.23~unknown protein [Arabidopsis
  misc_feature (1)..(84): Homolog of NCBI NO: 18422509 NR Description: expressed protein; protein id: At5g45040.1, by cDNA: gi_13926304, supported by cDNA: gi_16323249 [Arabidopsis
  misc_feature (14)..(86): Homolog of NCBI NO: 34393286 NR Description: cytochrome C6, chloroplast precursor-like protein
  misc_feature (1)..(78): Homolog of NCBI NO: 33866050 NR Description: cytochrome C6 (soluble cytochrome F) (cytochrome [Synechococcus sp. WH 8102] >gi|33639025|emb|CAE08031.1| C6 (soluble cytochrome F) (cytochrome c553) [Synechococcus sp. WH
  misc_feature (1)..(78): Homolog of NCBI NO: 22652035 NR Description: putative cytochrome c6-2 [Synechococcus sp. PCC
  misc_feature (1)..(78): Homolog of NCBI NO: 33862735 NR Description: Cytochrome c, class IC:Cytochrome c, class I marinus str. MIT 9313] >gi|33634651|emb|CAE20637.1| Cytochrome c,
  misc_feature (1)..(78): Homolog of NCBI NO: 117934 NR Description: Cytochrome C6 precursor (Soluble cytochrome f)
  misc_feature (1)..(78): Homolog of NCBI NO: 16329946 NR Description: cytochrome c553 [Synechocystis sp. PCC 6803]
  misc_feature (1)..(78): Homolog of NCBI NO: 117923 NR Description: Cytochrome C6 (Soluble cytochrome f) (Cytochrome
MGGNILQPGATLFLKDLERNGVATEEELYNITYYGKGRMPGFGEKCTPRGQCTFGPRLSEDDIKILALFVKSQAQNGWPKIEGDGD

SEQ ID NO: 5167 - protein, 84 aa, Zea mays subsp. mays
  peptide (1)..(84): Ceres Seq. ID no. 12349705
MLLQPKAVAPRPKCCRPFHRRRASGRAALGCGARPCSGTPWPACCYLTSICTAQFQKAQRCSGRLVLVAMTWEETFYSQEPLFS

SEQ ID NO: 5168 - DNA, 1435 bp, Zea mays subsp. mays
  misc_feature (1)..(1435): Ceres Seq. ID no. 12409675
  misc_feature: MA Experiment ID: 108522 Result: Up-regulated in Transcription
  misc_feature: MA Experiment 108522 PARAMETER Experiment Name: Zm_42deg_Heat_P Parameter: Age (day) Value: 8
  misc_feature: MA Experiment 108522 PARAMETER Experiment Name: Zm_42deg_Heat_P Parameter: Organism Value: Zea mays
  misc_feature: MA Experiment 108522 PARAMETER Experiment Name: Zm_42deg_Heat_P Parameter: Plant Line Value: 35A19
  misc_feature: MA Experiment 108522 PARAMETER Experiment Name: Zm_42deg_Heat_P Parameter: Temperature (deg C) Value: 42 vs. 22
  misc_feature: MA Experiment 108522 PARAMETER Experiment Name: Zm_42deg_Heat_P Parameter: Timepoint (hr) Value: 1
  misc_feature: MA Experiment 108522 PARAMETER Experiment Name: Zm_42deg_Heat_P Parameter: Tissue Value: Aerial
  misc_feature: MA Experiment ID: 20000535 Result: Up-regulated in Transcription
  misc_feature: MA Experiment 20000535 PARAMETER Experiment Name: Zm_Hybrid_Seed_Dev_P Parameter: DAP Value: 30 vs. 12
  misc_feature: MA Experiment 20000535 PARAMETER Experiment Name: Zm_Hybrid_Seed_Dev_P Parameter: Organism Value: Zea mays
  misc_feature: MA Experiment 20000535 PARAMETER Experiment Name: Zm_Hybrid_Seed_Dev_P Parameter: Plant Line Value: 35A19
  misc_feature: MA Experiment 20000535 PARAMETER Experiment Name: Zm_Hybrid_Seed_Dev_P Parameter: Tissue Value: Embryo vs. Unfert Floret
atcatgcattcttcatggcgacggtgaccagtttgagcttctcaggcagctgcagacacgggccacgctatactgcccggccggcggccagttctcgtagtagtcagctacttaatgatcagctagctagagcatcgcggagattacaagtggcggcgggcatggcggtggcggcgttcccttcctgcggcgccttcgcccctccttgcctagtgagtacaaggagagccttctcctcggtggtggccatggcttccgcagccccggtgagagctcccagcaggaagcccttcgcccctcctcgcgaggtacaccgccccgtggcgcactcgctgcccccgcagaagcgggagatcttcgagtcgctcgagtcgtgggcggcggacaacatcctggtgctcctcaagcccgtggagaggtcctggcagccgcaggactacctgccggacgccgcctccgagtccttcgacgacgaggtccgggagctgcgagagcgcgcccgggagatccccgacgactacttcgtctgcttcgtgggcgacatggtcaccgaggaggcgctgccgacgtaccagaccatgctcaacaccctggacggcggcgtccgcgacgagaccggcgccagctcgaccagctgggcggtgtggaccagggcgtgggccgccgaggagaacaggcacggcgacctcatgaacaaatacctcttcctgacggggagggtggacatgaggcagatcgagaagaccgtccagtacctcatcgcctcagggatggatcccaagacggagacgaacccgtacatgggcttcgtctacacgtcgttccaggagcgcgccaccttcatctcccacggcaacacggcgcgccacgccaggcggtacggcgacaccaagctggcgcagatctgcggcacaatcgccgccgacgagaagcgccacgagtcggcgtacgagcggatcgtcgagaagctgttcgaggtggacccggactacacggtgcgcgccttcgcggacaccatgaggaagaaggtggccatgcccgcccacctcatgtacgacggccaggacgacgggctgttcgcgcgcttcagcgctgtcgcgcagcgcatcggtgtctacacggccagggactacgtcgacatcctcgagttcctggtccgccggtggggcgtccaggaactcacggggctgtccggggaaggccgccgcgcgcaggagttcgtgtgcgagctggggccccggttcaggaggctggaggagagggcgcacgacaacaaggccaaggatccggagttcgcgccattcagctggattcacgggcgccaggttcagctttgattaaagatgatgactgggggattcgccgactctctccgtcctcagatgatatgttgtactgtactagcatataactaagaattgattgaagttgctgt

SEQ ID NO: 5169 - protein, 444 aa, Zea mays subsp. mays
  peptide (1)..(444): Ceres Seq. ID no. 12409676
  misc_feature (54)..(444): Homolog of NCBI NO: 3915029 NR Description: Acyl-[acyl-carrier protein] desaturase,
  misc_feature (46)..(444): Homolog of NCBI NO: 1785862 NR Description: stearoyl-Acyl-carrier protein desaturase [Elaeis
  misc_feature (65)..(444): Homolog of NCBI NO: 3915024 NR Description: Acyl-[acyl-carrier protein] desaturase,
  misc_feature (64)..(444): Homolog of NCBI NO: 134945 NR Description: Acyl-[acyl-carrier protein] desaturase,
  misc_feature (64)..(444): Homolog of NCBI NO: 951427 NR Description: stearoyl-acyl-carrier protein desaturase
  misc_feature (60)..(444): Homolog of NCBI NO: 15224342 NR Description: stearoyl-ACP desaturase; protein id: At2g43710.1, by cDNA: gi_15081681, supported by cDNA: gi_15149309, supported cDNA: gi_20334827 [Arabidopsis thaliana] >gi|25285784|pir||E84869
  misc_feature (59)..(444): Homolog of NCBI NO: 134943 NR Description: Acyl-[acyl-carrier protein] desaturase,
  misc_feature (60)..(444): Homolog of NCBI NO: 15081682 NR Description: At2g43710/F18O19.18 [Arabidopsis thaliana]
  misc_feature (80)..(444): Homolog of NCBI NO: 19386730 NR Description: putative stearoyl-acyl-carrier protein desaturase
  misc_feature (60)..(444): Homolog of NCBI NO: 575942 NR Description: stearoyl-acyl carrier protein desaturase [Sesamum
HAFFMATVTSLSFSGSCRHGPRYTARPAASSRSSQLLNDQLARASRRLQVAAGMAVAAFPSCGAFAPPCLVSTRRAFSSVVAMASAAPVRAPSRKPFAPPREVHRPVAHSLPPQKREIFESLESWAADNILVLLKPVERSWQPQDYLPDAASESFDDEVRELRERAREIPDDYFVCFVGDMVTEEALPTYQTMLNTLDGGVRDETGASSTSWAVWTRAWAAEENRHGDLMNKYLFLTGRVDMRQIEKTVQYLIASGMDPKTETNPYMGFVYTSFQERATFISHGNTARHARRYGDTKLAQICGTIAADEKRHESAYERIVEKLFEVDPDYTVRAFADTMRKKVAMPAHLMYDGQDDGLFARFSAVAQRIGVYTARDYVDILEFLVRRWGVQELTGLSGEGRRAQEFVCELGPRFRRLEERAHDNKAKDPEFAPFSWIHGRQVQL

SEQ ID NO: 5170 - protein, 440 aa, Zea mays subsp. mays
  peptide (1)..(440): Ceres Seq. ID no. 12409677
  misc_feature (50)..(440): Homolog of NCBI NO: 3915029 NR Description: Acyl-[acyl-carrier protein] desaturase,
  misc_feature (42)..(440): Homolog of NCBI NO: 1785862 NR Description: stearoyl-Acyl-carrier protein desaturase [Elaeis
  misc_feature (61)..(440): Homolog of NCBI NO: 3915024 NR Description: Acyl-[acyl-carrier protein] desaturase,
  misc_feature (60)..(440): Homolog of NCBI NO: 134945 NR Description: Acyl-[acyl-carrier protein] desaturase,
  misc_feature (60)..(440): Homolog of NCBI NO: 951427 NR Description: stearoyl-acyl-carrier protein desaturase
  misc_feature (56)..(440): Homolog of NCBI NO: 15224342 NR Description: stearoyl-ACP desaturase; protein id: At2g43710.1, by cDNA: gi_15081681, supported by cDNA: gi_15149309, supported cDNA: gi_20334827 [Arabidopsis thaliana] >gi|25285784|pir||E84869
  misc_feature (55)..(440): Homolog of NCBI NO: 134943 NR Description: Acyl-[acyl-carrier protein] desaturase,
  misc_feature (56)..(440): Homolog of NCBI NO: 15081682 NR Description: At2g43710/F18O19.18 [Arabidopsis thaliana]
  misc_feature (76)..(440): Homolog of NCBI NO: 19386730 NR Description: putative stearoyl-acyl-carrier protein desaturase
  misc_feature (56)..(440): Homolog of NCBI NO: 575942 NR Description: stearoyl-acyl carrier protein desaturase [Sesamum
MATVTSLSFSGSCRHGPRYTARPAASSRSSQLLNDQLARASRRLQVAAGMAVAAFPSCGAFAPPCLVSTRRAFSSVVAMASAAPVRAPSRKPFAPPREVHRPVAHSLPPQKREIFESLESWAADNILVLLKPVERSWQPQDYLPDAASESFDDEVRELRERAREIPDDYFVCFVGDMVTEEALPTYQTMLNTLDGGVRDETGASSTSWAVWTRAWAAEENRHGDLMNKYLFLTGRVDMRQIEKTVQYLIASGMDPKTETNPYMGFVYTSFQERATFISHGNTARHARRYGDTKLAQICGTIAADEKRHESAYERIVEKLFEVDPDYTVRAFADTMRKKVAMPAHLMYDGQDDGLFARFSAVAQRIGVYTARDYVDILEFLVRRWGVQELTGLSGEGRRAQEFVCELGPRFRRLEERAHDNKAKDPEFAPFSWIHGRQVQL

SEQ ID NO: 5171 - protein, 391 aa, Zea mays subsp. mays
  peptide (1)..(391): Ceres Seq. ID no. 12409678
  misc_feature (1)..(391): Homolog of NCBI NO: 3915029 NR Description: Acyl-[acyl-carrier protein] desaturase,
  misc_feature (1)..(391): Homolog of NCBI NO: 1785862 NR Description: stearoyl-Acyl-carrier protein desaturase [Elaeis
  misc_feature (12)..(391): Homolog of NCBI NO: 3915024 NR Description: Acyl-[acyl-carrier protein] desaturase,
  misc_feature (11)..(391): Homolog of NCBI NO: 134945 NR Description: Acyl-[acyl-carrier protein] desaturase,
  misc_feature (11)..(391): Homolog of NCBI NO: 951427 NR Description: stearoyl-acyl-carrier protein desaturase
  misc_feature (7)..(391): Homolog of NCBI NO: 15224342 NR Description: stearoyl-ACP desaturase; protein id: At2g43710.1, by cDNA: gi_15081681, supported by cDNA: gi_15149309, supported cDNA: gi_20334827 [Arabidopsis thaliana] >gi|25285784|pir||E84869
  misc_feature (6)..(391): Homolog of NCBI NO: 134943 NR Description: Acyl-[acyl-carrier protein] desaturase,
  misc_feature (7)..(391): Homolog of NCBI NO: 15081682 NR Description: At2g43710/F18O19.18 [Arabidopsis thaliana]
  misc_feature (27)..(391): Homolog of NCBI NO: 19386730 NR Description: putative stearoyl-acyl-carrier protein desaturase
  misc_feature (7)..(391): Homolog of NCBI NO: 575942 NR Description: stearoyl-acyl carrier protein desaturase [Sesamum
MAVAAFPSCGAFAPPCLVSTRRAFSSVVAMASAAPVRAPSRKPFAPPREVHRPVAHSLPPQKREIFESLESWAADNILVLLKPVERSWQPQDYLPDAASESFDDEVRELRERAREIPDDYFVCFVGDMVTEEALPTYQTMLNTLDGGVRDETGASSTSWAVWTRAWAAEENRHGDLMNKYLFLTGRVDMRQIEKTVQYLIASGMDPKTETNPYMGFVYTSFQERATFISHGNTARHARRYGDTKLAQICGTIAADEKRHESAYERIVEKLFEVDPDYTVRAFADTMRKKVAMPAHLMYDGQDDGLFARFSAVAQRIGVYTARDYVDILEFLVRRWGVQELTGLSGEGRRAQEFVCELGPRFRRLEERAHDNKAKDPEFAPFSWIHGRQVQL

SEQ ID NO: 5172 - DNA, 1240 bp, Zea mays subsp. mays
  misc_feature (1)..(1240): Ceres Seq. ID no. 12352706
  misc_feature: MA Experiment ID: 108535 Result: Down-regulated in Transcription
  misc_feature: MA Experiment 108535 PARAMETER Experiment Name: Zm_Meristem_P Parameter: Age (day) Value: 8
  misc_feature: MA Experiment 108535 PARAMETER Experiment Name: Zm_Meristem_P Parameter: Organism Value: Zea mays
  misc_feature: MA Experiment 108535 PARAMETER Experiment Name: Zm_Meristem_P Parameter: Plant Line Value: 35A19
  misc_feature: MA Experiment 108535 PARAMETER Experiment Name: Zm_Meristem_P Parameter: Tissue Value: Root Meristem vs. Above Root Meristem
  misc_feature: MA Experiment ID: 108543 Result: Down-regulated in Transcription
  misc_feature: MA Experiment ID: 20000480 Result: Down-regulated in Transcription
  misc_feature: MA Experiment 20000480 PARAMETER Experiment Name: Zm_Drought_P Parameter: Age (day) Value: 11
  misc_feature: MA Experiment 20000480 PARAMETER Experiment Name: Zm_Drought_P Parameter: Organism Value: Zea mays
  misc_feature: MA Experiment 20000480 PARAMETER Experiment Name: Zm_Drought_P Parameter: Plant Line Value: 35A19
  misc_feature: MA Experiment 20000480 PARAMETER Experiment Name: Zm_Drought_P Parameter: Timepoint (hr) Value: 72
  misc_feature: MA Experiment 20000480 PARAMETER Experiment Name: Zm_Drought_P Parameter: Tissue Value: Aerial
  misc_feature: MA Experiment 20000480 PARAMETER Experiment Name: Zm_Drought_P Parameter: Treatment Value: Drought vs. No Drought
actacaggtctacagctcccgcccagcatcatggccttccattccccaatctagggttgctgagctccccaccaccgccggtcatgcccgacgcggatgttgacaccgtgattcgcgaagccgccgcggccgcggccccagcccgacgacgacagcgagggtgacaccgaggaagaggaggaggagggggacgaggtcgacgaggacgaggacgacgacgaggaggagttacccgccgaggcgccggcgccggacgaggagcaacctgccccagcgcccatctcgaccttgccggggaatccaaaccagctgacgctggtcttccagggcgaggtttacgttttcgaatccgtcacccccgagaaggttcaagctgtgctgctacttttaggacgtggtgaactaccacctggtttagctggcatggttttacccaatcaaaatgacaacaagggctatgacgatatacttcagaggacagacattccagcaaaaagggttgcttcactaattaggttccgtgagaaaaggaaggaaagaaattttgataagaaaatacgttatgctgttcgcaaagaagtggcactcaggatgcagcgtcggaaggggcaatttgctggaagagccagtctggagggagaatctccagctcctggatgtgatcctggttctcagggctcaggcctagattttgcatctcgagaatcaatgtgccagaactgtggtactagtgaaaaaatgaccccagcaatgcgtcgtggtccagcgggtccaaggactttgtgcaatgcttgtggattgatgtgggcaaacaagggtaccctgagaagttgccccagggcaaaagttgaatctcctgcggttgcaactgagcagggaacaagtgacaacaaagccctggcaacactgaataataacaatgttgctgcaagcaatggcgaagccacaagtgcagcagagaaaggagtgccaaaggcgccgtgacagtatatagacattattgtcagagacaaagatttcggattctttgcctatagctagacaagacaccccgttagaaatatttgataatgattgtcatcaagtgtacattcattcttgcttgacagtgttagacgtgtaattaatataagctgtccgattgtgtaaacagtaaacccatatggcatctgttgtgttacaacttacactttctaactttcttcattctcataacatcatgatcaaagattcgatgctt

SEQ ID NO: 5173 - protein, 186 aa, Zea mays subsp. mays
  peptide (1)..(186): Ceres Seq. ID no. 12352707
  misc_feature (30)..(69): Pfam Name: CCT motif Pfam Description: CCT motif
  misc_feature (1)..(185): Homolog of NCBI NO: 13174240 NR Description: putative zinc finger protein [Oryza sativa]
  misc_feature (1)..(157): Homolog of NCBI NO: 30686115 NR Description: GATA zinc finger protein [Arabidopsis thaliana] Unknown protein [Arabidopsis thaliana]
  misc_feature (1)..(177): Homolog of NCBI NO: 21537322 NR Description: flowering protein CONSTANS, putative [Arabidopsis
  misc_feature (1)..(157): Homolog of NCBI NO: 18402914 NR Description: GATA zinc finger protein; protein id: supported by cDNA: 12996. [Arabidopsis thaliana] emb|CAB45082.1~gene_id:MXL8.2~similar to unknown protein
  misc_feature (1)..(157): Homolog of NCBI NO: 18403600 NR Description: flowering protein CONSTANS, putative; protein id: supported by cDNA: gi_15028098 [Arabidopsis thaliana]
  misc_feature (1)..(157): Homolog of NCBI NO: 15028099 NR Description: putative flowering protein CONSTANS [Arabidopsis
  misc_feature (1)..(176): Homolog of NCBI NO: 11358938 NR Description: zinc-finger protein - Arabidopsis thaliana
  misc_feature (1)..(176): Homolog of NCBI NO: 15233844 NR Description: Zinc finger protein, Zim; protein id: supported by cDNA: 20769., supported by cDNA: gi_8918530
  misc_feature (1)..(99): Homolog of NCBI NO: 25405485 NR Description: hypothetical protein F19C24.17 [imported] - thaliana >gi|12321671|gb|AAG50873.1|AC025294_11 hypothetical [Arabidopsis thaliana] >gi|12325361|gb|AAG52620.1|AC024261_7
  misc_feature (57)..(157): Homolog of NCBI NO: 26451385 NR Description: unknown protein [Arabidopsis thaliana]
MVLPNQNDNKGYDDILQRTDIPAKRVASLIRFREKRKERNFDKKIRYAVRKEVALRMQRRKGQFAGRASLEGESPAPGCDPGSQGSGLDFASRESMCQNCGTSEKMTPAMRRGPAGPRTLCNACGLMWANKGTLRSCPRAKVESPAVATEQGTSDNKALATLNNNNVAASNGEATSAAEKGVPKAP

SEQ ID NO: 5174 - protein, 130 aa, Zea mays subsp. mays
  peptide (1)..(130): Ceres Seq. ID no. 12352708
  misc_feature (1)..(101): Homolog of NCBI NO: 18403600 NR Description: flowering protein CONSTANS, putative; protein id: supported by cDNA: gi_15028098 [Arabidopsis thaliana]
  misc_feature (1)..(101): Homolog of NCBI NO: 15028099 NR Description: putative flowering protein CONSTANS [Arabidopsis
  misc_feature (1)..(120): Homolog of NCBI NO: 11358938 NR Description: zinc-finger protein - Arabidopsis thaliana
  misc_feature (1)..(120): Homolog of NCBI NO: 15233844 NR Description: Zinc finger protein, Zim; protein id: supported by cDNA: 20769., supported by cDNA: gi_8918530
  misc_feature (1)..(43): Homolog of NCBI NO: 25405485 NR Description: hypothetical protein F19C24.17 [imported] - thaliana >gi|12321671|gb|AAG50873.1|AC025294_11 hypothetical [Arabidopsis thaliana] >gi|12325361|gb|AAG52620.1|AC024261_7
  misc_feature (1)..(101): Homolog of NCBI NO: 26451385 NR Description: unknown protein [Arabidopsis thaliana]
  misc_feature (1)..(129): Homolog of NCBI NO: 13174240 NR Description: putative zinc finger protein [Oryza sativa]
  misc_feature (1)..(101): Homolog of NCBI NO: 30686115 NR Description: GATA zinc finger protein [Arabidopsis thaliana] Unknown protein [Arabidopsis thaliana]
  misc_feature (1)..(121): Homolog of NCBI NO: 21537322 NR Description: flowering protein CONSTANS, putative [Arabidopsis
  misc_feature (1)..(101): Homolog of NCBI NO: 18402914 NR Description: GATA zinc finger protein; protein id: supported by cDNA: 12996. [Arabidopsis thaliana] emb|CAB45082.1~gene_id:MXL8.2~similar to unknown protein
MQRRKGQFAGRASLEGESPAPGCDPGSQGSGLDFASRESMCQNCGTSEKMTPAMRRGPAGPRTLCNACGLMWANKGTLRSCPRAKVESPAVATEQGTSDNKALATLNNNNVAASNGEATSAAEKGVPKAP

SEQ ID NO: 5175 - DNA, 1064 bp, Zea mays subsp. mays
  misc_feature (1)..(1064): Ceres Seq. ID no. 12355457
  misc_feature: MA Experiment ID: 108528 Result: Up-regulated in Transcription
  misc_feature: MA Experiment 108528 PARAMETER Experiment Name: Zm_Imbibed_Seeds_P Parameter: Age (day) Value: 5 vs. 2
  misc_feature: MA Experiment 108528 PARAMETER Experiment Name: Zm_Imbibed_Seeds_P Parameter: Organism Value: Zea mays
  misc_feature: MA Experiment 108528 PARAMETER Experiment Name: Zm_Imbibed_Seeds_P Parameter: Plant Line Value: 35A19
  misc_feature: MA Experiment 108528 PARAMETER Experiment Name: Zm_Imbibed_Seeds_P Parameter: Tissue Value: Aerial vs. Embryo
  misc_feature: MA Experiment ID: 108529 Result: Up-regulated in Transcription
  misc_feature: MA Experiment 108529 PARAMETER Experiment Name: Zm_Imbibed_Seeds_P Parameter: Age (day) Value: 5 vs. 2
  misc_feature: MA Experiment 108529 PARAMETER Experiment Name: Zm_Imbibed_Seeds_P Parameter: Organism Value: Zea mays
  misc_feature: MA Experiment 108529 PARAMETER Experiment Name: Zm_Imbibed_Seeds_P Parameter: Plant Line Value: 35A19
  misc_feature: MA Experiment 108529 PARAMETER Experiment Name: Zm_Imbibed_Seeds_P Parameter: Tissue Value: Roots vs. Embryo
  misc_feature: MA Experiment ID: 108530 Result: Up-regulated in Transcription
  misc_feature: MA Experiment 108530 PARAMETER Experiment Name: Zm_Imbibed_Seeds_P Parameter: Age (day) Value: 6 vs. 2
  misc_feature: MA Experiment 108530 PARAMETER Experiment Name: Zm_Imbibed_Seeds_P Parameter: Organism Value: Zea mays
  misc_feature: MA Experiment 108530 PARAMETER Experiment Name: Zm_Imbibed_Seeds_P Parameter: Plant Line Value: 35A19
  misc_feature: MA Experiment 108530 PARAMETER Experiment Name: Zm_Imbibed_Seeds_P Parameter: Tissue Value: Aerial vs. Embryo
  misc_feature: MA Experiment ID: 108535 Result: Down-regulated in Transcription
  misc_feature: MA Experiment 108535 PARAMETER Experiment Name: Zm_Meristem_P Parameter: Age (day) Value: 8
  misc_feature: MA Experiment 108535 PARAMETER Experiment Name: Zm_Meristem_P Parameter: Organism Value: Zea mays
  misc_feature: MA Experiment 108535 PARAMETER Experiment Name: Zm_Meristem_P Parameter: Plant Line Value: 35A19
  misc_feature: MA Experiment 108535 PARAMETER Experiment Name: Zm_Meristem_P Parameter: Tissue Value: Root Meristem vs. Above Root Meristem
  misc_feature: MA Experiment ID: 108543 Result: Up-regulated in Transcription
  misc_feature: MA Experiment ID: 108546 Result: Up-regulated in Transcription
  misc_feature: MA Experiment 108546 PARAMETER Experiment Name: Zm_Imbibed_Seeds_P Parameter: Age (day) Value: 3 vs. 2
  misc_feature: MA Experiment 108546 PARAMETER Experiment Name: Zm_Imbibed_Seeds_P Parameter: Organism Value: Zea mays
  misc_feature: MA Experiment 108546 PARAMETER Experiment Name: Zm_Imbibed_Seeds_P Parameter: Plant Line Value: 35A19
  misc_feature: MA Experiment 108546 PARAMETER Experiment Name: Zm_Imbibed_Seeds_P Parameter: Tissue Value: Roots vs. Embryo
  misc_feature: MA Experiment ID: 108547 Result: Up-regulated in Transcription
  misc_feature: MA Experiment 108547 PARAMETER Experiment Name: Zm_Imbibed_Seeds_P Parameter: Age (day) Value: 4 vs. 2
  misc_feature: MA Experiment 108547 PARAMETER Experiment Name: Zm_Imbibed_Seeds_P Parameter: Organism Value: Zea mays
  misc_feature: MA Experiment 108547 PARAMETER Experiment Name: Zm_Imbibed_Seeds_P Parameter: Plant Line Value: 35A19
  misc_feature: MA Experiment 108547 PARAMETER Experiment Name: Zm_Imbibed_Seeds_P Parameter: Tissue Value: Aerial vs. Embryo
  misc_feature: MA Experiment ID: 108559 Result: Down-regulated in Transcription
  misc_feature: MA Experiment 108559 PARAMETER Experiment Name: Zm_5mM_NO_P Parameter: Age (day) Value: 8
  misc_feature: MA Experiment 108559 PARAMETER Experiment Name: Zm_5mM_NO_P Parameter: Organism Value: Zea mays
  misc_feature: MA Experiment 108559 PARAMETER Experiment Name: Zm_5mM_NO_P Parameter: Plant Line Value: 35A19
  misc_feature: MA Experiment 108559 PARAMETER Experiment Name: Zm_5mM_NO_P Parameter: Timepoint (hr) Value: 12
  misc_feature: MA Experiment 108559 PARAMETER Experiment Name: Zm_5mM_NO_P Parameter: Tissue Value: Aerial
  misc_feature: MA Experiment 108559 PARAMETER Experiment Name: Zm_5mM_NO_P Parameter: Treatment Value: 5mM NO vs. No Treatment
  misc_feature: MA Experiment ID: 108687 Result: Down-regulated in Transcription
  misc_feature: MA Experiment 108687 PARAMETER Experiment Name: Zm_Embryos-Flowers__P Parameter: Tissue Value: Embryo vs. Aerial+
  misc_feature: MA Experiment ID: 20000108 Result: Down-regulated in Transcription
  misc_feature: MA Experiment 20000108 PARAMETER Experiment Name: Zm_Root-Tips_P Parameter: Age (day) Value: 12
  misc_feature: MA Experiment 20000108 PARAMETER Experiment Name: Zm_Root-Tips_P Parameter: Organism Value: Zea mays
  misc_feature: MA Experiment 20000108 PARAMETER Experiment Name: Zm_Root-Tips_P Parameter: Tissue Value: Root tips vs. Root mid region    35
  misc_feature: MA Experiment 20000108 PARAMETER Experiment Name: Zm_Root-Tips_P Parameter: Tissue Value: Root tips vs. Root mid region   Sequence Listing-Misc Features (4)
  misc_feature: MA Experiment ID: 20000535 Result: Down-regulated in Transcription
  misc_feature: MA Experiment 20000535 PARAMETER Experiment Name: Zm_Hybrid_Seed_Dev_P Parameter: DAP Value: 30 vs. 12
  misc_feature: MA Experiment 20000535 PARAMETER Experiment Name: Zm_Hybrid_Seed_Dev_P Parameter: Organism Value: Zea mays
  misc_feature: MA Experiment 20000535 PARAMETER Experiment Name: Zm_Hybrid_Seed_Dev_P Parameter: Plant Line Value: 35A19
  misc_feature: MA Experiment 20000535 PARAMETER Experiment Name: Zm_Hybrid_Seed_Dev_P Parameter: Tissue Value: Embryo vs. Unfert Floret
aacaaccccggcctgccatgtgccacaaccgtagcctgtagcttcatccgttgcgctgcgcccggttccctcgcgcggtgcggaatttaacatggccgtgccggaggtggtggtcgacggcgtcgtcttcccgccggtggcccgcccgccgggctccgccggctcgcacttcctcggcggcgcaggcgtgcgaggcgtcgagatcggaggcaacttcatcaagttcacggccatcggcgtgtacctggaggacgcggccgtgcccgcgctggccaagaagtggggcggcaagacggccgacgagctcgcctccgacgccgccttcttccgcgacgtcgtcacgggcgacttcgagaagttcacgagggtgacgatgatcctcccgctgacgggcgagcagtacgcggagaaagtgacggagaactgcgtggcgttctggaaggccgccggcctgtacacggacgccgagggcgtcgccgtggagaagttcagggaggtgttcaagccagagactttcgcgccgggcgcctccatcctcttcacgcactcgcccgccggagtcctcaccgtcgccttctccaaggactcgtcggtgccagcggccggcggcgtggcgatcgagaacaagcgcctctgcgaggccgtgctggagtccatcatcggggagcgcggcgtgtcgccggccgcgaagctgagcctcgccgcgagggtgtcggagctcctcgccaaggagaccgccgcggccgccgacgcgccgcaggcggagcccgtctccatcaccgcctgaggcgaggagcgggcgggcgggcgagcgaacgaaccgcgaggagaaaaaaagcaaccagacggttgggcggcacggcgtctcacacctgccgcctgcgcttgcgtgctccggagtccggactggagagacgccgcgcgggtgcagtgcatccgtcgcgtcttgtctgtccgcgctatggcgtcgtgttcctgcctttctggtcgcgtagttgtcttgtgttcgctgttggtcgttctgggtaacatttgaataaaacaagcggatttgttgcacttgc

SEQ ID NO: 5176 - protein, 231 aa, Zea mays subsp. mays; identical to SEQ ID NO: 4436
  peptide (1)..(231): Ceres Seq. ID no. 12355458
  misc_feature (11)..(212): Pfam Name: Chalcone-flavanone isomerase Pfam Description: Chalcone-flavanone isomerase
  misc_feature (11)..(231): Homolog of NCBI NO: 729103 NR Description: CHALCONE--FLAVONONE ISOMERASE (CHALCONE ISOMERASE)
  misc_feature (1)..(230): Homolog of NCBI NO: 20152986 NR Description: chalcone isomerase [Hordeum vulgare subsp.
  misc_feature (2)..(231): Homolog of NCBI NO: 29124145 NR Description: chalcone isomerase [Oryza sativa (japonica
  misc_feature (2)..(231): Homolog of NCBI NO: 20152984 NR Description: chalcone isomerase [Oryza sativa (japonica
  misc_feature (2)..(228): Homolog of NCBI NO: 1705761 NR Description: CHALCONE--FLAVONONE ISOMERASE (CHALCONE
  misc_feature (1)..(228): Homolog of NCBI NO: 5921722 NR Description: Chalcone--flavonone isomerase (Chalcone >gi|3126969|gb|AAC16013.1| chalcone isomerase [Elaeagnus
  misc_feature (1)..(231): Homolog of NCBI NO: 68481 NR Description: chalcone isomerase (EC 5.5.1.6) A - garden
  misc_feature (1)..(231): Homolog of NCBI NO: 116136 NR Description: CHALCONE--FLAVONONE ISOMERASE A (CHALCONE
  misc_feature (1)..(231): Homolog of NCBI NO: 228617 NR Description: chalcone flavanone isomerase
  misc_feature (2)..(211): Homolog of NCBI NO: 4126399 NR Description: chalcone isomerase [Citrus sinensis]

SEQ ID NO: 5177 - protein, 137 aa, Zea mays subsp. mays; identical to SEQ ID NO: 4437
  peptide (1)..(137): Ceres Seq. ID no. 12355459
  misc_feature (1)..(118): Pfam Name: Chalcone-flavanone isomerase Pfam Description: Chalcone-flavanone isomerase
  misc_feature (1)..(137): Homolog of NCBI NO: 729103 NR Description: CHALCONE--FLAVONONE ISOMERASE (CHALCONE ISOMERASE)
  misc_feature (1)..(136): Homolog of NCBI NO: 20152986 NR Description: chalcone isomerase [Hordeum vulgare subsp.
  misc_feature (1)..(137): Homolog of NCBI NO: 29124145 NR Description: chalcone isomerase [Oryza sativa (japonica
  misc_feature (1)..(137): Homolog of NCBI NO: 20152984 NR Description: chalcone isomerase [Oryza sativa (japonica
  misc_feature (1)..(134): Homolog of NCBI NO: 1705761 NR Description: CHALCONE--FLAVONONE ISOMERASE (CHALCONE
  misc_feature (1)..(134): Homolog of NCBI NO: 5921722 NR Description: Chalcone--flavonone isomerase (Chalcone >gi|3126969|gb|AAC16013.1| chalcone isomerase [Elaeagnus
  misc_feature (1)..(137): Homolog of NCBI NO: 68481 NR Description: chalcone isomerase (EC 5.5.1.6) A - garden
  misc_feature (1)..(137): Homolog of NCBI NO: 116136 NR Description: CHALCONE--FLAVONONE ISOMERASE A (CHALCONE
  misc_feature (1)..(137): Homolog of NCBI NO: 228617 NR Description: chalcone flavanone isomerase
  misc_feature (1)..(117): Homolog of NCBI NO: 4126399 NR Description: chalcone isomerase [Citrus sinensis]

SEQ ID NO: 5178 - DNA, 1343 bp, Zea mays subsp. mays
  misc_feature (1)..(1343): Ceres Seq. ID no. 12376422
  misc_feature: MA Experiment ID: 108530 Result: Down-regulated in Transcription
  misc_feature: MA Experiment 108530 PARAMETER Experiment Name: Zm_Imbibed_Seeds_P Parameter: Age (day) Value: 6 vs. 2
  misc_feature: MA Experiment 108530 PARAMETER Experiment Name: Zm_Imbibed_Seeds_P Parameter: Organism Value: Zea mays
  misc_feature: MA Experiment 108530 PARAMETER Experiment Name: Zm_Imbibed_Seeds_P Parameter: Plant Line Value: 35A19
  misc_feature: MA Experiment 108530 PARAMETER Experiment Name: Zm_Imbibed_Seeds_P Parameter: Tissue Value: Aerial vs. Embryo
  misc_feature: MA Experiment ID: 108535 Result: Up-regulated in Transcription
  misc_feature: MA Experiment 108535 PARAMETER Experiment Name: Zm_Meristem_P Parameter: Age (day) Value: 8
  misc_feature: MA Experiment 108535 PARAMETER Experiment Name: Zm_Meristem_P Parameter: Organism Value: Zea mays
  misc_feature: MA Experiment 108535 PARAMETER Experiment Name: Zm_Meristem_P Parameter: Plant Line Value: 35A19
  misc_feature: MA Experiment 108535 PARAMETER Experiment Name: Zm_Meristem_P Parameter: Tissue Value: Root Meristem vs. Above Root Meristem
  misc_feature: MA Experiment ID: 108559 Result: Up-regulated in Transcription
  misc_feature: MA Experiment 108559 PARAMETER Experiment Name: Zm_5mM_NO_P Parameter: Age (day) Value: 8
  misc_feature: MA Experiment 108559 PARAMETER Experiment Name: Zm_5mM_NO_P Parameter: Organism Value: Zea mays
  misc_feature: MA Experiment 108559 PARAMETER Experiment Name: Zm_5mM_NO_P Parameter: Plant Line Value: 35A19
  misc_feature: MA Experiment 108559 PARAMETER Experiment Name: Zm_5mM_NO_P Parameter: Timepoint (hr) Value: 12
  misc_feature: MA Experiment 108559 PARAMETER Experiment Name: Zm_5mM_NO_P Parameter: Tissue Value: Aerial
  misc_feature: MA Experiment 108559 PARAMETER Experiment Name: Zm_5mM_NO_P Parameter: Treatment Value: 5mM NO vs. No Treatment
  misc_feature: MA Experiment ID: 108689 Result: Down-regulated in Transcription
  misc_feature: MA Experiment 108689 PARAMETER Experiment Name: Zm_Drought_Roots_P Parameter: Age (day) Value: 9
  misc_feature: MA Experiment 108689 PARAMETER Experiment Name: Zm_Drought_Roots_P Parameter: Organism Value: Zea mays
  misc_feature: MA Experiment 108689 PARAMETER Experiment Name: Zm_Drought_Roots_P Parameter: Plant Line Value: 35A19
  misc_feature: MA Experiment 108689 PARAMETER Experiment Name: Zm_Drought_Roots_P Parameter: Timepoint (hr) Value: 24
  misc_feature: MA Experiment 108689 PARAMETER Experiment Name: Zm_Drought_Roots_P Parameter: Tissue Value: Roots
  misc_feature: MA Experiment 108689 PARAMETER Experiment Name: Zm_Drought_Roots_P Parameter: Treatment Value: Drought vs. No Drought
  misc_feature: MA Experiment ID: 20000108 Result: Up-regulated in Transcription
  misc_feature: MA Experiment 20000108 PARAMETER Experiment Name: Zm_Root-Tips_P Parameter: Age (day) Value: 12
  misc_feature: MA Experiment 20000108 PARAMETER Experiment Name: Zm_Root-Tips_P Parameter: Organism Value: Zea mays
  misc_feature: MA Experiment 20000108 PARAMETER Experiment Name: Zm_Root-Tips_P Parameter: Tissue Value: Root tips vs. Root mid region    35
  misc_feature: MA Experiment 20000108 PARAMETER Experiment Name: Zm_Root-Tips_P Parameter: Tissue Value: Root tips vs. Root mid region   Sequence Listing-Misc Features (4)
  misc_feature: MA Experiment ID: 20000487 Result: Up-regulated in Transcription
  misc_feature: MA Experiment 20000487 PARAMETER Experiment Name: Zm_50mM_NH4NO3_L_to_H_P Parameter: Organism Value: Zea mays
  misc_feature: MA Experiment 20000487 PARAMETER Experiment Name: Zm_50mM_NH4NO3_L_to_H_P Parameter: Timepoint (hr) Value: 4
  misc_feature: MA Experiment 20000487 PARAMETER Experiment Name: Zm_50mM_NH4NO3_L_to_H_P Parameter: Tissue Value: Leaves
  misc_feature: MA Experiment 20000487 PARAMETER Experiment Name: Zm_50mM_NH4NO3_L_to_H_P Parameter: Treatment Value: 50mM NH4NO3 vs. 100mM Mannitol
  misc_feature: MA Experiment ID: 20000488 Result: Up-regulated in Transcription
  misc_feature: MA Experiment 20000488 PARAMETER Experiment Name: Zm_50mM_NH4NO3_L_to_H_P Parameter: Organism Value: Zea mays
  misc_feature: MA Experiment 20000488 PARAMETER Experiment Name: Zm_50mM_NH4NO3_L_to_H_P Parameter: Timepoint (hr) Value: 8
  misc_feature: MA Experiment 20000488 PARAMETER Experiment Name: Zm_50mM_NH4NO3_L_to_H_P Parameter: Tissue Value: Leaves
  misc_feature: MA Experiment 20000488 PARAMETER Experiment Name: Zm_50mM_NH4NO3_L_to_H_P Parameter: Treatment Value: 50mM NH4NO3 vs. 100mM Mannitol
  misc_feature: MA Experiment ID: 20001606 Result: Up-regulated in Transcription
  misc_feature: MA Experiment 20001606 PARAMETER Experiment Name: Zm_50ppm_KNO3_L-to-H_P Parameter: Age (day) Value: 19
  misc_feature: MA Experiment 20001606 PARAMETER Experiment Name: Zm_50ppm_KNO3_L-to-H_P Parameter: Organism Value: Zea mays
  misc_feature: MA Experiment 20001606 PARAMETER Experiment Name: Zm_50ppm_KNO3_L-to-H_P Parameter: Plant Line Value: 35A19
  misc_feature: MA Experiment 20001606 PARAMETER Experiment Name: Zm_50ppm_KNO3_L-to-H_P Parameter: Timepoint (hr) Value: 8
  misc_feature: MA Experiment 20001606 PARAMETER Experiment Name: Zm_50ppm_KNO3_L-to-H_P Parameter: Tissue Value: Shoots
  misc_feature: MA Experiment 20001606 PARAMETER Experiment Name: Zm_50ppm_KNO3_L-to-H_P Parameter: Treatment Value: 50ppm KNO3 vs. 50ppm KCl
aggccagcacaaaaccactcgatagaaaagcccccctcaaaacccacggcgccgccgcagccgcgttcacgaagcttggggaggcgagcaccccgatccggcgaggtgccgcgagcgaggcagcgatgagaggccgtgcgtcccatctccgcgcgctcctctcgcgagcgctctctccaagccttcctcctcctggtcgcgctctgcctcaggtcactaggcccggtgcgtctccgttcggagctggattcgtggggcgcgcgcgcttcttctccatcgacgcctcggctgcgacgcagggcgggtcgaagccccctgcgccgccgccggcgggtactgcgggcggcgagggagggggtggtggtcagtctgggaaatctgaacaagcggacgccgggaaagccgtccgcggagggccggtgtcttggctcagttttctactcctgcttgtgactggaggagggataatcgtgtactacgacaaagaaaagaagcgtcacattgaagaattgaagaatagaacaagtgctgtgaagcctggacaatcagtaggcactgcagccattggcggtccattcaagcttttgaatcatgatggaaaacctgttactgaaaaggatttcttgggcaaatggacgctgctttattttggatttacacactgtcctgacatttgtccagatgaactccagaaaatggctgcagcgattgacaaaattaaggaaaaggcaaaactggatgttgtgccagtttttattacagttgatcctgaaagagatactgttgagcaggttcgggactatgttaaagagttccatccagatctagtaggcctcacgggcacgacagatgaagtaagacaagttgcacgtgcttatcgagtttactatatgaagacagaggaggagggttctgactaccttgttgatcactcaattgtcatgtacctgatggacccagagatgaagtttgtcaagttttatggcaagaactacgacacagattcccttgctgacggtatcgttaaagaaattaaagagcacaagtaaacagtagttggaatgccactttgcaacgtcagccttgtttctgaatttctcccgagagttttgttaaatcaagcaaaaaccaaatggcacacgagatcatgtggcaatagctgatgacatttgaatctcgcggcggcttttatttcagcagattcgggtgcacatgttgcggttttgtgcacgtttttgtcacggcaaacttctgcgttattagcttgggacgctgttcattgctgaatgtaattttatttgcatagtttcataccagttcaatatgaaacctttttccccttc

SEQ ID NO: 5179 - protein, 348 aa, Zea mays subsp. mays
  peptide (1)..(348): Ceres Seq. ID no. 12376423
  misc_feature (145)..(332): Pfam Name: SCO1/SenC Pfam Description: SCO1/SenC
  misc_feature (112)..(348): Homolog of NCBI NO: 6403490 NR Description: putative SCO1 protein [Arabidopsis thaliana]
  misc_feature (112)..(348): Homolog of NCBI NO: 18398306 NR Description: putative SCO1 protein; protein id: At3g08950.1, by cDNA: 142032., supported by cDNA: gi_17979326, supported by gi_20465762 [Arabidopsis thaliana] >gi|17979327|gb|AAL49889.1|
  misc_feature (130)..(348): Homolog of NCBI NO: 4759068 NR Description: cytochrome oxidase deficient homolog 1 [Homo >gi|8134663|sp|O75880|SCO1_HUMAN SCO1 protein homolog,
  misc_feature (138)..(347): Homolog of NCBI NO: 40740887 NR Description: hypothetical protein AN4842.2 [Aspergillus
  misc_feature (129)..(344): Homolog of NCBI NO: 19920710 NR Description: CG8885-PA [Drosophila melanogaster]
  misc_feature (165)..(348): Homolog of NCBI NO: 4406651 NR Description: h-sco1 [Homo sapiens]
  misc_feature (138)..(340): Homolog of NCBI NO: 19112079 NR Description: putative cytochrome C oxidase assembly protein
  misc_feature (130)..(347): Homolog of NCBI NO: 6319511 NR Description: inner mitochondrial membrane protein; Sco1p cerevisiae] >gi|134307|sp|P23833|SCO1_YEAST SCO1 protein,
  misc_feature (142)..(347): Homolog of NCBI NO: 6319498 NR Description: Originally identified as a multicopy suppressor a respiratory defective mutant; homolog of Sco1p; Sco2p
  misc_feature (103)..(340): Homolog of NCBI NO: 4826992 NR Description: cytochrome oxidase deficient homolog 2 [Homo >gi|3217034|emb|CAA16671.1| unnamed protein product [Homo
ASTKPLDRKAPLKTHGAAAAAFTKLGEASTPIRRGAASEAAMRGRASHLRALLSRALSPSLPPPGRALPQVTRPGASPFGAGFVGRARFFSIDASAATQGGSKPPAPPPAGTAGGEGGGGGQSGKSEQADAGKAVRGGPVSWLSFLLLLVTGGGIIVYYDKEKKRHIEELKNRTSAVKPGQSVGTAAIGGPFKLLNHDGKPVTEKDFLGKWTLLYFGFTHCPDICPDELQKMAAAIDKIKEKAKLDVVPVFITVDPERDTVEQVRDYVKEFHPDLVGLTGTTDEVRQVARAYRVYYMKTEEEGSDYLVDHSIVMYLMDPEMKFVKFYGKNYDTDSLADGIVKEIKEHK

SEQ ID NO: 5180 - protein, 307 aa, Zea mays subsp. mays
  peptide (1)..(307): Ceres Seq. ID no. 12376424
  misc_feature (104)..(291): Pfam Name: SCO1/SenC Pfam Description: SCO1/SenC
  misc_feature (71)..(307): Homolog of NCBI NO: 6403490 NR Description: putative SCO1 protein [Arabidopsis thaliana]
  misc_feature (71)..(307): Homolog of NCBI NO: 18398306 NR Description: putative SCO1 protein; protein id: At3g08950.1, by cDNA: 142032., supported by cDNA: gi_17979326, supported by gi_20465762 [Arabidopsis thaliana] >gi|17979327|gb|AAL49889.1|
  misc_feature (89)..(307): Homolog of NCBI NO: 4759068 NR Description: cytochrome oxidase deficient homolog 1 [Homo >gi|8134663|sp|O75880|SCO1_HUMAN SCO1 protein homolog,
  misc_feature (97)..(306): Homolog of NCBI NO: 40740887 NR Description: hypothetical protein AN4842.2 [Aspergillus
  misc_feature (88)..(303): Homolog of NCBI NO: 19920710 NR Description: CG8885-PA [Drosophila melanogaster]
  misc_feature (124)..(307): Homolog of NCBI NO: 4406651 NR Description: h-sco1 [Homo sapiens]
  misc_feature (97)..(299): Homolog of NCBI NO: 19112079 NR Description: putative cytochrome C oxidase assembly protein
  misc_feature (89)..(306): Homolog of NCBI NO: 6319511 NR Description: inner mitochondrial membrane protein; Sco1p cerevisiae] >gi|134307|sp|P23833|SCO1_YEAST SCO1 protein,
  misc_feature (101)..(306): Homolog of NCBI NO: 6319498 NR Description: Originally identified as a multicopy suppressor a respiratory defective mutant; homolog of Sco1p; Sco2p
  misc_feature (62)..(299): Homolog of NCBI NO: 4826992 NR Description: cytochrome oxidase deficient homolog 2 [Homo >gi|3217034|emb|CAA16671.1| unnamed protein product [Homo
MRGRASHLRALLSRALSPSLPPPGRALPQVTRPGASPFGAGFVGRARFFSIDASAATQGGSKPPAPPPAGTAGGEGGGGGQSGKSEQADAGKAVRGGPVSWLSFLLLLVTGGGIIVYYDKEKKRHIEELKNRTSAVKPGQSVGTAAIGGPFKLLNHDGKPVTEKDFLGKWTLLYFGFTHCPDICPDELQKMAAAIDKIKEKAKLDVVPVFITVDPERDTVEQVRDYVKEFHPDLVGLTGTTDEVRQVARAYRVYYMKTEEEGSDYLVDHSIVMYLMDPEMKFVKFYGKNYDTDSLADGIVKEIKEHK

SEQ ID NO: 5181 - DNA, 1042 bp, Zea mays subsp. mays
  misc_feature (1)..(1042): Ceres Seq. ID no. 12435100
  misc_feature: MA Experiment ID: 108535 Result: Up-regulated in Transcription
  misc_feature: MA Experiment 108535 PARAMETER Experiment Name: Zm_Meristem_P Parameter: Age (day) Value: 8
  misc_feature: MA Experiment 108535 PARAMETER Experiment Name: Zm_Meristem_P Parameter: Organism Value: Zea mays
  misc_feature: MA Experiment 108535 PARAMETER Experiment Name: Zm_Meristem_P Parameter: Plant Line Value: 35A19
  misc_feature: MA Experiment 108535 PARAMETER Experiment Name: Zm_Meristem_P Parameter: Tissue Value: Root Meristem vs. Above Root Meristem
  misc_feature: MA Experiment ID: 20000480 Result: Up-regulated in Transcription
  misc_feature: MA Experiment 20000480 PARAMETER Experiment Name: Zm_Drought_P Parameter: Age (day) Value: 11
  misc_feature: MA Experiment 20000480 PARAMETER Experiment Name: Zm_Drought_P Parameter: Organism Value: Zea mays
  misc_feature: MA Experiment 20000480 PARAMETER Experiment Name: Zm_Drought_P Parameter: Plant Line Value: 35A19
  misc_feature: MA Experiment 20000480 PARAMETER Experiment Name: Zm_Drought_P Parameter: Timepoint (hr) Value: 72
  misc_feature: MA Experiment 20000480 PARAMETER Experiment Name: Zm_Drought_P Parameter: Tissue Value: Aerial
  misc_feature: MA Experiment 20000480 PARAMETER Experiment Name: Zm_Drought_P Parameter: Treatment Value: Drought vs. No Drought
  misc_feature: MA Experiment ID: 20000534 Result: Down-regulated in Transcription
  misc_feature: MA Experiment 20000534 PARAMETER Experiment Name: Zm_Hybrid_Pollen_P Parameter: Age (day) Value: 8
  misc_feature: MA Experiment 20000534 PARAMETER Experiment Name: Zm_Hybrid_Pollen_P Parameter: Organism Value: Zea mays
  misc_feature: MA Experiment 20000534 PARAMETER Experiment Name: Zm_Hybrid_Pollen_P Parameter: Plant Line Value: 35A19
  misc_feature: MA Experiment 20000534 PARAMETER Experiment Name: Zm_Hybrid_Pollen_P Parameter: Tissue Value: Pollen vs. Aerial
aagaaaaagccccaaatacacagcctaggcccaccaattcggacacgctcacacgccagagaagagagaggaaaggaacccaacacactctctcgcgcggcaagagcttcccggcccgaaaccgaaagcaccaccaatctctgcgtttttcgtctgcngcggcggcggcggcagcagcggaggaggtggacgagatgctgtccgccgacatccccccaaaccagaccatctacctcaacaacctcaacgagaaggtcaagaaagaagagttgaagagatcgctttatgccctgtgctcgcagtatggaaggatactggatgtggtggctctgaaaacacagaaactgagagggcaggcatgggtggtgtttagcgagattacagctgctaccaatgctttccgtggattgcaagactttgatttctacggcaaaaaaatgcgagtacaatatgcaaaaacaaaatcagactgtattgcaaaagaagatggtacttatgcacctaaggagaaaaggaagaagcaagaggagaaagctgctgagaaaaaacgacgagcagaagaggcacagcaagctggccccaatgctgctgctgctcaaagcaatggaactggctatcaagcgtctcgtctgggcaaggcttcgcaggagccacctgctcctccgaacaacatcctcttcatccagaacttgccagaccagaccacgagcatgatgctccagatcctgttccagcagtatcccggcttccgggaagtccggatgatcgaagccaaaccaggcattgcctttgtggagttcgaggacgacggccagtccatggtggcgatgcaggctctccagggcttcaagatcaccccggagaaccccatggctatatcctatgccaaaaaatgagaaccctcgcggaatccctgtacccaatacccataatattttccgttccgccttccggaatcgagccacagtatctagtctactttccggccatgtatttttggaaagcacttgcttaatttagaagttagactcttgccactttc

SEQ ID NO: 5182 - protein, 297 aa, Zea mays subsp. mays
  peptide (1)..(297): Ceres Seq. ID no. 12435101
  misc_feature (225)..(292): Pfam Name: RNA recognition motif. (a.k.a. RRM, RBD, or RNP domain) Pfam Description: RNA recognition motif. (a.k.a. RRM, RBD, or RNP
  misc_feature (65)..(297): Homolog of NCBI NO: 421960 NR Description: small nuclear ribonucleoprotein U2B'' - potato
  misc_feature (65)..(297): Homolog of NCBI NO: 15227729 NR Description: small nuclear ribonucleoprotein U2B, putative; id: At2g30260.1, supported by cDNA: 34995. [Arabidopsis thaliana]
  misc_feature (65)..(297): Homolog of NCBI NO: 30679892 NR Description: small nuclear ribonucleoprotein U2B (spliceosomal putative [Arabidopsis thaliana] >gi|23296313|gb|AAN13038.1|
  misc_feature (65)..(297): Homolog of NCBI NO: 30679897 NR Description: small nuclear ribonucleoprotein U2B (spliceosomal
  misc_feature (65)..(297): Homolog of NCBI NO: 21593001 NR Description: putative small nuclear ribonucleoprotein U2B
  misc_feature (65)..(297): Homolog of NCBI NO: 25294325 NR Description: hypothetical protein [imported] - Arabidopsis >gi|8954049|gb|AAF82223.1|AC067971_31 Strong similarity to a
  misc_feature (65)..(297): Homolog of NCBI NO: 19347861 NR Description: putative spliceosomal protein (U2B) [Arabidopsis
  misc_feature (69)..(297): Homolog of NCBI NO: 2119045 NR Description: small nuclear ribonucleoprotein U1A - potato
  misc_feature (51)..(297): Homolog of NCBI NO: 34897622 NR Description: putative small nuclear ribonucleoprotein U1A sativa] >gi|14595706|gb|AAK70905.1| putative small nuclear
  misc_feature (60)..(297): Homolog of NCBI NO: 15226631 NR Description: small nuclear ribonucleoprotein U1A; protein id: supported by cDNA: gi_15450590, supported by cDNA: gi_16649010, by cDNA: gi_20259985 [Arabidopsis thaliana]
  misc_feature (52)..(52): Xaa is any aa, unknown or other
EKAPNTQPRPTNSDTLTRQRRERKGTQHTLSRGKSFPARNRKHHQSLRFSSXAAAAAAAEEVDEMLSADIPPNQTIYLNNLNEKVKKEELKRSLYALCSQYGRILDVVALKTQKLRGQAWVVFSEITAATNAFRGLQDFDFYGKKMRVQYAKTKSDCIAKEDGTYAPKEKRKKQEEKAAEKKRRAEEAQQAGPNAAAAQSNGTGYQASRLGKASQEPPAPPNNILFIQNLPDQTTSMMLQILFQQYPGFREVRMIEAKPGIAFVEFEDDGQSMVAMQALQGFKITPENPMAISYAKK

SEQ ID NO: 5183 - protein, 233 aa, Zea mays subsp. mays
  peptide (1)..(233): Ceres Seq. ID no. 12435102
  misc_feature (161)..(228): Pfam Name: RNA recognition motif. (a.k.a. RRM, RBD, or RNP domain) Pfam Description: RNA recognition motif. (a.k.a. RRM, RBD, or RNP
  misc_feature (1)..(233): Homolog of NCBI NO: 421960 NR Description: small nuclear ribonucleoprotein U2B'' - potato
  misc_feature (1)..(233): Homolog of NCBI NO: 15227729 NR Description: small nuclear ribonucleoprotein U2B, putative; id: At2g30260.1, supported by cDNA: 34995. [Arabidopsis thaliana]
  misc_feature (1)..(233): Homolog of NCBI NO: 30679892 NR Description: small nuclear ribonucleoprotein U2B (spliceosomal putative [Arabidopsis thaliana] >gi|23296313|gb|AAN13038.1|
  misc_feature (1)..(233): Homolog of NCBI NO: 30679897 NR Description: small nuclear ribonucleoprotein U2B (spliceosomal
  misc_feature (1)..(233): Homolog of NCBI NO: 21593001 NR Description: putative small nuclear ribonucleoprotein U2B
  misc_feature (1)..(233): Homolog of NCBI NO: 25294325 NR Description: hypothetical protein [imported] - Arabidopsis >gi|8954049|gb|AAF82223.1|AC067971_31 Strong similarity to a
  misc_feature (1)..(233): Homolog of NCBI NO: 19347861 NR Description: putative spliceosomal protein (U2B) [Arabidopsis
  misc_feature (5)..(233): Homolog of NCBI NO: 2119045 NR Description: small nuclear ribonucleoprotein U1A - potato
  misc_feature (1)..(233): Homolog of NCBI NO: 34897622 NR Description: putative small nuclear ribonucleoprotein U1A sativa] >gi|14595706|gb|AAK70905.1| putative small nuclear
  misc_feature (1)..(233): Homolog of NCBI NO: 15226631 NR Description: small nuclear ribonucleoprotein U1A; protein id: supported by cDNA: gi_15450590, supported by cDNA: gi_16649010, by cDNA: gi_20259985 [Arabidopsis thaliana]
MLSADIPPNQTIYLNNLNEKVKKEELKRSLYALCSQYGRILDVVALKTQKLRGQAWVVFSEITAATNAFRGLQDFDFYGKKMRVQYAKTKSDCIAKEDGTYAPKEKRKKQEEKAAEKKRRAEEAQQAGPNAAAAQSNGTGYQASRLGKASQEPPAPPNNILFIQNLPDQTTSMMLQILFQQYPGFREVRMIEAKPGIAFVEFEDDGQSMVAMQALQGFKITPENPMAISYAKK

SEQ ID NO: 5184 - protein, 152 aa, Zea mays subsp. mays
  peptide (1)..(152): Ceres Seq. ID no. 12435103
  misc_feature (80)..(147): Pfam Name: RNA recognition motif. (a.k.a. RRM, RBD, or RNP domain) Pfam Description: RNA recognition motif. (a.k.a. RRM, RBD, or RNP
  misc_feature (1)..(152): Homolog of NCBI NO: 421960 NR Description: small nuclear ribonucleoprotein U2B'' - potato
  misc_feature (1)..(152): Homolog of NCBI NO: 15227729 NR Description: small nuclear ribonucleoprotein U2B, putative; id: At2g30260.1, supported by cDNA: 34995. [Arabidopsis thaliana]
  misc_feature (1)..(152): Homolog of NCBI NO: 30679892 NR Description: small nuclear ribonucleoprotein U2B (spliceosomal putative [Arabidopsis thaliana] >gi|23296313|gb|AAN13038.1|
  misc_feature (1)..(152): Homolog of NCBI NO: 30679897 NR Description: small nuclear ribonucleoprotein U2B (spliceosomal
  misc_feature (1)..(152): Homolog of NCBI NO: 21593001 NR Description: putative small nuclear ribonucleoprotein U2B
  misc_feature (1)..(152): Homolog of NCBI NO: 25294325 NR Description: hypothetical protein [imported] - Arabidopsis >gi|8954049|gb|AAF82223.1|AC067971_31 Strong similarity to a
  misc_feature (1)..(152): Homolog of NCBI NO: 19347861 NR Description: putative spliceosomal protein (U2B) [Arabidopsis
  misc_feature (1)..(152): Homolog of NCBI NO: 2119045 NR Description: small nuclear ribonucleoprotein U1A - potato
  misc_feature (1)..(152): Homolog of NCBI NO: 34897622 NR Description: putative small nuclear ribonucleoprotein U1A sativa] >gi|14595706|gb|AAK70905.1| putative small nuclear
  misc_feature (1)..(152): Homolog of NCBI NO: 15226631 NR Description: small nuclear ribonucleoprotein U1A; protein id: supported by cDNA: gi_15450590, supported by cDNA: gi_16649010, by cDNA: gi_20259985 [Arabidopsis thaliana]
MRVQYAKTKSDCIAKEDGTYAPKEKRKKQEEKAAEKKRRAEEAQQAGPNAAAAQSNGTGYQASRLGKASQEPPAPPNNILFIQNLPDQTTSMMLQILFQQYPGFREVRMIEAKPGIAFVEFEDDGQSMVAMQALQGFKITPENPMAISYAKK

SEQ ID NO: 5185 - DNA, 1346 bp, Zea mays subsp. mays
  misc_feature (1)..(1346): Ceres Seq. ID no. 12373672
  misc_feature: MA Experiment ID: 108522 Result: Down-regulated in Transcription
  misc_feature: MA Experiment 108522 PARAMETER Experiment Name: Zm_42deg_Heat_P Parameter: Age (day) Value: 8
  misc_feature: MA Experiment 108522 PARAMETER Experiment Name: Zm_42deg_Heat_P Parameter: Organism Value: Zea mays
  misc_feature: MA Experiment 108522 PARAMETER Experiment Name: Zm_42deg_Heat_P Parameter: Plant Line Value: 35A19
  misc_feature: MA Experiment 108522 PARAMETER Experiment Name: Zm_42deg_Heat_P Parameter: Temperature (deg C) Value: 42 vs. 22
  misc_feature: MA Experiment 108522 PARAMETER Experiment Name: Zm_42deg_Heat_P Parameter: Timepoint (hr) Value: 1
  misc_feature: MA Experiment 108522 PARAMETER Experiment Name: Zm_42deg_Heat_P Parameter: Tissue Value: Aerial
aaacatagaggcattccgcagtccgcagtccatccgcagtccgcagtccgcacgcacggacgcgccctcccagatctcccgcctccggcaaacaaaatgcccccactctcaccgcccgcatcgctgacccccgctgctggcggtcggcgacggtggaagtgccgcctcagtcccactatcgcacgtgaccgctgctacactcgctccttccgctccgcggggctccgcccggcggccattccgctccccgatggcgccgtctgtacacctgtggctcccgcctcctgccgccgaccccgccaagcccctataccctgttctgcttctccacggcttcggcgcacaagccacctggcagtgggcgcccttcctcggcccgctcctcgctgccggtctggccccctatgtcccggacctcgtcttctttggcgcctcatcctcccccgcagcagaccgctccccggtctatcaggctgcctgtgttgccgccgctatggccgcgcttcctggcgccccgcagcggtacgccgtcgtcggggtcagttacggcggcttcgtagcataccacctcgcccacgcgtttccggcagcggtggagcggcttgtactagtcgcggccggtgtttgcctcgaggaggccgatctggccgcggggctctttgccgttgaggatatcgccgaggctgcaagtcttttgctgccccagcggccggaggatctccggaggttggtggggctcaccttctgccgccctcagcggttcatgccgtcctgtttcatcagagattacatcagggttatgtgcacggaaaatgtaaaagagaagagggagttgctgtatgcattgatcaatggcaggaagctttcagaccttcctaaaattaaccagcaaaccttgataatttggggagagcaggaccgggtctttccattggaacttggattacggctgaaaaggcatctgggtgatacttccgaactaatcattgtcaagaatgccggtcatgccataaatcgcgaaaagccagcagaactttgcagactgataaagcactacatcgttgatccctcagtcaaatgtcgagatgaccgtaagggatcttggaagaatgcgataaagaggtttgttgggtcgagcctgaggaaggtggactcttctcgaccgctgctatagcaattgacgtatatatattgacttttacgtgcagcagatttgttatctgattgtgacacgcaattaagtaattaacgatgtgtaatgtccagtagccactattattgtgtaactagcattggcagacatctgttcaaaaaatacttgtgcaatatgtataatgcaaatgatt

SEQ ID NO: 5186 - protein, 307 aa, Zea mays subsp. mays
  peptide (1)..(307): Ceres Seq. ID no. 12373673
  misc_feature (90)..(268): Pfam Name: alpha/beta hydrolase fold Pfam Description: alpha/beta hydrolase fold
  misc_feature (1)..(299): Homolog of NCBI NO: 37533664 NR Description: putative hydrolase [Oryza sativa (japonica >gi|19920100|gb|AAM08532.1| Putative hydrolase [Oryza sativa]
  misc_feature (4)..(282): Homolog of NCBI NO: 33146617 NR Description: hydrolase-like protein [Oryza sativa (japonica
  misc_feature (6)..(270): Homolog of NCBI NO: 18420566 NR Description: Expressed protein; protein id: At4g39955.1,
  misc_feature (6)..(270): Homolog of NCBI NO: 21536873 NR Description: putative hydrolase [Arabidopsis thaliana]
  misc_feature (4)..(272): Homolog of NCBI NO: 15242419 NR Description: putative hydrolase; protein id: At5g09430.1 thaliana] >gi|9955530|emb|CAC05469.1| putative hydrolase
  misc_feature (5)..(274): Homolog of NCBI NO: 18411865 NR Description: hypothetical protein; protein id: At1g78210.1, by cDNA: gi_19699018 [Arabidopsis thaliana] unknown protein [Arabidopsis thaliana]
  misc_feature (2)..(182): Homolog of NCBI NO: 27436747 NR Description: Hypothetical protein [Oryza sativa (japonica
  misc_feature (183)..(272): Homolog of NCBI NO: 27436747 NR Description: Hypothetical protein [Oryza sativa (japonica
  misc_feature (4)..(274): Homolog of NCBI NO: 22326938 NR Description: similar to putative hydrolase; protein id: [Arabidopsis thaliana] >gi|29294062|gb|AAO73899.1| hydrolase,
  misc_feature (4)..(270): Homolog of NCBI NO: 30689631 NR Description: hydrolase, alpha/beta fold family [Arabidopsis
MAPSVHLWLPPPAADPAKPLYPVLLLHGFGAQATWQWAPFLGPLLAAGLAPYVPDLVFFGASSSPAADRSPVYQAACVAAAMAALPGAPQRYAVVGVSYGGFVAYHLAHAFPAAVERLVLVAAGVCLEEADLAAGLFAVEDIAEAASLLLPQRPEDLRRLVGLTFCRPQRFMPSCFIRDYIRVMCTENVKEKRELLYALINGRKLSDLPKINQQTLIIWGEQDRVFPLELGLRLKRHLGDTSELIIVKNAGHAINREKPAELCRLIKHYIVDPSVKCRDDRKGSWKNAIKRFVGSSLRKVDSSRPLL

SEQ ID NO: 5187 - protein, 226 aa, Zea mays subsp. mays
  peptide (1)..(226): Ceres Seq. ID no. 12373674
  misc_feature (9)..(187): Pfam Name: alpha/beta hydrolase fold Pfam Description: alpha/beta hydrolase fold
  misc_feature (1)..(189): Homolog of NCBI NO: 30689631 NR Description: hydrolase, alpha/beta fold family [Arabidopsis
  misc_feature (1)..(218): Homolog of NCBI NO: 37533664 NR Description: putative hydrolase [Oryza sativa (japonica >gi|19920100|gb|AAM08532.1| Putative hydrolase [Oryza sativa]
  misc_feature (1)..(201): Homolog of NCBI NO: 33146617 NR Description: hydrolase-like protein [Oryza sativa (japonica
  misc_feature (1)..(189): Homolog of NCBI NO: 18420566 NR Description: Expressed protein; protein id: At4g39955.1,
  misc_feature (1)..(189): Homolog of NCBI NO: 21536873 NR Description: putative hydrolase [Arabidopsis thaliana]
  misc_feature (1)..(191): Homolog of NCBI NO: 15242419 NR Description: putative hydrolase; protein id: At5g09430.1 thaliana] >gi|9955530|emb|CAC05469.1| putative hydrolase
  misc_feature (1)..(193): Homolog of NCBI NO: 18411865 NR Description: hypothetical protein; protein id: At1g78210.1, by cDNA: gi_19699018 [Arabidopsis thaliana] unknown protein [Arabidopsis thaliana]
  misc_feature (1)..(101): Homolog of NCBI NO: 27436747 NR Description: Hypothetical protein [Oryza sativa (japonica
  misc_feature (102)..(191): Homolog of NCBI NO: 27436747 NR Description: Hypothetical protein [Oryza sativa (japonica
  misc_feature (1)..(193): Homolog of NCBI NO: 22326938 NR Description: similar to putative hydrolase; protein id: [Arabidopsis thaliana] >gi|29294062|gb|AAO73899.1| hydrolase,
MAALPGAPQRYAVVGVSYGGFVAYHLAHAFPAAVERLVLVAAGVCLEEADLAAGLFAVEDIAEAASLLLPQRPEDLRRLVGLTFCRPQRFMPSCFIRDYIRVMCTENVKEKRELLYALINGRKLSDLPKINQQTLIIWGEQDRVFPLELGLRLKRHLGDTSELIIVKNAGHAINREKPAELCRLIKHYIVDPSVKCRDDRKGSWKNAIKRFVGSSLRKVDSSRPLL

SEQ ID NO: 5188 - protein, 222 aa, Zea mays subsp. mays
  peptide (1)..(222): Ceres Seq. ID no. 12373675
  misc_feature (33)..(85): Homolog of NCBI NO: 33146617 NR Description: hydrolase-like protein [Oryza sativa (japonica
  misc_feature (26)..(99): Homolog of NCBI NO: 37533664 NR Description: putative hydrolase [Oryza sativa (japonica >gi|19920100|gb|AAM08532.1| Putative hydrolase [Oryza sativa]
KHRGIPQSAVHPQSAVRTHGRALPDLPPPANKMPPLSPPASLTPAAGGRRRWKCRLSPTIARDRCYTRSFRSAGLRPAAIPLPDGAVCTPVAPASCRRPRQAPIPCSASPRLRRTSHLAVGALPRPAPRCRSGPLCPGPRLLWRLILPRSRPLPGLSGCLCCRRYGRASWRPAAVRRRRGQLRRLRSIPPRPRVSGSGGAACTSRGRCLPRGGRSGRGALCR

SEQ ID NO: 5189 - DNA, 1932 bp, Zea mays subsp. mays
  misc_feature (1)..(1932): Ceres Seq. ID no. 13637288
  misc_feature: MA Experiment ID: 108522 Result: Up-regulated in Transcription
  misc_feature: MA Experiment 108522 PARAMETER Experiment Name: Zm_42deg_Heat_P Parameter: Age (day) Value: 8
  misc_feature: MA Experiment 108522 PARAMETER Experiment Name: Zm_42deg_Heat_P Parameter: Organism Value: Zea mays
  misc_feature: MA Experiment 108522 PARAMETER Experiment Name: Zm_42deg_Heat_P Parameter: Plant Line Value: 35A19
  misc_feature: MA Experiment 108522 PARAMETER Experiment Name: Zm_42deg_Heat_P Parameter: Temperature (deg C) Value: 42 vs. 22
  misc_feature: MA Experiment 108522 PARAMETER Experiment Name: Zm_42deg_Heat_P Parameter: Timepoint (hr) Value: 1
  misc_feature: MA Experiment 108522 PARAMETER Experiment Name: Zm_42deg_Heat_P Parameter: Tissue Value: Aerial
aaaaaggggaaaaaaaggagagagaacacacacacacacaaaccccaatcccctgcggcggcgatggacccgtcatcggcgggctccggcggcaactccctcccgtccgtcggccccgacgggcagaagcggcgcgtgtgctacttctacgacccggatgtgggcaactactactacgggcagggccatccgatgaagccgcaccgcatccggatgacgcactcgctgctggcgcgctacggcctcctcaaccagatgcaggtgtaccgccccaacccggcccgcgaccgcgacctctgccgcttccacgccgacgactacatcaacttcctgcgctccgtcacgccggaaacgcagcaggaccagatccgcctgctcaagcgcttcaacgtcggcgaggactgccccgtcttcgacggcctctacagcttctgccagacctatgcgggcgcctccgtcggcggggccgtcaagctcaaccacggccatgacatcgcaatcaactggtcggggggcctgcaccacgccaagaagtgcgaggcgtcgggcttctgctacgtcaatgacatcgtgctcgccatactcgagctgctcaagcatcacgagagagttctgtatgtcgatatcgatatccaccatggtgatggagtggaggaggctttctacacaacagatagggttatgactgtctcgttccacaagtttggtgattatttcccaggaacaggggatatccgtgacattgggcactcaaaagggaagtactactccctgaatgtccctctagatgatgggattgatgatgaaagctaccagtccctttttaagccaatcatgggcaaagttatggaggttttccgccctggtgcagttgtgcttcagtgtggtgctgattccttgtctggggataggttgggctgcttcaacctctcaatcaaaggtcatgcggaatgtgttaggtatatgaggtctttcaacgttccattgttgctccttggtggtggtggatataccataagaaatgttgcacgctgttggtgttatgagactggagttgctcttggccaagagcctgaagacaagatgcctgttaatgagtactatgaatacttcggtccagattacactcttcatgttgcaccaagtaacatggagaacaaaaatacacgacaacaactggatgatatacgatctaaacttctggataatctttcaaaacttcgacatgctcctagtgtccactttcaagagagagttcctgacacagaaatacctgagcaagatgaagatcaagatgatccagatgaacgacatgatcctgactctgatatggaagtggatgaccacaaggctgtggaagagtcatcgaggaggagcattctaggtataaaaatcaagagagaatttggtgaaaatgcgaccagagtacaggatggtggcagggttgcatctgaacatagaggactggaacccatggcagaagacattggttcctccaagcaagctcctcaggcagatgccagtgcaatggccatcgatgaaccaagcaatgtcaagaatgaacctgagagctcaactaaattgcaaggccaagcagctgcgtaccacaagccatagctgcgaccatcaagagttgctgggtttctgctaggcaacttcctgcttgatttggacagtccagaaaacagaagtgaatccgcaatacgtccctgccatttcaaatttgacttggttacacctatctgtgacaatgttaatgtaatgagatcccatggcactagtgaagttcccaggtgtccacctgggattgcttgcggttgagagagacgatagtctgatgacccatgtatacatgaagcccatgatctcagttgtacagtcattagccaatacaaatatgcagtggactaaagggtgattcattgcgtgttc

SEQ ID NO: 5190 - protein, 538 aa, Zea mays subsp. mays
  peptide (1)..(538): Ceres Seq. ID no. 13637289
  misc_feature (22)..(538): Homolog of NCBI NO: 14550104 NR Description: histone deacetylase HDA101 [Zea mays]
  misc_feature (22)..(538): Homolog of NCBI NO: 3023947 NR Description: Probable histone deacetylase (RPD3 homolog)
  misc_feature (22)..(537): Homolog of NCBI NO: 31324093 NR Description: histone deacetylase HDAC1 [Oryza sativa (japonica
  misc_feature (22)..(527): Homolog of NCBI NO: 31324097 NR Description: histone deacetylase HDAC3 [Oryza sativa (japonica
  misc_feature (22)..(503): Homolog of NCBI NO: 12698880 NR Description: histone deacetylase HD1 [Oryza sativa]
  misc_feature (29)..(527): Homolog of NCBI NO: 15233694 NR Description: Histone deacetylase [Arabidopsis thaliana]
  misc_feature (29)..(527): Homolog of NCBI NO: 2318131 NR Description: histone deacetylase [Arabidopsis thaliana]
  misc_feature (29)..(527): Homolog of NCBI NO: 9022439 NR Description: histone deacetylase [Mesembryanthemum
  misc_feature (41)..(505): Homolog of NCBI NO: 13128860 NR Description: histone deacetylase 1; reduced potassium
  misc_feature (41)..(505): Homolog of NCBI NO: 30583783 NR Description: Homo sapiens histone deacetylase 1 [synthetic
  misc_feature (29)..(527): Homolog of NCBI NO: 15233694 NR Description: Histone deacetylase [Arabidopsis thaliana]
  misc_feature (29)..(527): Homolog of NCBI NO: 2318131 NR Description: histone deacetylase [Arabidopsis thaliana]
  misc_feature (29)..(527): Homolog of NCBI NO: 9022439 NR Description: histone deacetylase [Mesembryanthemum
  misc_feature (41)..(505): Homolog of NCBI NO: 13128860 NR Description: histone deacetylase 1; reduced potassium
  misc_feature (41)..(505): Homolog of NCBI NO: 30583783 NR Description: Homo sapiens histone deacetylase 1 [synthetic
  misc_feature (22)..(538): Homolog of NCBI NO: 14550104 NR Description: histone deacetylase HDA101 [Zea mays]
  misc_feature (22)..(538): Homolog of NCBI NO: 3023947 NR Description: Probable histone deacetylase (RPD3 homolog)
  misc_feature (22)..(537): Homolog of NCBI NO: 31324093 NR Description: histone deacetylase HDAC1 [Oryza sativa (japonica
  misc_feature (22)..(527): Homolog of NCBI NO: 31324097 NR Description: histone deacetylase HDAC3 [Oryza sativa (japonica
  misc_feature (22)..(503): Homolog of NCBI NO: 12698880 NR Description: histone deacetylase HD1 [Oryza sativa]
  misc_feature (22)..(538): Homolog of NCBI NO: 14550104 NR Description: histone deacetylase HDA101 [Zea mays]
  misc_feature (22)..(538): Homolog of NCBI NO: 3023947 NR Description: Probable histone deacetylase (RPD3 homolog)
  misc_feature (22)..(537): Homolog of NCBI NO: 31324093 NR Description: histone deacetylase HDAC1 [Oryza sativa (japonica
  misc_feature (22)..(527): Homolog of NCBI NO: 31324097 NR Description: histone deacetylase HDAC3 [Oryza sativa (japonica
  misc_feature (22)..(503): Homolog of NCBI NO: 12698880 NR Description: histone deacetylase HD1 [Oryza sativa]
  misc_feature (29)..(527): Homolog of NCBI NO: 15233694 NR Description: Histone deacetylase [Arabidopsis thaliana]
  misc_feature (29)..(527): Homolog of NCBI NO: 2318131 NR Description: histone deacetylase [Arabidopsis thaliana]
  misc_feature (29)..(527): Homolog of NCBI NO: 9022439 NR Description: histone deacetylase [Mesembryanthemum
  misc_feature (41)..(505): Homolog of NCBI NO: 13128860 NR Description: histone deacetylase 1; reduced potassium
  misc_feature (41)..(505): Homolog of NCBI NO: 30583783 NR Description: Homo sapiens histone deacetylase 1 [synthetic
KKGKKRRENTHTHKPQSPAAAMDPSSAGSGGNSLPSVGPDGQKRRVCYFYDPDVGNYYYGQGHPMKPHRIRMTHSLLARYGLLNQMQVYRPNPARDRDLCRFHADDYINFLRSVTPETQQDQIRLLKRFNVGEDCPVFDGLYSFCQTYAGASVGGAVKLNHGHDIAINWSGGLHHAKKCEASGFCYVNDIVLAILELLKHHERVLYVDIDIHHGDGVEEAFYTTDRVMTVSFHKFGDYFPGTGDIRDIGHSKGKYYSLNVPLDDGIDDESYQSLFKPIMGKVMEVFRPGAVVLQCGADSLSGDRLGCFNLSIKGHAECVRYMRSFNVPLLLLGGGGYTIRNVARCWCYETGVALGQEPEDKMPVNEYYEYFGPDYTLHVAPSNMENKNTRQQLDDIRSKLLDNLSKLRHAPSVHFQERVPDTEIPEQDEDQDDPDERHDPDSDMEVDDHKAVEESSRRSILGIKIKREFGENATRVQDGGRVASEHRGLEPMAEDIGSSKQAPQADASAMAIDEPSNVKNEPESSTKLQGQAAAYHKP

SEQ ID NO: 5191 - protein, 517 aa, Zea mays subsp. mays
  peptide (1)..(517): Ceres Seq. ID no. 13637290
  misc_feature (1)..(517): Homolog of NCBI NO: 14550104 NR Description: histone deacetylase HDA101 [Zea mays]
  misc_feature (1)..(517): Homolog of NCBI NO: 3023947 NR Description: Probable histone deacetylase (RPD3 homolog)
  misc_feature (1)..(516): Homolog of NCBI NO: 31324093 NR Description: histone deacetylase HDAC1 [Oryza sativa (japonica
  misc_feature (1)..(506): Homolog of NCBI NO: 31324097 NR Description: histone deacetylase HDAC3 [Oryza sativa (japonica
  misc_feature (1)..(482): Homolog of NCBI NO: 12698880 NR Description: histone deacetylase HD1 [Oryza sativa]
  misc_feature (8)..(506): Homolog of NCBI NO: 15233694 NR Description: Histone deacetylase [Arabidopsis thaliana]
  misc_feature (8)..(506): Homolog of NCBI NO: 2318131 NR Description: histone deacetylase [Arabidopsis thaliana]
  misc_feature (8)..(506): Homolog of NCBI NO: 9022439 NR Description: histone deacetylase [Mesembryanthemum
  misc_feature (20)..(484): Homolog of NCBI NO: 13128860 NR Description: histone deacetylase 1; reduced potassium
  misc_feature (20)..(484): Homolog of NCBI NO: 30583783 NR Description: Homo sapiens histone deacetylase 1 [synthetic
  misc_feature (1)..(517): Homolog of NCBI NO: 14550104 NR Description: histone deacetylase HDA101 [Zea mays]
  misc_feature (1)..(517): Homolog of NCBI NO: 3023947 NR Description: Probable histone deacetylase (RPD3 homolog)
  misc_feature (1)..(516): Homolog of NCBI NO: 31324093 NR Description: histone deacetylase HDAC1 [Oryza sativa (japonica
  misc_feature (1)..(506): Homolog of NCBI NO: 31324097 NR Description: histone deacetylase HDAC3 [Oryza sativa (japonica
  misc_feature (1)..(482): Homolog of NCBI NO: 12698880 NR Description: histone deacetylase HD1 [Oryza sativa]
  misc_feature (8)..(506): Homolog of NCBI NO: 15233694 NR Description: Histone deacetylase [Arabidopsis thaliana]
  misc_feature (8)..(506): Homolog of NCBI NO: 2318131 NR Description: histone deacetylase [Arabidopsis thaliana]
  misc_feature (8)..(506): Homolog of NCBI NO: 9022439 NR Description: histone deacetylase [Mesembryanthemum
  misc_feature (20)..(484): Homolog of NCBI NO: 13128860 NR Description: histone deacetylase 1; reduced potassium
  misc_feature (20)..(484): Homolog of NCBI NO: 30583783 NR Description: Homo sapiens histone deacetylase 1 [synthetic
  misc_feature (1)..(517): Homolog of NCBI NO: 14550104 NR Description: histone deacetylase HDA101 [Zea mays]
  misc_feature (1)..(517): Homolog of NCBI NO: 3023947 NR Description: Probable histone deacetylase (RPD3 homolog)
  misc_feature (1)..(516): Homolog of NCBI NO: 31324093 NR Description: histone deacetylase HDAC1 [Oryza sativa (japonica
  misc_feature (1)..(506): Homolog of NCBI NO: 31324097 NR Description: histone deacetylase HDAC3 [Oryza sativa (japonica
  misc_feature (1)..(482): Homolog of NCBI NO: 12698880 NR Description: histone deacetylase HD1 [Oryza sativa]
  misc_feature (8)..(506): Homolog of NCBI NO: 15233694 NR Description: Histone deacetylase [Arabidopsis thaliana]
  misc_feature (8)..(506): Homolog of NCBI NO: 2318131 NR Description: histone deacetylase [Arabidopsis thaliana]
  misc_feature (8)..(506): Homolog of NCBI NO: 9022439 NR Description: histone deacetylase [Mesembryanthemum
  misc_feature (20)..(484): Homolog of NCBI NO: 13128860 NR Description: histone deacetylase 1; reduced potassium
  misc_feature (20)..(484): Homolog of NCBI NO: 30583783 NR Description: Homo sapiens histone deacetylase 1 [synthetic
MDPSSAGSGGNSLPSVGPDGQKRRVCYFYDPDVGNYYYGQGHPMKPHRIRMTHSLLARYGLLNQMQVYRPNPARDRDLCRFHADDYINFLRSVTPETQQDQIRLLKRFNVGEDCPVFDGLYSFCQTYAGASVGGAVKLNHGHDIAINWSGGLHHAKKCEASGFCYVNDIVLAILELLKHHERVLYVDIDIHHGDGVEEAFYTTDRVMTVSFHKFGDYFPGTGDIRDIGHSKGKYYSLNVPLDDGIDDESYQSLFKPIMGKVMEVFRPGAVVLQCGADSLSGDRLGCFNLSIKGHAECVRYMRSFNVPLLLLGGGGYTIRNVARCWCYETGVALGQEPEDKMPVNEYYEYFGPDYTLHVAPSNMENKNTRQQLDDIRSKLLDNLSKLRHAPSVHFQERVPDTEIPEQDEDQDDPDERHDPDSDMEVDDHKAVEESSRRSILGIKIKREFGENATRVQDGGRVASEHRGLEPMAEDIGSSKQAPQADASAMAIDEPSNVKNEPESSTKLQGQAAAYHKP

SEQ ID NO: 5192 - protein, 474 aa, Zea mays subsp. mays
  peptide (1)..(474): Ceres Seq. ID no. 13637291
  misc_feature (1)..(474): Homolog of NCBI NO: 14550104 NR Description: histone deacetylase HDA101 [Zea mays]
  misc_feature (1)..(474): Homolog of NCBI NO: 3023947 NR Description: Probable histone deacetylase (RPD3 homolog)
  misc_feature (1)..(473): Homolog of NCBI NO: 31324093 NR Description: histone deacetylase HDAC1 [Oryza sativa (japonica
  misc_feature (1)..(463): Homolog of NCBI NO: 31324097 NR Description: histone deacetylase HDAC3 [Oryza sativa (japonica
  misc_feature (1)..(439): Homolog of NCBI NO: 12698880 NR Description: histone deacetylase HD1 [Oryza sativa]
  misc_feature (1)..(463): Homolog of NCBI NO: 15233694 NR Description: Histone deacetylase [Arabidopsis thaliana]
  misc_feature (1)..(463): Homolog of NCBI NO: 2318131 NR Description: histone deacetylase [Arabidopsis thaliana]
  misc_feature (1)..(463): Homolog of NCBI NO: 9022439 NR Description: histone deacetylase [Mesembryanthemum
  misc_feature (1)..(441): Homolog of NCBI NO: 13128860 NR Description: histone deacetylase 1; reduced potassium
  misc_feature (1)..(441): Homolog of NCBI NO: 30583783 NR Description: Homo sapiens histone deacetylase 1 [synthetic
  misc_feature (1)..(474): Homolog of NCBI NO: 14550104 NR Description: histone deacetylase HDA101 [Zea mays]
  misc_feature (1)..(474): Homolog of NCBI NO: 3023947 NR Description: Probable histone deacetylase (RPD3 homolog)
  misc_feature (1)..(473): Homolog of NCBI NO: 31324093 NR Description: histone deacetylase HDAC1 [Oryza sativa (japonica
  misc_feature (1)..(463): Homolog of NCBI NO: 31324097 NR Description: histone deacetylase HDAC3 [Oryza sativa (japonica
  misc_feature (1)..(439): Homolog of NCBI NO: 12698880 NR Description: histone deacetylase HD1 [Oryza sativa]
  misc_feature (1)..(463): Homolog of NCBI NO: 15233694 NR Description: Histone deacetylase [Arabidopsis thaliana]
  misc_feature (1)..(463): Homolog of NCBI NO: 2318131 NR Description: histone deacetylase [Arabidopsis thaliana]
  misc_feature (1)..(463): Homolog of NCBI NO: 9022439 NR Description: histone deacetylase [Mesembryanthemum
  misc_feature (1)..(441): Homolog of NCBI NO: 13128860 NR Description: histone deacetylase 1; reduced potassium
  misc_feature (1)..(441): Homolog of NCBI NO: 30583783 NR Description: Homo sapiens histone deacetylase 1 [synthetic
  misc_feature (1)..(474): Homolog of NCBI NO: 14550104 NR Description: histone deacetylase HDA101 [Zea mays]
  misc_feature (1)..(474): Homolog of NCBI NO: 3023947 NR Description: Probable histone deacetylase (RPD3 homolog)
  misc_feature (1)..(473): Homolog of NCBI NO: 31324093 NR Description: histone deacetylase HDAC1 [Oryza sativa (japonica
  misc_feature (1)..(463): Homolog of NCBI NO: 31324097 NR Description: histone deacetylase HDAC3 [Oryza sativa (japonica
  misc_feature (1)..(439): Homolog of NCBI NO: 12698880 NR Description: histone deacetylase HD1 [Oryza sativa]
  misc_feature (1)..(463): Homolog of NCBI NO: 15233694 NR Description: Histone deacetylase [Arabidopsis thaliana]
  misc_feature (1)..(463): Homolog of NCBI NO: 2318131 NR Description: histone deacetylase [Arabidopsis thaliana]
  misc_feature (1)..(463): Homolog of NCBI NO: 9022439 NR Description: histone deacetylase [Mesembryanthemum
  misc_feature (1)..(441): Homolog of NCBI NO: 13128860 NR Description: histone deacetylase 1; reduced potassium
  misc_feature (1)..(441): Homolog of NCBI NO: 30583783 NR Description: Homo sapiens histone deacetylase 1 [synthetic
MKPHRIRMTHSLLARYGLLNQMQVYRPNPARDRDLCRFHADDYINFLRSVTPETQQDQIRLLKRFNVGEDCPVFDGLYSFCQTYAGASVGGAVKLNHGHDIAINWSGGLHHAKKCEASGFCYVNDIVLAILELLKHHERVLYVDIDIHHGDGVEEAFYTTDRVMTVSFHKFGDYFPGTGDIRDIGHSKGKYYSLNVPLDDGIDDESYQSLFKPIMGKVMEVFRPGAVVLQCGADSLSGDRLGCFNLSIKGHAECVRYMRSFNVPLLLLGGGGYTIRNVARCWCYETGVALGQEPEDKMPVNEYYEYFGPDYTLHVAPSNMENKNTRQQLDDIRSKLLDNLSKLRHAPSVHFQERVPDTEIPEQDEDQDDPDERHDPDSDMEVDDHKAVEESSRRSILGIKIKREFGENATRVQDGGRVASEHRGLEPMAEDIGSSKQAPQADASAMAIDEPSNVKNEPESSTKLQGQAAAYHKP

SEQ ID NO: 5193 - DNA, 1105 bp, Zea mays subsp. mays
  misc_feature (1)..(1105): Ceres Seq. ID no. 12343379
  misc_feature: MA Experiment ID: 108523 Result: Down-regulated in Transcription
  misc_feature: MA Experiment 108523 PARAMETER Experiment Name: Zm_42deg_Heat_P Parameter: Age (day) Value: 8
  misc_feature: MA Experiment 108523 PARAMETER Experiment Name: Zm_42deg_Heat_P Parameter: Organism Value: Zea mays
  misc_feature: MA Experiment 108523 PARAMETER Experiment Name: Zm_42deg_Heat_P Parameter: Plant Line Value: 35A19
  misc_feature: MA Experiment 108523 PARAMETER Experiment Name: Zm_42deg_Heat_P Parameter: Temperature (deg C) Value: 42 vs. 22
  misc_feature: MA Experiment 108523 PARAMETER Experiment Name: Zm_42deg_Heat_P Parameter: Timepoint (hr) Value: 6
  misc_feature: MA Experiment 108523 PARAMETER Experiment Name: Zm_42deg_Heat_P Parameter: Tissue Value: Aerial
  misc_feature: MA Experiment ID: 108535 Result: Up-regulated in Transcription
  misc_feature: MA Experiment 108535 PARAMETER Experiment Name: Zm_Meristem_P Parameter: Age (day) Value: 8
  misc_feature: MA Experiment 108535 PARAMETER Experiment Name: Zm_Meristem_P Parameter: Organism Value: Zea mays
  misc_feature: MA Experiment 108535 PARAMETER Experiment Name: Zm_Meristem_P Parameter: Plant Line Value: 35A19
  misc_feature: MA Experiment 108535 PARAMETER Experiment Name: Zm_Meristem_P Parameter: Tissue Value: Root Meristem vs. Above Root Meristem
agcccaaaatcaattcggatccgcctccatggctgccgcttcgcagctcctctctctgttcttcctcctcctcctccctgcttgtgatgccatctactgcgacgaagacgactgctacgacctcctaggggttaagcaggacgcgaacgcgtcagacatcaagaaagcgtactacaagctctctctcaaacaccacccggacaagaatcccgatccggagtcgcggaagctcttcgtcaagatcgccaatgcttacgagattctgaaggatgaatccactagggcgcagtatgactttgccattgaacatccggaggaggttttctataacacagctcagtactatagggcatactatggacataaaacggatcctcgtgcagtgttgattggtcttcttctaattgtttcagcatttcaatacattaatcagctaacgaggtataaccaggccatgaaaagtgtcaagcaaactcctgcttacaaaaataggttaaaagctttggagtatgagcgaacaggaggaattgctagcaaaaagaagggcatcaagcaggtggataagaaagttgaagaagagctaagtaatgaagttgaattgcaaattcatggggttgaaaaaccgtctgtttggaggctgtttggtgtccaatttatactttggccttactctgttggcaaggcgcttacttggaagatttgttggttttggagataccgggtaaagaaattaccatatacatgggaggatgcttgctacttgacctggatttcactccaaatacctgcgaatgcatggaaaaatatggatgagtccaggaaggaggaccttgtgagaagacacctctgggaaaagagcaacatggagaggtatacttcagggacgaggaaggaaccaaagcgtaggaggtagctgtgcaacatttttgacctgagactacagcaactttaaacaatacaacatactcctatattggagtgaaaagttattgaccaggcttgagttcaccgatagctaattgctagggtccccgggaagtggcatggctaaggaatcatgtttggaggacaattcatgtaataaagtgatcaaggcgacttttgc

SEQ ID NO: 5194 - protein, 303 aa, Zea mays subsp. mays
  peptide (1)..(303): Ceres Seq. ID no. 12343380
  misc_feature (37)..(101): Pfam Name: DnaJ domain Pfam Description: DnaJ domain
  misc_feature (16)..(303): Homolog of NCBI NO: 30696610 NR Description: DnaJ protein family [Arabidopsis thaliana]
  misc_feature (16)..(269): Homolog of NCBI NO: 25404348 NR Description: hypothetical protein T13M11.13 [imported] -
  misc_feature (105)..(303): Homolog of NCBI NO: 19347731 NR Description: unknown protein [Arabidopsis thaliana]
  misc_feature (16)..(302): Homolog of NCBI NO: 18859921 NR Description: CG7872-PA [Drosophila melanogaster]
  misc_feature (29)..(302): Homolog of NCBI NO: 31219417 NR Description: ENSANGP00000010358 [Anopheles gambiae]
  misc_feature (17)..(302): Homolog of NCBI NO: 34868434 NR Description: similar to bA16L21.2.1 (novel DnaJ domain protein to Drosophila, C. elegans and Arabidopsis predicted proteins
  misc_feature (17)..(302): Homolog of NCBI NO: 38078426 NR Description: RIKEN cDNA 2010203O07 [Mus musculus]
  misc_feature (22)..(302): Homolog of NCBI NO: 12313893 NR Description: bA16L21.2.1 (novel DnaJ domain protein similar to C. elegans and Arabidopsis predicted proteins (isoform 1)) [Homo >gi|29477003|gb|AAH48318.1| Unknown (protein for MGC:54351) [Homo
  misc_feature (22)..(291): Homolog of NCBI NO: 39593758 NR Description: Hypothetical protein CBG06069 [Caenorhabditis
  misc_feature (11)..(287): Homolog of NCBI NO: 17538212 NR Description: DNaJ domain (prokaryotic heat shock protein)
AQNQFGSASMAAASQLLSLFFLLLLPACDAIYCDEDDCYDLLGVKQDANASDIKKAYYKLSLKHHPDKNPDPESRKLFVKIANAYEILKDESTRAQYDFAIEHPEEVFYNTAQYYRAYYGHKTDPRAVLIGLLLIVSAFQYINQLTRYNQAMKSVKQTPAYKNRLKALEYERTGGIASKKKGIKQVDKKVEEELSNEVELQIHGVEKPSVWRLFGVQFILWPYSVGKALTWKICWFWRYRVKKLPYTWEDACYLTWISLQIPANAWKNMDESRKEDLVRRHLWEKSNMERYTSGTRKEPKRRR

SEQ ID NO: 5195 - protein, 294 aa, Zea mays subsp. mays
  peptide (1)..(294): Ceres Seq. ID no. 12343381
  misc_feature (28)..(92): Pfam Name: DnaJ domain Pfam Description: DnaJ domain
  misc_feature (7)..(294): Homolog of NCBI NO: 30696610 NR Description: DnaJ protein family [Arabidopsis thaliana]
  misc_feature (7)..(260): Homolog of NCBI NO: 25404348 NR Description: hypothetical protein T13M11.13 [imported] -
  misc_feature (96)..(294): Homolog of NCBI NO: 19347731 NR Description: unknown protein [Arabidopsis thaliana]
  misc_feature (7)..(293): Homolog of NCBI NO: 18859921 NR Description: CG7872-PA [Drosophila melanogaster]
  misc_feature (20)..(293): Homolog of NCBI NO: 31219417 NR Description: ENSANGP00000010358 [Anopheles gambiae]
  misc_feature (8)..(293): Homolog of NCBI NO: 34868434 NR Description: similar to bA16L21.2.1 (novel DnaJ domain protein to Drosophila, C. elegans and Arabidopsis predicted proteins
  misc_feature (8)..(293): Homolog of NCBI NO: 38078426 NR Description: RIKEN cDNA 2010203O07 [Mus musculus]
  misc_feature (13)..(293): Homolog of NCBI NO: 12313893 NR Description: bA16L21.2.1 (novel DnaJ domain protein similar to C. elegans and Arabidopsis predicted proteins (isoform 1)) [Homo >gi|29477003|gb|AAH48318.1| Unknown (protein for MGC:54351) [Homo
  misc_feature (13)..(282): Homolog of NCBI NO: 39593758 NR Description: Hypothetical protein CBG06069 [Caenorhabditis
  misc_feature (2)..(278): Homolog of NCBI NO: 17538212 NR Description: DNaJ domain (prokaryotic heat shock protein)
MAAASQLLSLFFLLLLPACDAIYCDEDDCYDLLGVKQDANASDIKKAYYKLSLKHHPDKNPDPESRKLFVKIANAYEILKDESTRAQYDFAIEHPEEVFYNTAQYYRAYYGHKTDPRAVLIGLLLIVSAFQYINQLTRYNQAMKSVKQTPAYKNRLKALEYERTGGIASKKKGIKQVDKKVEEELSNEVELQIHGVEKPSVWRLFGVQFILWPYSVGKALTWKICWFWRYRVKKLPYTWEDACYLTWISLQIPANAWKNMDESRKEDLVRRHLWEKSNMERYTSGTRKEPKRRR

SEQ ID NO: 5196 - protein, 152 aa, Zea mays subsp. mays
  peptide (1)..(152): Ceres Seq. ID no. 12343382
  misc_feature (1)..(152): Homolog of NCBI NO: 30696610 NR Description: DnaJ protein family [Arabidopsis thaliana]
  misc_feature (1)..(118): Homolog of NCBI NO: 25404348 NR Description: hypothetical protein T13M11.13 [imported] -
  misc_feature (1)..(152): Homolog of NCBI NO: 19347731 NR Description: unknown protein [Arabidopsis thaliana]
  misc_feature (1)..(151): Homolog of NCBI NO: 18859921 NR Description: CG7872-PA [Drosophila melanogaster]
  misc_feature (1)..(151): Homolog of NCBI NO: 31219417 NR Description: ENSANGP00000010358 [Anopheles gambiae]
  misc_feature (1)..(151): Homolog of NCBI NO: 34868434 NR Description: similar to bA16L21.2.1 (novel DnaJ domain protein to Drosophila, C. elegans and Arabidopsis predicted proteins
  misc_feature (1)..(151): Homolog of NCBI NO: 38078426 NR Description: RIKEN cDNA 2010203O07 [Mus musculus]
  misc_feature (1)..(151): Homolog of NCBI NO: 12313893 NR Description: bA16L21.2.1 (novel DnaJ domain protein similar to C. elegans and Arabidopsis predicted proteins (isoform 1)) [Homo >gi|29477003|gb|AAH48318.1| Unknown (protein for MGC:54351) [Homo
  misc_feature (1)..(140): Homolog of NCBI NO: 39593758 NR Description: Hypothetical protein CBG06069 [Caenorhabditis
  misc_feature (1)..(136): Homolog of NCBI NO: 17538212 NR Description: DNaJ domain (prokaryotic heat shock protein)
MKSVKQTPAYKNRLKALEYERTGGIASKKKGIKQVDKKVEEELSNEVELQIHGVEKPSVWRLFGVQFILWPYSVGKALTWKICWFWRYRVKKLPYTWEDACYLTWISLQIPANAWKNMDESRKEDLVRRHLWEKSNMERYTSGTRKEPKRRR

SEQ ID NO: 5197 - DNA, 1195 bp, Zea mays subsp. mays
  misc_feature (1)..(1195): Ceres Seq. ID no. 12409665
  misc_feature: MA Experiment ID: 108535 Result: Up-regulated in Transcription
  misc_feature: MA Experiment 108535 PARAMETER Experiment Name: Zm_Meristem_P Parameter: Age (day) Value: 8
  misc_feature: MA Experiment 108535 PARAMETER Experiment Name: Zm_Meristem_P Parameter: Organism Value: Zea mays
  misc_feature: MA Experiment 108535 PARAMETER Experiment Name: Zm_Meristem_P Parameter: Plant Line Value: 35A19
  misc_feature: MA Experiment 108535 PARAMETER Experiment Name: Zm_Meristem_P Parameter: Tissue Value: Root Meristem vs. Above Root Meristem
  misc_feature: MA Experiment ID: 108543 Result: Up-regulated in Transcription
  misc_feature: MA Experiment ID: 108544 Result: Down-regulated in Transcription
  misc_feature: MA Experiment ID: 108556 Result: Down-regulated in Transcription
  misc_feature: MA Experiment 108556 PARAMETER Experiment Name: Zm_Drought_P Parameter: Age (day) Value: 9
  misc_feature: MA Experiment 108556 PARAMETER Experiment Name: Zm_Drought_P Parameter: Organism Value: Zea mays
  misc_feature: MA Experiment 108556 PARAMETER Experiment Name: Zm_Drought_P Parameter: Plant Line Value: 35A19
  misc_feature: MA Experiment 108556 PARAMETER Experiment Name: Zm_Drought_P Parameter: Timepoint (hr) Value: 24
  misc_feature: MA Experiment 108556 PARAMETER Experiment Name: Zm_Drought_P Parameter: Tissue Value: Aerial
  misc_feature: MA Experiment 108556 PARAMETER Experiment Name: Zm_Drought_P Parameter: Treatment Value: Drought vs. No Drought
  misc_feature: MA Experiment ID: 20000478 Result: Down-regulated in Transcription
  misc_feature: MA Experiment 20000478 PARAMETER Experiment Name: Zm_5mM_SA_P Parameter: Age (day) Value: 11
  misc_feature: MA Experiment 20000478 PARAMETER Experiment Name: Zm_5mM_SA_P Parameter: Organism Value: Zea mays
  misc_feature: MA Experiment 20000478 PARAMETER Experiment Name: Zm_5mM_SA_P Parameter: Plant Line Value: 35A19
  misc_feature: MA Experiment 20000478 PARAMETER Experiment Name: Zm_5mM_SA_P Parameter: Timepoint (hr) Value: 72
  misc_feature: MA Experiment 20000478 PARAMETER Experiment Name: Zm_5mM_SA_P Parameter: Tissue Value: Aerial
  misc_feature: MA Experiment 20000478 PARAMETER Experiment Name: Zm_5mM_SA_P Parameter: Treatment Value: 5mM SA vs. No Treatment
  misc_feature: MA Experiment ID: 20000487 Result: Down-regulated in Transcription
  misc_feature: MA Experiment 20000487 PARAMETER Experiment Name: Zm_50mM_NH4NO3_L_to_H_P Parameter: Organism Value: Zea mays
  misc_feature: MA Experiment 20000487 PARAMETER Experiment Name: Zm_50mM_NH4NO3_L_to_H_P Parameter: Timepoint (hr) Value: 4
  misc_feature: MA Experiment 20000487 PARAMETER Experiment Name: Zm_50mM_NH4NO3_L_to_H_P Parameter: Tissue Value: Leaves
  misc_feature: MA Experiment 20000487 PARAMETER Experiment Name: Zm_50mM_NH4NO3_L_to_H_P Parameter: Treatment Value: 50mM NH4NO3 vs. 100mM Mannitol
  misc_feature: MA Experiment ID: 20000535 Result: Up-regulated in Transcription
  misc_feature: MA Experiment 20000535 PARAMETER Experiment Name: Zm_Hybrid_Seed_Dev_P Parameter: DAP Value: 30 vs. 12
  misc_feature: MA Experiment 20000535 PARAMETER Experiment Name: Zm_Hybrid_Seed_Dev_P Parameter: Organism Value: Zea mays
  misc_feature: MA Experiment 20000535 PARAMETER Experiment Name: Zm_Hybrid_Seed_Dev_P Parameter: Plant Line Value: 35A19
  misc_feature: MA Experiment 20000535 PARAMETER Experiment Name: Zm_Hybrid_Seed_Dev_P Parameter: Tissue Value: Embryo vs. Unfert Floret
  misc_feature: MA Experiment ID: 20000632 Result: Down-regulated in Transcription
  misc_feature: MA Experiment 20000632 PARAMETER Experiment Name: Zm_Herbicide-Treatments_P Parameter: Timepoint (hr) Value: 4
  misc_feature: MA Experiment 20000632 PARAMETER Experiment Name: Zm_Herbicide-Treatments_P Parameter: Tissue Value: Aerial
  misc_feature: MA Experiment 20000632 PARAMETER Experiment Name: Zm_Herbicide-Treatments_P Parameter: Treatment Value: Glean vs. No Treatment
cgcgactcgcgagcggcaattggacgcatcgcatcggatctcttcctccggtcttctctgacctctgggcctctgactccgcgcccacaccgccactgcctctggcctccagccacctcccgatctggccgagctcgcctccccggaggcggcgcatggatcccgcctcgtcggtggccgccgagttttggcggccgccgtaccaccacctccgggcctcgtccgtcgtcaccgccgccgcccgctccgggggcggctccagcagccgcaggagaccgcggcgcgacgccgcggcgtcgtccgaggaggagccgtccaagctcgtttccacgtcgggcaccgccgccagcagcagcgcgggctgccaggactcggctgacccagaagcaaaacggttgaaacagatagcacctagtgaaaaaaatgacagaaggacagaagctgaaacaaattcagggaacgctagcaagtctgctgataaaaagcctgcacctaaagagccaccaaaagactacatccatgtgagggctagaagaggtcaagcaacggacagccatagcctcgcagaaagagcacgacgagagaagataagtgaacggatgaaagttcttcaagatattgtccctggatgcaacaaggttatcgggaaagcatcagtccttgatgagataataaattacatccagtctttacagcgtcaagtagagtttttgtccatgaaacttgaagcgattaatgctcatgtgagcaatgcaactgtagcttttccaaccaaagattttggtgttgcgccatataatactgctcctagcctgacgttggacccacaaacgccaagggaatacgcccagggctcgatgtcagattggcttcacatgcaggtcggcaacgcatatgaaagagtgacatgaataaaacgaggaatccataaaacaagctgaattccttgtggtagccaataaagagtaccaggatcaaccgagttcacagtaccaggttcattttcttcttcttctcgtggtcatcgtgacgccaaagttagtttattttattcctagtttgggggcattagcgccgtagatgcgtcattccacatccatctaggagggagcactgtcgtttactgtatacggatttcgtgatgtatcccgggaaatttttgtagatcggactcgtagaagaagagattgcaatt

SEQ ID NO: 5198 - protein, 302 aa, Zea mays subsp. mays
  peptide (1)..(302): Ceres Seq. ID no. 12409666
  misc_feature (181)..(231): Pfam Name: Helix-loop-helix DNA-binding domain Pfam Description: Helix-loop-helix DNA-binding domain
  misc_feature (52)..(302): Homolog of NCBI NO: 29150361 NR Description: hypothetical protein [Oryza sativa (japonica
  misc_feature (109)..(302): Homolog of NCBI NO: 33339703 NR Description: MYC1 [Catharanthus roseus]
  misc_feature (60)..(302): Homolog of NCBI NO: 21592490 NR Description: unknown [Arabidopsis thaliana]
  misc_feature (60)..(302): Homolog of NCBI NO: 18406408 NR Description: bHLH protein; protein id: At1g59640.1, supported cDNA: 24644. [Arabidopsis thaliana] >gi|28393152|gb|AAO42009.1| bHLH protein [Arabidopsis thaliana] >gi|28827506|gb|AAO50597.1|
  misc_feature (15)..(302): Homolog of NCBI NO: 15241896 NR Description: putative protein; protein id: At5g62610.1, by cDNA: 112281., supported by cDNA: gi_18175778 [Arabidopsis
  misc_feature (60)..(259): Homolog of NCBI NO: 25404871 NR Description: protein T30E16.21 [imported] - Arabidopsis >gi|8778763|gb|AAF79771.1|AC009317_30 T30E16.21 [Arabidopsis
  misc_feature (260)..(302): Homolog of NCBI NO: 25404871 NR Description: protein T30E16.21 [imported] - Arabidopsis >gi|8778763|gb|AAF79771.1|AC009317_30 T30E16.21 [Arabidopsis
  misc_feature (60)..(259): Homolog of NCBI NO: 25453562 NR Description: helix-loop-helix protein homolog [imported] -
  misc_feature (60)..(259): Homolog of NCBI NO: 30696324 NR Description: bHLH protein [Arabidopsis thaliana]
  misc_feature (84)..(245): Homolog of NCBI NO: 15239013 NR Description: putative protein; protein id: At5g48560.1, by cDNA: gi_20127084 [Arabidopsis thaliana] contains similarity to unknown
RLASGNWTHRIGSLPPVFSDLWASDSAPTPPLPLASSHLPIWPSSPPRRRRMDPASSVAAEFWRPPYHHLRASSVVTAAARSGGGSSSRRRPRRDAAASSEEEPSKLVSTSGTAASSSAGCQDSADPEAKRLKQIAPSEKNDRRTEAETNSGNASKSADKKPAPKEPPKDYIHVRARRGQATDSHSLAERARREKISERMKVLQDIVPGCNKVIGKASVLDEIINYIQSLQRQVEFLSMKLEAINAHVSNATVAFPTKDFGVAPYNTAPSLTLDPQTPREYAQGSMSDWLHMQVGNAYERVT

SEQ ID NO: 5199 - protein, 251 aa, Zea mays subsp. mays
  peptide (1)..(251): Ceres Seq. ID no. 12409667
  misc_feature (130)..(180): Pfam Name: Helix-loop-helix DNA-binding domain Pfam Description: Helix-loop-helix DNA-binding domain
  misc_feature (1)..(251): Homolog of NCBI NO: 29150361 NR Description: hypothetical protein [Oryza sativa (japonica
  misc_feature (58)..(251): Homolog of NCBI NO: 33339703 NR Description: MYC1 [Catharanthus roseus]
  misc_feature (9)..(251): Homolog of NCBI NO: 21592490 NR Description: unknown [Arabidopsis thaliana]
  misc_feature (9)..(251): Homolog of NCBI NO: 18406408 NR Description: bHLH protein; protein id: At1g59640.1, supported cDNA: 24644. [Arabidopsis thaliana] >gi|28393152|gb|AAO42009.1| bHLH protein [Arabidopsis thaliana] >gi|28827506|gb|AAO50597.1|
  misc_feature (1)..(251): Homolog of NCBI NO: 15241896 NR Description: putative protein; protein id: At5g62610.1, by cDNA: 112281., supported by cDNA: gi_18175778 [Arabidopsis
  misc_feature (9)..(208): Homolog of NCBI NO: 25404871 NR Description: protein T30E16.21 [imported] - Arabidopsis >gi|8778763|gb|AAF79771.1|AC009317_30 T30E16.21 [Arabidopsis
  misc_feature (209)..(251): Homolog of NCBI NO: 25404871 NR Description: protein T30E16.21 [imported] - Arabidopsis >gi|8778763|gb|AAF79771.1|AC009317_30 T30E16.21 [Arabidopsis
  misc_feature (9)..(208): Homolog of NCBI NO: 25453562 NR Description: helix-loop-helix protein homolog [imported] -
  misc_feature (9)..(208): Homolog of NCBI NO: 30696324 NR Description: bHLH protein [Arabidopsis thaliana]
  misc_feature (33)..(194): Homolog of NCBI NO: 15239013 NR Description: putative protein; protein id: At5g48560.1, by cDNA: gi_20127084 [Arabidopsis thaliana] contains similarity to unknown
MDPASSVAAEFWRPPYHHLRASSVVTAAARSGGGSSSRRRPRRDAAASSEEEPSKLVSTSGTAASSSAGCQDSADPEAKRLKQIAPSEKNDRRTEAETNSGNASKSADKKPAPKEPPKDYIHVRARRGQATDSHSLAERARREKISERMKVLQDIVPGCNKVIGKASVLDEIINYIQSLQRQVEFLSMKLEAINAHVSNATVAFPTKDFGVAPYNTAPSLTLDPQTPREYAQGSMSDWLHMQVGNAYERVT

SEQ ID NO: 5200 - DNA, 923 bp, Zea mays subsp. mays
  misc_feature (1)..(923): Ceres Seq. ID no. 12349077
  misc_feature: MA Experiment ID: 108535 Result: Down-regulated in Transcription
  misc_feature: MA Experiment 108535 PARAMETER Experiment Name: Zm_Meristem_P Parameter: Age (day) Value: 8
  misc_feature: MA Experiment 108535 PARAMETER Experiment Name: Zm_Meristem_P Parameter: Organism Value: Zea mays
  misc_feature: MA Experiment 108535 PARAMETER Experiment Name: Zm_Meristem_P Parameter: Plant Line Value: 35A19
  misc_feature: MA Experiment 108535 PARAMETER Experiment Name: Zm_Meristem_P Parameter: Tissue Value: Root Meristem vs. Above Root Meristem
  misc_feature: MA Experiment ID: 108543 Result: Up-regulated in Transcription
  misc_feature: MA Experiment ID: 108544 Result: Up-regulated in Transcription
  misc_feature: MA Experiment ID: 108687 Result: Down-regulated in Transcription
  misc_feature: MA Experiment 108687 PARAMETER Experiment Name: Zm_Embryos-Flowers__P Parameter: Tissue Value: Embryo vs. Aerial+
  misc_feature: MA Experiment ID: 20000535 Result: Down-regulated in Transcription
  misc_feature: MA Experiment 20000535 PARAMETER Experiment Name: Zm_Hybrid_Seed_Dev_P Parameter: DAP Value: 30 vs. 12
  misc_feature: MA Experiment 20000535 PARAMETER Experiment Name: Zm_Hybrid_Seed_Dev_P Parameter: Organism Value: Zea mays
  misc_feature: MA Experiment 20000535 PARAMETER Experiment Name: Zm_Hybrid_Seed_Dev_P Parameter: Plant Line Value: 35A19
  misc_feature: MA Experiment 20000535 PARAMETER Experiment Name: Zm_Hybrid_Seed_Dev_P Parameter: Tissue Value: Embryo vs. Unfert Floret
atacgccttttctgctgccgctgcatcttccactcgcgtcaagaaacgaaacccagctgcaccagcaacttctgccagcagacccaacgaccgaagcttttttttccctttcttttcatcgccgccgctcggggttcaaggttcagcgcgtccccgaatgacgggcacgtacgaggcctccgaccgtcctcctcctcccaactccgccggccaccggaccgacaaagtccggcggaagcggctgacggcgcagaagaggaaagagatcaaggaggcgttcgacctcttcgacatcgacggctccggcaccatcgatgcaagggagctgaacgtcgcgatgagagcccttggattcgagatgacaccggagcaaatcgggcagatgatcgcggaggtggacaaggacggcagcggcaccatcgacttcgacgagttcgtgcacatgatgacggacaagatgggcgagcgggacgcccgggacgagctgcacaaggcgttccgcatcatcgaccaggacgccaacggaaagatctcggacatggacatccagcggctggccatcgagaccggcgagcacttcacgctcgacgaggtccgggagatgatagaggccgccgacgaggacggcgacggcgagatcgacctggaggagttcatgaagatgatgaagcggacagactttggctctgggttctagtagtcacaggcaagccaatcccaacatacatccccatcggtgaaaaatacatatcacctacgctacatatgactggagtattgggatttatttgagaaataatggcgtacacacaccatacatcatagtgtactaactactgtaatatatgtgtagtgctgtccatgtacatcctagctagctacggcttgtgtatttacctacacgtaatgaaacacatattact

SEQ ID NO: 5201 - protein, 263 aa, Zea mays subsp. mays
  peptide (1)..(263): Ceres Seq. ID no. 12349078
IRLFCCRCIFHSRQETKPSCTSNFCQQTQRPKLFFPFLFIAAARGSRFSASPNDGHVRGLRPSSSSQLRRPPDRQSPAEAADGAEEERDQGGVRPLRHRRLRHHRCKGAERRDESPWIRDDTGANRADDRGGGQGRQRHHRLRRVRAHDDGQDGRAGRPGRAAQGVPHHRPGRQRKDLGHGHPAAGHRDRRALHARRGPGDDRGRRRGRRRRDRPGGVHEDDEADRLWLWVLVVTGKPIPTYIPIGEKYISPTLHMTGVLGFI

SEQ ID NO: 5202 - protein, 231 aa, Zea mays subsp. mays
  peptide (1)..(231): Ceres Seq. ID no. 12349079
  misc_feature (124)..(152): Pfam Name: EF hand Pfam Description: EF hand
  misc_feature (70)..(230): Homolog of NCBI NO: 37533900 NR Description: Centrin [Oryza sativa (japonica cultivar-group)]
  misc_feature (72)..(227): Homolog of NCBI NO: 729051 NR Description: CALTRACTIN (CENTRIN) >gi|444342|prf||1906390A
  misc_feature (81)..(228): Homolog of NCBI NO: 33146874 NR Description: putative caltractin [Oryza sativa (japonica >gi|33146878|dbj|BAC79876.1| putative caltractin [Oryza sativa
  misc_feature (81)..(228): Homolog of NCBI NO: 34906754 NR Description: putative caltractin [Oryza sativa (japonica
  misc_feature (77)..(228): Homolog of NCBI NO: 6358509 NR Description: centrin [Nicotiana tabacum]
  misc_feature (72)..(228): Homolog of NCBI NO: 15229732 NR Description: centrin; protein id: At3g50360.1 [Arabidopsis
  misc_feature (77)..(228): Homolog of NCBI NO: 6358511 NR Description: centrin [Nicotiana tabacum]
  misc_feature (81)..(228): Homolog of NCBI NO: 15234588 NR Description: caltractin-like protein; protein id: At4g37010.1
  misc_feature (81)..(228): Homolog of NCBI NO: 21554823 NR Description: caltractin-like protein [Arabidopsis thaliana]
  misc_feature (68)..(225): Homolog of NCBI NO: 543936 NR Description: CALTRACTIN (CENTRIN) >gi|631935|pir||S42551 - Scherffelia dubia >gi|21209|emb|CAA49153.1| caltractin
YAFSAAAASSTRVKKRNPAAPATSASRPNDRSFFFPFFSSPPLGVQGSARPRMTGTYEASDRPPPPNSAGHRTDKVRRKRLTAQKRKEIKEAFDLFDIDGSGTIDARELNVAMRALGFEMTPEQIGQMIAEVDKDGSGTIDFDEFVHMMTDKMGERDARDELHKAFRIIDQDANGKISDMDIQRLAIETGEHFTLDEVREMIEAADEDGDGEIDLEEFMKMMKRTDFGSGF

SEQ ID NO: 5203 - protein, 179 aa, Zea mays subsp. mays
  peptide (1)..(179): Ceres Seq. ID no. 12349080
  misc_feature (72)..(100): Pfam Name: EF hand Pfam Description: EF hand
  misc_feature (18)..(178): Homolog of NCBI NO: 37533900 NR Description: Centrin [Oryza sativa (japonica cultivar-group)]
  misc_feature (20)..(175): Homolog of NCBI NO: 729051 NR Description: CALTRACTIN (CENTRIN) >gi|444342|prf||1906390A
  misc_feature (29)..(176): Homolog of NCBI NO: 33146874 NR Description: putative caltractin [Oryza sativa (japonica >gi|33146878|dbj|BAC79876.1| putative caltractin [Oryza sativa
  misc_feature (29)..(176): Homolog of NCBI NO: 34906754 NR Description: putative caltractin [Oryza sativa (japonica
  misc_feature (25)..(176): Homolog of NCBI NO: 6358509 NR Description: centrin [Nicotiana tabacum]
  misc_feature (20)..(176): Homolog of NCBI NO: 15229732 NR Description: centrin; protein id: At3g50360.1 [Arabidopsis
  misc_feature (25)..(176): Homolog of NCBI NO: 6358511 NR Description: centrin [Nicotiana tabacum]
  misc_feature (29)..(176): Homolog of NCBI NO: 15234588 NR Description: caltractin-like protein; protein id: At4g37010.1
  misc_feature (29)..(176): Homolog of NCBI NO: 21554823 NR Description: caltractin-like protein [Arabidopsis thaliana]
  misc_feature (16)..(173): Homolog of NCBI NO: 543936 NR Description: CALTRACTIN (CENTRIN) >gi|631935|pir||S42551 - Scherffelia dubia >gi|21209|emb|CAA49153.1| caltractin
MTGTYEASDRPPPPNSAGHRTDKVRRKRLTAQKRKEIKEAFDLFDIDGSGTIDARELNVAMRALGFEMTPEQIGQMIAEVDKDGSGTIDFDEFVHMMTDKMGERDARDELHKAFRIIDQDANGKISDMDIQRLAIETGEHFTLDEVREMIEAADEDGDGEIDLEEFMKMMKRTDFGSGF

SEQ ID NO: 5204 - DNA, 851 bp, Zea mays subsp. mays
  misc_feature (1)..(851): Ceres Seq. ID no. 12353795
  misc_feature: MA Experiment ID: 108527 Result: Up-regulated in Transcription
  misc_feature: MA Experiment 108527 PARAMETER Experiment Name: Zm_5mM_NO_P Parameter: Age (day) Value: 8
  misc_feature: MA Experiment 108527 PARAMETER Experiment Name: Zm_5mM_NO_P Parameter: Organism Value: Zea mays
  misc_feature: MA Experiment 108527 PARAMETER Experiment Name: Zm_5mM_NO_P Parameter: Plant Line Value: 35A19
  misc_feature: MA Experiment 108527 PARAMETER Experiment Name: Zm_5mM_NO_P Parameter: Timepoint (hr) Value: 6
  misc_feature: MA Experiment 108527 PARAMETER Experiment Name: Zm_5mM_NO_P Parameter: Tissue Value: Aerial
  misc_feature: MA Experiment 108527 PARAMETER Experiment Name: Zm_5mM_NO_P Parameter: Treatment Value: 5mM NO vs. No Treatment
  misc_feature: MA Experiment ID: 20000108 Result: Down-regulated in Transcription
  misc_feature: MA Experiment 20000108 PARAMETER Experiment Name: Zm_Root-Tips_P Parameter: Age (day) Value: 12
  misc_feature: MA Experiment 20000108 PARAMETER Experiment Name: Zm_Root-Tips_P Parameter: Organism Value: Zea mays
  misc_feature: MA Experiment 20000108 PARAMETER Experiment Name: Zm_Root-Tips_P Parameter: Tissue Value: Root tips vs. Root mid region    35
  misc_feature: MA Experiment 20000108 PARAMETER Experiment Name: Zm_Root-Tips_P Parameter: Tissue Value: Root tips vs. Root mid region   Sequence Listing-Misc Features (4)
ccttttcgcacccggctggccggctccccacctgctcgcctctcgcgcatcctaccaggagggtgggagacccaggcagcggaggtgtgcgaagctcgcttcgcaccacgcgctgcggcctgcgggggagagatcgaggcctgagctagggtctggtggcggagatgtcgacgccggcgaggaagcgcctgatgcgggacttcaagcgccttcagcaggacccgcccgccggcatcagcggcgcgccgtacgacaacaatatcatgctctggaacgccgtcatattcgggccggatgacacgccgtgggatggaggcacgttcaagctgactctgcaatttacagaagattaccccaacaaacctccaactgttcggtttgtttcgaggatgtttcatcccaaacatctatgcggatggaagcatctgtttggacatcctacaaaatcagtggagccctatatatgatgttgcggcaatattgacctctattcagtccctgctgtgtgacccaaacccaaattctcctgctaactctgaagcagccagaatgttcagcgagaacaagcgtgagtacaaccgcaaagttcgtgaggttgtggagcagagctggacagccgactaaaactttatccgcttcgccaggcggtgtaaataaagcatctgtctttcctacttggccggtctgttttaccgttagaaatcctcagctatcgttgtgttcttgtggttcagtcccttgttgtagtgatgcctgcgggttttcctaatgtagtgctgaacggtttcataaactcggatattggtgcatatgtaacagatatagctaagtcaagttgttgcttggtttgc

SEQ ID NO: 5205 - protein, 100 aa, Zea mays subsp. mays
  peptide (1)..(100): Ceres Seq. ID no. 12353796
  misc_feature (1)..(79): Homolog of NCBI NO: 13516451 NR Description: ubiquitin-conjugating enzyme (E2) [Nicotiana
  misc_feature (1)..(79): Homolog of NCBI NO: 33146810 NR Description: OsRad6 [Oryza sativa (japonica cultivar-group)]
  misc_feature (1)..(79): Homolog of NCBI NO: 13516453 NR Description: ubiquitin-conjugating enzyme (E2) [Nicotiana
  misc_feature (1)..(79): Homolog of NCBI NO: 8118527 NR Description: ubiquitin conjugating protein [Avicennia marina]
  misc_feature (1)..(79): Homolog of NCBI NO: 136640 NR Description: Ubiquitin-conjugating enzyme E2-17 kDa ligase) (Ubiquitin carrier protein) >gi|170785|gb|AAA34310.1|
  misc_feature (1)..(79): Homolog of NCBI NO: 18844990 NR Description: Rad6 [Oryza sativa (japonica cultivar-group)]
  misc_feature (1)..(79): Homolog of NCBI NO: 464980 NR Description: Ubiquitin-conjugating enzyme E2-17 kDa ligase) (Ubiquitin carrier protein) >gi|166422|gb|AAA18528.1|
  misc_feature (1)..(79): Homolog of NCBI NO: 18395424 NR Description: E2, ubiquitin-conjugating enzyme 2 (UBC2); id: At2g02760.1, supported by cDNA: gi_13899126, supported by gi_18377455 [Arabidopsis thaliana]
  misc_feature (1)..(79): Homolog of NCBI NO: 18394114 NR Description: E2, ubiquitin-conjugating enzyme 1 (UBC1); id: At1g14400.1, supported by cDNA: 18146., supported by cDNA: supported by cDNA: gi_166923, supported by cDNA: gi_20259106
  misc_feature (1)..(79): Homolog of NCBI NO: 18424601 NR Description: E2, ubiquitin-conjugating enzyme 3 (UBC3); id: At5g62540.1, supported by cDNA: 148141., supported by cDNA: supported by cDNA: gi_15081748 [Arabidopsis thaliana]
MSTPARKRLMRDFKRLQQDPPAGISGAPYDNNIMLWNAVIFGPDDTPWDGGTFKLTLQFTEDYPNKPPTVRFVSRMFHPKHLCGWKHLFGHPTKSVEPYI

SEQ ID NO: 5206 - protein, 98 aa, Zea mays subsp. mays
  peptide (1)..(98): Ceres Seq. ID no. 12353797
LFAPGWPAPHLLASRASYQEGGRPRQRRCAKLASHHALRPAGERSRPELGSGGGDVDAGEEAPDAGLQAPSAGPARRHQRRAVRQQYHALERRHIRAG

SEQ ID NO: 5207 - protein, 91 aa, Zea mays subsp. mays
  peptide (1)..(91): Ceres Seq. ID no. 12353798
  misc_feature (1)..(70): Homolog of NCBI NO: 13516451 NR Description: ubiquitin-conjugating enzyme (E2) [Nicotiana
  misc_feature (1)..(70): Homolog of NCBI NO: 33146810 NR Description: OsRad6 [Oryza sativa (japonica cultivar-group)]
  misc_feature (1)..(70): Homolog of NCBI NO: 13516453 NR Description: ubiquitin-conjugating enzyme (E2) [Nicotiana
  misc_feature (1)..(70): Homolog of NCBI NO: 8118527 NR Description: ubiquitin conjugating protein [Avicennia marina]
  misc_feature (1)..(70): Homolog of NCBI NO: 136640 NR Description: Ubiquitin-conjugating enzyme E2-17 kDa ligase) (Ubiquitin carrier protein) >gi|170785|gb|AAA34310.1|
  misc_feature (1)..(70): Homolog of NCBI NO: 18844990 NR Description: Rad6 [Oryza sativa (japonica cultivar-group)]
  misc_feature (1)..(70): Homolog of NCBI NO: 464980 NR Description: Ubiquitin-conjugating enzyme E2-17 kDa ligase) (Ubiquitin carrier protein) >gi|166422|gb|AAA18528.1|
  misc_feature (1)..(70): Homolog of NCBI NO: 18395424 NR Description: E2, ubiquitin-conjugating enzyme 2 (UBC2); id: At2g02760.1, supported by cDNA: gi_13899126, supported by gi_18377455 [Arabidopsis thaliana]
  misc_feature (1)..(70): Homolog of NCBI NO: 18394114 NR Description: E2, ubiquitin-conjugating enzyme 1 (UBC1); id: At1g14400.1, supported by cDNA: 18146., supported by cDNA: supported by cDNA: gi_166923, supported by cDNA: gi_20259106
  misc_feature (1)..(70): Homolog of NCBI NO: 18424601 NR Description: E2, ubiquitin-conjugating enzyme 3 (UBC3); id: At5g62540.1, supported by cDNA: 148141., supported by cDNA: supported by cDNA: gi_15081748 [Arabidopsis thaliana]
MRDFKRLQQDPPAGISGAPYDNNIMLWNAVIFGPDDTPWDGGTFKLTLQFTEDYPNKPPTVRFVSRMFHPKHLCGWKHLFGHPTKSVEPYI

SEQ ID NO: 5208 - DNA, 1598 bp, Zea mays subsp. mays
  misc_feature (1)..(1598): Ceres Seq. ID no. 12369124
  misc_feature: MA Experiment ID: 108689 Result: Up-regulated in Transcription
  misc_feature: MA Experiment 108689 PARAMETER Experiment Name: Zm_Drought_Roots_P Parameter: Age (day) Value: 9
  misc_feature: MA Experiment 108689 PARAMETER Experiment Name: Zm_Drought_Roots_P Parameter: Organism Value: Zea mays
  misc_feature: MA Experiment 108689 PARAMETER Experiment Name: Zm_Drought_Roots_P Parameter: Plant Line Value: 35A19
  misc_feature: MA Experiment 108689 PARAMETER Experiment Name: Zm_Drought_Roots_P Parameter: Timepoint (hr) Value: 24
  misc_feature: MA Experiment 108689 PARAMETER Experiment Name: Zm_Drought_Roots_P Parameter: Tissue Value: Roots
  misc_feature: MA Experiment 108689 PARAMETER Experiment Name: Zm_Drought_Roots_P Parameter: Treatment Value: Drought vs. No Drought
  misc_feature: MA Experiment ID: 20000108 Result: Down-regulated in Transcription
  misc_feature: MA Experiment 20000108 PARAMETER Experiment Name: Zm_Root-Tips_P Parameter: Age (day) Value: 12
  misc_feature: MA Experiment 20000108 PARAMETER Experiment Name: Zm_Root-Tips_P Parameter: Organism Value: Zea mays
  misc_feature: MA Experiment 20000108 PARAMETER Experiment Name: Zm_Root-Tips_P Parameter: Tissue Value: Root tips vs. Root mid region    35
  misc_feature: MA Experiment 20000108 PARAMETER Experiment Name: Zm_Root-Tips_P Parameter: Tissue Value: Root tips vs. Root mid region   Sequence Listing-Misc Features (4)
atcgcgtacaaaagtagtcacagacatatctcccctctgttccgagaagcaaacagaggccgaagccaaagatgacgaggactacgcagctcgtcgccgccatcgcggtttccttcctgtcagcggcggccgcgtccaacaccaccacgtcactccaaagcctcgtcgccgaagtgtcgcagtggcgggaaatccacctgggcggcggcgcggcggcggcgcatggcgtccggccgagcaccgtcgtggcgtgggcgctctccttcctggccgcgtccgtgtcgagcgccggcggcgtgggcggcgggtcgctgttcctgcccatcctgaacctggtggcggggctgagcctgaagcgcgccactgcctactcgtccttcatggtcaccggcggcgcggcctcgaacgtgctctacaacctcgcctgcacgggcggcggcgggagagggaggctgatcgactacgacatcgcgctactgttccagccgtgcctgctcctgggcgtgagcatcggggtggtgtgcaacgtcatgttcccggagtggctcatcaccctgctcttctccctgttcctcgccttctgcacagccaagacgtgccgcgcgggggtcaagatctggcggtccgagagcagcgggtgcgggtccggggctaggtcctcgcgcggtggacacagccacagcaaggagcccctgctgccccgcggcaccagcgacggcgacgccgagggcggcggcggaaatggcgcggggttcccgtggggagacgtggctctgcttgtcatcatctggctctgcttcttcgccctccatgtcctcattggcgataagcacgggaagggcgtgatcaggattaggccctgcggcgtcgcgtactggctgatcaccttcttccagctacctgccgctgtggctttcacagggtatattgtatacgccaagaggaagaaacgcgctgttcatagcgaaagccaagaggacggcagcaaggcagaccttgcggacgcaggagtggaagccttgccactacctacactacctctcgccgctttcgtcaccggggctctgagcggcctcttcggcatcggaggagggctgcttctgaaccctgtccttcttcagatcggaattcccccgcagaccgcggcagcgacgtcttcgttcatggtcctgttctgtgcgtccatgtccatggtccagttcatcctgctgggcgtggaaggcgtcgggcaggcctgcgtttacgccggggtatgcttcgccggctcggtcgcgggggtcgtcgtgatcgagcgagccgtcagcaagtctggccgggtctcgctcatcgtgttcctcgtcaccgccatcatggcgctcagcgctgtcatcgtcacctgcttcggagcgttagacgtctggatgcagtacaccaccggggaatacatgggcttcaagctaccttgctgacatcttgctcggtgttatgggcttcgttttggttttgcgtttgtgctcttcaccttgtaatgtctggaaagagaggccggagtaggactggttgtgcatgggcactcattgtaatttccaattttcaggttttatatagtgtgaattgtc

SEQ ID NO: 5209 - protein, 458 aa, Zea mays subsp. mays
  peptide (1)..(458): Ceres Seq. ID no. 12369125
  misc_feature (1)..(458): Homolog of NCBI NO: 34908754 NR Description: P0415A04.10 [Oryza sativa (japonica
  misc_feature (57)..(440): Homolog of NCBI NO: 34908752 NR Description: P0415A04.9 [Oryza sativa (japonica
  misc_feature (29)..(458): Homolog of NCBI NO: 6554197 NR Description: T23J18.20 [Arabidopsis thaliana]
  misc_feature (29)..(458): Homolog of NCBI NO: 15220419 NR Description: hypothetical protein; protein id: At1g11540.1
  misc_feature (228)..(458): Homolog of NCBI NO: 15220600 NR Description: unknown protein; protein id: At1g61740.1, by cDNA: gi_13272464 [Arabidopsis thaliana]
  misc_feature (56)..(187): Homolog of NCBI NO: 15220600 NR Description: unknown protein; protein id: At1g61740.1, by cDNA: gi_13272464 [Arabidopsis thaliana]
  misc_feature (23)..(429): Homolog of NCBI NO: 15233579 NR Description: hypothetical protein; protein id: At4g21250.1
  misc_feature (408)..(458): Homolog of NCBI NO: 15233579 NR Description: hypothetical protein; protein id: At4g21250.1
  misc_feature (228)..(458): Homolog of NCBI NO: 11358507 NR Description: membrane protein [imported] - Arabidopsis (fragment) >gi|4079632|emb|CAA10487.1| hypothetical protein
  misc_feature (68)..(187): Homolog of NCBI NO: 11358507 NR Description: membrane protein [imported] - Arabidopsis (fragment) >gi|4079632|emb|CAA10487.1| hypothetical protein
MTRTTQLVAAIAVSFLSAAAASNTTTSLQSLVAEVSQWREIHLGGGAAAAHGVRPSTVVAWALSFLAASVSSAGGVGGGSLFLPILNLVAGLSLKRATAYSSFMVTGGAASNVLYNLACTGGGGRGRLIDYDIALLFQPCLLLGVSIGVVCNVMFPEWLITLLFSLFLAFCTAKTCRAGVKIWRSESSGCGSGARSSRGGHSHSKEPLLPRGTSDGDAEGGGGNGAGFPWGDVALLVIIWLCFFALHVLIGDKHGKGVIRIRPCGVAYWLITFFQLPAAVAFTGYIVYAKRKKRAVHSESQEDGSKADLADAGVEALPLPTLPLAAFVTGALSGLFGIGGGLLLNPVLLQIGIPPQTAAATSSFMVLFCASMSMVQFILLGVEGVGQACVYAGVCFAGSVAGVVVIERAVSKSGRVSLIVFLVTAIMALSAVIVTCFGALDVWMQYTTGEYMGFKLPC

SEQ ID NO: 5210 - protein, 355 aa, Zea mays subsp. mays
  peptide (1)..(355): Ceres Seq. ID no. 12369126
  misc_feature (1)..(355): Homolog of NCBI NO: 34908754 NR Description: P0415A04.10 [Oryza sativa (japonica
  misc_feature (1)..(337): Homolog of NCBI NO: 34908752 NR Description: P0415A04.9 [Oryza sativa (japonica
  misc_feature (1)..(355): Homolog of NCBI NO: 6554197 NR Description: T23J18.20 [Arabidopsis thaliana]
  misc_feature (1)..(355): Homolog of NCBI NO: 15220419 NR Description: hypothetical protein; protein id: At1g11540.1
  misc_feature (125)..(355): Homolog of NCBI NO: 15220600 NR Description: unknown protein; protein id: At1g61740.1, by cDNA: gi_13272464 [Arabidopsis thaliana]
  misc_feature (1)..(84): Homolog of NCBI NO: 15220600 NR Description: unknown protein; protein id: At1g61740.1, by cDNA: gi_13272464 [Arabidopsis thaliana]
  misc_feature (1)..(326): Homolog of NCBI NO: 15233579 NR Description: hypothetical protein; protein id: At4g21250.1
  misc_feature (305)..(355): Homolog of NCBI NO: 15233579 NR Description: hypothetical protein; protein id: At4g21250.1
  misc_feature (125)..(355): Homolog of NCBI NO: 11358507 NR Description: membrane protein [imported] - Arabidopsis (fragment) >gi|4079632|emb|CAA10487.1| hypothetical protein
  misc_feature (1)..(84): Homolog of NCBI NO: 11358507 NR Description: membrane protein [imported] - Arabidopsis (fragment) >gi|4079632|emb|CAA10487.1| hypothetical protein
MVTGGAASNVLYNLACTGGGGRGRLIDYDIALLFQPCLLLGVSIGVVCNVMFPEWLITLLFSLFLAFCTAKTCRAGVKIWRSESSGCGSGARSSRGGHSHSKEPLLPRGTSDGDAEGGGGNGAGFPWGDVALLVIIWLCFFALHVLIGDKHGKGVIRIRPCGVAYWLITFFQLPAAVAFTGYIVYAKRKKRAVHSESQEDGSKADLADAGVEALPLPTLPLAAFVTGALSGLFGIGGGLLLNPVLLQIGIPPQTAAATSSFMVLFCASMSMVQFILLGVEGVGQACVYAGVCFAGSVAGVVVIERAVSKSGRVSLIVFLVTAIMALSAVIVTCFGALDVWMQYTTGEYMGFKLPC

SEQ ID NO: 5211 - protein, 305 aa, Zea mays subsp. mays
  peptide (1)..(305): Ceres Seq. ID no. 12369127
  misc_feature (1)..(305): Homolog of NCBI NO: 34908754 NR Description: P0415A04.10 [Oryza sativa (japonica
  misc_feature (1)..(287): Homolog of NCBI NO: 34908752 NR Description: P0415A04.9 [Oryza sativa (japonica
  misc_feature (1)..(305): Homolog of NCBI NO: 6554197 NR Description: T23J18.20 [Arabidopsis thaliana]
  misc_feature (1)..(305): Homolog of NCBI NO: 15220419 NR Description: hypothetical protein; protein id: At1g11540.1
  misc_feature (75)..(305): Homolog of NCBI NO: 15220600 NR Description: unknown protein; protein id: At1g61740.1, by cDNA: gi_13272464 [Arabidopsis thaliana]
  misc_feature (1)..(34): Homolog of NCBI NO: 15220600 NR Description: unknown protein; protein id: At1g61740.1, by cDNA: gi_13272464 [Arabidopsis thaliana]
  misc_feature (1)..(276): Homolog of NCBI NO: 15233579 NR Description: hypothetical protein; protein id: At4g21250.1
  misc_feature (255)..(305): Homolog of NCBI NO: 15233579 NR Description: hypothetical protein; protein id: At4g21250.1
  misc_feature (75)..(305): Homolog of NCBI NO: 11358507 NR Description: membrane protein [imported] - Arabidopsis (fragment) >gi|4079632|emb|CAA10487.1| hypothetical protein
  misc_feature (1)..(34): Homolog of NCBI NO: 11358507 NR Description: membrane protein [imported] - Arabidopsis (fragment) >gi|4079632|emb|CAA10487.1| hypothetical protein
MFPEWLITLLFSLFLAFCTAKTCRAGVKIWRSESSGCGSGARSSRGGHSHSKEPLLPRGTSDGDAEGGGGNGAGFPWGDVALLVIIWLCFFALHVLIGDKHGKGVIRIRPCGVAYWLITFFQLPAAVAFTGYIVYAKRKKRAVHSESQEDGSKADLADAGVEALPLPTLPLAAFVTGALSGLFGIGGGLLLNPVLLQIGIPPQTAAATSSFMVLFCASMSMVQFILLGVEGVGQACVYAGVCFAGSVAGVVVIERAVSKSGRVSLIVFLVTAIMALSAVIVTCFGALDVWMQYTTGEYMGFKLPC

SEQ ID NO: 5212 - DNA, 916 bp, Zea mays subsp. mays
  misc_feature (1)..(916): Ceres Seq. ID no. 13625767
  misc_feature: MA Experiment ID: 108527 Result: Down-regulated in Transcription
  misc_feature: MA Experiment 108527 PARAMETER Experiment Name: Zm_5mM_NO_P Parameter: Age (day) Value: 8
  misc_feature: MA Experiment 108527 PARAMETER Experiment Name: Zm_5mM_NO_P Parameter: Organism Value: Zea mays
  misc_feature: MA Experiment 108527 PARAMETER Experiment Name: Zm_5mM_NO_P Parameter: Plant Line Value: 35A19
  misc_feature: MA Experiment 108527 PARAMETER Experiment Name: Zm_5mM_NO_P Parameter: Timepoint (hr) Value: 6
  misc_feature: MA Experiment 108527 PARAMETER Experiment Name: Zm_5mM_NO_P Parameter: Tissue Value: Aerial
  misc_feature: MA Experiment 108527 PARAMETER Experiment Name: Zm_5mM_NO_P Parameter: Treatment Value: 5mM NO vs. No Treatment
  misc_feature: MA Experiment ID: 108528 Result: Up-regulated in Transcription
  misc_feature: MA Experiment 108528 PARAMETER Experiment Name: Zm_Imbibed_Seeds_P Parameter: Age (day) Value: 5 vs. 2
  misc_feature: MA Experiment 108528 PARAMETER Experiment Name: Zm_Imbibed_Seeds_P Parameter: Organism Value: Zea mays
  misc_feature: MA Experiment 108528 PARAMETER Experiment Name: Zm_Imbibed_Seeds_P Parameter: Plant Line Value: 35A19
  misc_feature: MA Experiment 108528 PARAMETER Experiment Name: Zm_Imbibed_Seeds_P Parameter: Tissue Value: Aerial vs. Embryo
  misc_feature: MA Experiment ID: 108530 Result: Up-regulated in Transcription
  misc_feature: MA Experiment 108530 PARAMETER Experiment Name: Zm_Imbibed_Seeds_P Parameter: Age (day) Value: 6 vs. 2
  misc_feature: MA Experiment 108530 PARAMETER Experiment Name: Zm_Imbibed_Seeds_P Parameter: Organism Value: Zea mays
  misc_feature: MA Experiment 108530 PARAMETER Experiment Name: Zm_Imbibed_Seeds_P Parameter: Plant Line Value: 35A19
  misc_feature: MA Experiment 108530 PARAMETER Experiment Name: Zm_Imbibed_Seeds_P Parameter: Tissue Value: Aerial vs. Embryo
  misc_feature: MA Experiment ID: 108536 Result: Down-regulated in Transcription
  misc_feature: MA Experiment 108536 PARAMETER Experiment Name: Zm_Meristem_P Parameter: Age (day) Value: 8
  misc_feature: MA Experiment 108536 PARAMETER Experiment Name: Zm_Meristem_P Parameter: Organism Value: Zea mays
  misc_feature: MA Experiment 108536 PARAMETER Experiment Name: Zm_Meristem_P Parameter: Plant Line Value: 35A19
  misc_feature: MA Experiment 108536 PARAMETER Experiment Name: Zm_Meristem_P Parameter: Tissue Value: Shoot Meristem vs. Above Shoot Meristem
  misc_feature: MA Experiment ID: 108545 Result: Up-regulated in Transcription
  misc_feature: MA Experiment 108545 PARAMETER Experiment Name: Zm_Imbibed_Seeds_P Parameter: Age (day) Value: 3 vs. 2
  misc_feature: MA Experiment 108545 PARAMETER Experiment Name: Zm_Imbibed_Seeds_P Parameter: Organism Value: Zea mays
  misc_feature: MA Experiment 108545 PARAMETER Experiment Name: Zm_Imbibed_Seeds_P Parameter: Plant Line Value: 35A19
  misc_feature: MA Experiment 108545 PARAMETER Experiment Name: Zm_Imbibed_Seeds_P Parameter: Tissue Value: Aerial vs. Embryo
  misc_feature: MA Experiment ID: 108546 Result: Down-regulated in Transcription
  misc_feature: MA Experiment 108546 PARAMETER Experiment Name: Zm_Imbibed_Seeds_P Parameter: Age (day) Value: 3 vs. 2
  misc_feature: MA Experiment 108546 PARAMETER Experiment Name: Zm_Imbibed_Seeds_P Parameter: Organism Value: Zea mays
  misc_feature: MA Experiment 108546 PARAMETER Experiment Name: Zm_Imbibed_Seeds_P Parameter: Plant Line Value: 35A19
  misc_feature: MA Experiment 108546 PARAMETER Experiment Name: Zm_Imbibed_Seeds_P Parameter: Tissue Value: Roots vs. Embryo
  misc_feature: MA Experiment ID: 108547 Result: Up-regulated in Transcription
  misc_feature: MA Experiment 108547 PARAMETER Experiment Name: Zm_Imbibed_Seeds_P Parameter: Age (day) Value: 4 vs. 2
  misc_feature: MA Experiment 108547 PARAMETER Experiment Name: Zm_Imbibed_Seeds_P Parameter: Organism Value: Zea mays
  misc_feature: MA Experiment 108547 PARAMETER Experiment Name: Zm_Imbibed_Seeds_P Parameter: Plant Line Value: 35A19
  misc_feature: MA Experiment 108547 PARAMETER Experiment Name: Zm_Imbibed_Seeds_P Parameter: Tissue Value: Aerial vs. Embryo
  misc_feature: MA Experiment ID: 108687 Result: Down-regulated in Transcription
  misc_feature: MA Experiment 108687 PARAMETER Experiment Name: Zm_Embryos-Flowers__P Parameter: Tissue Value: Embryo vs. Aerial+
  misc_feature: MA Experiment ID: 20000479 Result: Down-regulated in Transcription
  misc_feature: MA Experiment 20000479 PARAMETER Experiment Name: Zm_Drought_P Parameter: Age (day) Value: 10
  misc_feature: MA Experiment 20000479 PARAMETER Experiment Name: Zm_Drought_P Parameter: Organism Value: Zea mays
  misc_feature: MA Experiment 20000479 PARAMETER Experiment Name: Zm_Drought_P Parameter: Plant Line Value: 35A19
  misc_feature: MA Experiment 20000479 PARAMETER Experiment Name: Zm_Drought_P Parameter: Timepoint (hr) Value: 48
  misc_feature: MA Experiment 20000479 PARAMETER Experiment Name: Zm_Drought_P Parameter: Tissue Value: Aerial
  misc_feature: MA Experiment 20000479 PARAMETER Experiment Name: Zm_Drought_P Parameter: Treatment Value: Drought vs. No Drought
  misc_feature: MA Experiment ID: 20000480 Result: Down-regulated in Transcription
  misc_feature: MA Experiment 20000480 PARAMETER Experiment Name: Zm_Drought_P Parameter: Age (day) Value: 11
  misc_feature: MA Experiment 20000480 PARAMETER Experiment Name: Zm_Drought_P Parameter: Organism Value: Zea mays
  misc_feature: MA Experiment 20000480 PARAMETER Experiment Name: Zm_Drought_P Parameter: Plant Line Value: 35A19
  misc_feature: MA Experiment 20000480 PARAMETER Experiment Name: Zm_Drought_P Parameter: Timepoint (hr) Value: 72
  misc_feature: MA Experiment 20000480 PARAMETER Experiment Name: Zm_Drought_P Parameter: Tissue Value: Aerial
  misc_feature: MA Experiment 20000480 PARAMETER Experiment Name: Zm_Drought_P Parameter: Treatment Value: Drought vs. No Drought
  misc_feature: MA Experiment ID: 20000534 Result: Down-regulated in Transcription
  misc_feature: MA Experiment 20000534 PARAMETER Experiment Name: Zm_Hybrid_Pollen_P Parameter: Age (day) Value: 8
  misc_feature: MA Experiment 20000534 PARAMETER Experiment Name: Zm_Hybrid_Pollen_P Parameter: Organism Value: Zea mays
  misc_feature: MA Experiment 20000534 PARAMETER Experiment Name: Zm_Hybrid_Pollen_P Parameter: Plant Line Value: 35A19
  misc_feature: MA Experiment 20000534 PARAMETER Experiment Name: Zm_Hybrid_Pollen_P Parameter: Tissue Value: Pollen vs. Aerial
  misc_feature: MA Experiment ID: 20000626 Result: Down-regulated in Transcription
  misc_feature: MA Experiment 20000626 PARAMETER Experiment Name: Zm_Herbicide-Treatments_P Parameter: Timepoint (hr) Value: 12
  misc_feature: MA Experiment 20000626 PARAMETER Experiment Name: Zm_Herbicide-Treatments_P Parameter: Tissue Value: Aerial
  misc_feature: MA Experiment 20000626 PARAMETER Experiment Name: Zm_Herbicide-Treatments_P Parameter: Treatment Value: Roundup vs. No Treatment
ggttggcgagaaagagcagagggacaccgaaacagagaggagcagaggggagcgacgacaggtcagcggagatggaagcagcggcaggaggagtggaggcggagggggtgatgagggtgctggtngtggacgactcccccgtcgaccgccgggggagtcgtcacgcacgcactcctcatcttatcccccgcctcctccggtcctcccgccgctgttgctcacttctgagtcccgacgcacgagctcccaagagctagccatggcgtccaccaccctctcctccgccttcaccctcctatcccgcccctccacctccccgtgccccgccgcctcgctcccgaggtcctcccacgccgcgccccacatccgccggggccgccgcgccgtcgccgtcgcgtgcaccgccaccgagtcccccaagatcctggagctcggggacgccatcgccgggctcacgctcgaggaggcccgcagcctcgtcgaccacctccaggagcggctcggcgtcaccgccgcggccttcgcgccggccgccgtcgtcgcggcgcccggggcgggcggcggggccgcggccgaggaggaggcccccgtcgagaagacggagttcgacgtgatgatcgaagaggtgcccagcagcgcgcgtatcgccactatcaaggtggtgcgcgcgctcaccagcctcgcgctcaaggaggccaaggaccttatcgagggtctccccaagaaggtcaaggaggccgtcagcaaggacgaggccgaggacgccaagaagcagctcgaggaggtcggcgccaaggtgtctatcgcgtgacactaggtatacgaggactcctttttttttttctttagtttcttttgtttgcatccccaatctcttgtatccccactatcgttcgtaaggaattgctgtttcatg

SEQ ID NO: 5213 - protein, 269 aa, Zea mays subsp. mays
  peptide (1)..(269): Ceres Seq. ID no. 13625768
  misc_feature (201)..(269): Pfam Name: Ribosomal protein L7/L12 C-terminal domain Pfam Description: Ribosomal protein L7/L12 C-terminal domain
  misc_feature (201)..(269): Pfam Name: Ribosomal protein L7/L12 C-terminal domain Pfam Description: Ribosomal protein L7/L12 C-terminal domain
  misc_feature (201)..(269): Pfam Name: Ribosomal protein L7/L12 C-terminal domain Pfam Description: Ribosomal protein L7/L12 C-terminal domain
  misc_feature (87)..(269): Homolog of NCBI NO: 34912074 NR Description: putative ribosomal protein L12 [Oryza sativa
  misc_feature (87)..(269): Homolog of NCBI NO: 464517 NR Description: 50S RIBOSOMAL PROTEIN L12-1, CHLOROPLAST
  misc_feature (87)..(269): Homolog of NCBI NO: 464518 NR Description: 50S RIBOSOMAL PROTEIN L12-2, CHLOROPLAST (CL12-2) >gi|288584|emb|CAA48414.1| ribosomal protein L12 [Secale
  misc_feature (73)..(260): Homolog of NCBI NO: 1345575 NR Description: ribosomal protein L12 [Secale cereale]
  misc_feature (85)..(269): Homolog of NCBI NO: 4176422 NR Description: ribosomal protein L12 [Oryza sativa (japonica
  misc_feature (87)..(269): Homolog of NCBI NO: 464517 NR Description: 50S RIBOSOMAL PROTEIN L12-1, CHLOROPLAST
  misc_feature (73)..(260): Homolog of NCBI NO: 1345575 NR Description: ribosomal protein L12 [Secale cereale]
  misc_feature (87)..(269): Homolog of NCBI NO: 464518 NR Description: 50S RIBOSOMAL PROTEIN L12-2, CHLOROPLAST (CL12-2) >gi|288584|emb|CAA48414.1| ribosomal protein L12 [Secale
  misc_feature (87)..(269): Homolog of NCBI NO: 464517 NR Description: 50S RIBOSOMAL PROTEIN L12-1, CHLOROPLAST
  misc_feature (87)..(269): Homolog of NCBI NO: 34912074 NR Description: putative ribosomal protein L12 [Oryza sativa
  misc_feature (87)..(268): Homolog of NCBI NO: 133085 NR Description: 50S RIBOSOMAL PROTEIN L12, CHLOROPLAST PRECURSOR
  misc_feature (87)..(269): Homolog of NCBI NO: 133088 NR Description: 50S RIBOSOMAL PROTEIN L12, CHLOROPLAST PRECURSOR
  misc_feature (87)..(269): Homolog of NCBI NO: 20020 NR Description: ribosomal protein L12-1a [Nicotiana tabacum]
  misc_feature (87)..(269): Homolog of NCBI NO: 548746 NR Description: 50S RIBOSOMAL PROTEIN L12, CHLOROPLAST PRECURSOR
  misc_feature (87)..(269): Homolog of NCBI NO: 418872 NR Description: ribosomal protein L12.1 precursor, chloroplast -
  misc_feature (85)..(269): Homolog of NCBI NO: 4176422 NR Description: ribosomal protein L12 [Oryza sativa (japonica
  misc_feature (87)..(268): Homolog of NCBI NO: 133085 NR Description: 50S RIBOSOMAL PROTEIN L12, CHLOROPLAST PRECURSOR
  misc_feature (87)..(269): Homolog of NCBI NO: 133088 NR Description: 50S RIBOSOMAL PROTEIN L12, CHLOROPLAST PRECURSOR
  misc_feature (87)..(269): Homolog of NCBI NO: 20020 NR Description: ribosomal protein L12-1a [Nicotiana tabacum]
  misc_feature (87)..(269): Homolog of NCBI NO: 548746 NR Description: 50S RIBOSOMAL PROTEIN L12, CHLOROPLAST PRECURSOR
  misc_feature (87)..(269): Homolog of NCBI NO: 418872 NR Description: ribosomal protein L12.1 precursor, chloroplast -
  misc_feature (85)..(269): Homolog of NCBI NO: 4176422 NR Description: ribosomal protein L12 [Oryza sativa (japonica
  misc_feature (73)..(260): Homolog of NCBI NO: 1345575 NR Description: ribosomal protein L12 [Secale cereale]
  misc_feature (87)..(269): Homolog of NCBI NO: 464518 NR Description: 50S RIBOSOMAL PROTEIN L12-2, CHLOROPLAST (CL12-2) >gi|288584|emb|CAA48414.1| ribosomal protein L12 [Secale
  misc_feature (87)..(269): Homolog of NCBI NO: 34912074 NR Description: putative ribosomal protein L12 [Oryza sativa
  misc_feature (87)..(269): Homolog of NCBI NO: 418872 NR Description: ribosomal protein L12.1 precursor, chloroplast -
  misc_feature (87)..(269): Homolog of NCBI NO: 548746 NR Description: 50S RIBOSOMAL PROTEIN L12, CHLOROPLAST PRECURSOR
  misc_feature (87)..(269): Homolog of NCBI NO: 20020 NR Description: ribosomal protein L12-1a [Nicotiana tabacum]
  misc_feature (87)..(269): Homolog of NCBI NO: 133088 NR Description: 50S RIBOSOMAL PROTEIN L12, CHLOROPLAST PRECURSOR
  misc_feature (87)..(268): Homolog of NCBI NO: 133085 NR Description: 50S RIBOSOMAL PROTEIN L12, CHLOROPLAST PRECURSOR
  misc_feature (42)..(42): Xaa is any aa, unknown or other
VGEKEQRDTETERSRGERRQVSGDGSSGRRSGGGGGDEGAGXGRLPRRPPGESSRTHSSSYPPPPPVLPPLLLTSESRRTSSQELAMASTTLSSAFTLLSRPSTSPCPAASLPRSSHAAPHIRRGRRAVAVACTATESPKILELGDAIAGLTLEEARSLVDHLQERLGVTAAAFAPAAVVAAPGAGGGAAAEEEAPVEKTEFDVMIEEVPSSARIATIKVVRALTSLALKEAKDLIEGLPKKVKEAVSKDEAEDAKKQLEEVGAKVSIA

SEQ ID NO: 5214 - protein, 183 aa, Zea mays subsp. mays
  peptide (1)..(183): Ceres Seq. ID no. 13625769
  misc_feature (115)..(183): Pfam Name: Ribosomal protein L7/L12 C-terminal domain Pfam Description: Ribosomal protein L7/L12 C-terminal domain
  misc_feature (115)..(183): Pfam Name: Ribosomal protein L7/L12 C-terminal domain Pfam Description: Ribosomal protein L7/L12 C-terminal domain
  misc_feature (115)..(183): Pfam Name: Ribosomal protein L7/L12 C-terminal domain Pfam Description: Ribosomal protein L7/L12 C-terminal domain
  misc_feature (1)..(183): Homolog of NCBI NO: 34912074 NR Description: putative ribosomal protein L12 [Oryza sativa
  misc_feature (1)..(183): Homolog of NCBI NO: 464517 NR Description: 50S RIBOSOMAL PROTEIN L12-1, CHLOROPLAST
  misc_feature (1)..(183): Homolog of NCBI NO: 464518 NR Description: 50S RIBOSOMAL PROTEIN L12-2, CHLOROPLAST (CL12-2) >gi|288584|emb|CAA48414.1| ribosomal protein L12 [Secale
  misc_feature (1)..(174): Homolog of NCBI NO: 1345575 NR Description: ribosomal protein L12 [Secale cereale]
  misc_feature (1)..(183): Homolog of NCBI NO: 4176422 NR Description: ribosomal protein L12 [Oryza sativa (japonica
  misc_feature (1)..(183): Homolog of NCBI NO: 464517 NR Description: 50S RIBOSOMAL PROTEIN L12-1, CHLOROPLAST
  misc_feature (1)..(174): Homolog of NCBI NO: 1345575 NR Description: ribosomal protein L12 [Secale cereale]
  misc_feature (1)..(183): Homolog of NCBI NO: 464518 NR Description: 50S RIBOSOMAL PROTEIN L12-2, CHLOROPLAST (CL12-2) >gi|288584|emb|CAA48414.1| ribosomal protein L12 [Secale
  misc_feature (1)..(183): Homolog of NCBI NO: 464517 NR Description: 50S RIBOSOMAL PROTEIN L12-1, CHLOROPLAST
  misc_feature (1)..(183): Homolog of NCBI NO: 34912074 NR Description: putative ribosomal protein L12 [Oryza sativa
  misc_feature (1)..(182): Homolog of NCBI NO: 133085 NR Description: 50S RIBOSOMAL PROTEIN L12, CHLOROPLAST PRECURSOR
  misc_feature (1)..(183): Homolog of NCBI NO: 133088 NR Description: 50S RIBOSOMAL PROTEIN L12, CHLOROPLAST PRECURSOR
  misc_feature (1)..(183): Homolog of NCBI NO: 20020 NR Description: ribosomal protein L12-1a [Nicotiana tabacum]
  misc_feature (1)..(183): Homolog of NCBI NO: 548746 NR Description: 50S RIBOSOMAL PROTEIN L12, CHLOROPLAST PRECURSOR
  misc_feature (1)..(183): Homolog of NCBI NO: 418872 NR Description: ribosomal protein L12.1 precursor, chloroplast -
  misc_feature (1)..(183): Homolog of NCBI NO: 4176422 NR Description: ribosomal protein L12 [Oryza sativa (japonica
  misc_feature (1)..(182): Homolog of NCBI NO: 133085 NR Description: 50S RIBOSOMAL PROTEIN L12, CHLOROPLAST PRECURSOR
  misc_feature (1)..(183): Homolog of NCBI NO: 133088 NR Description: 50S RIBOSOMAL PROTEIN L12, CHLOROPLAST PRECURSOR
  misc_feature (1)..(183): Homolog of NCBI NO: 20020 NR Description: ribosomal protein L12-1a [Nicotiana tabacum]
  misc_feature (1)..(183): Homolog of NCBI NO: 548746 NR Description: 50S RIBOSOMAL PROTEIN L12, CHLOROPLAST PRECURSOR
  misc_feature (1)..(183): Homolog of NCBI NO: 418872 NR Description: ribosomal protein L12.1 precursor, chloroplast -
  misc_feature (1)..(183): Homolog of NCBI NO: 4176422 NR Description: ribosomal protein L12 [Oryza sativa (japonica
  misc_feature (1)..(174): Homolog of NCBI NO: 1345575 NR Description: ribosomal protein L12 [Secale cereale]
  misc_feature (1)..(183): Homolog of NCBI NO: 464518 NR Description: 50S RIBOSOMAL PROTEIN L12-2, CHLOROPLAST (CL12-2) >gi|288584|emb|CAA48414.1| ribosomal protein L12 [Secale
  misc_feature (1)..(183): Homolog of NCBI NO: 34912074 NR Description: putative ribosomal protein L12 [Oryza sativa
  misc_feature (1)..(183): Homolog of NCBI NO: 418872 NR Description: ribosomal protein L12.1 precursor, chloroplast -
  misc_feature (1)..(183): Homolog of NCBI NO: 548746 NR Description: 50S RIBOSOMAL PROTEIN L12, CHLOROPLAST PRECURSOR
  misc_feature (1)..(183): Homolog of NCBI NO: 20020 NR Description: ribosomal protein L12-1a [Nicotiana tabacum]
  misc_feature (1)..(183): Homolog of NCBI NO: 133088 NR Description: 50S RIBOSOMAL PROTEIN L12, CHLOROPLAST PRECURSOR
  misc_feature (1)..(182): Homolog of NCBI NO: 133085 NR Description: 50S RIBOSOMAL PROTEIN L12, CHLOROPLAST PRECURSOR
MASTTLSSAFTLLSRPSTSPCPAASLPRSSHAAPHIRRGRRAVAVACTATESPKILELGDAIAGLTLEEARSLVDHLQERLGVTAAAFAPAAVVAAPGAGGGAAAEEEAPVEKTEFDVMIEEVPSSARIATIKVVRALTSLALKEAKDLIEGLPKKVKEAVSKDEAEDAKKQLEEVGAKVSIA

SEQ ID NO: 5215 - DNA, 1220 bp, Zea mays subsp. mays
  misc_feature (1)..(1220): Ceres Seq. ID no. 12376640
  misc_feature: MA Experiment ID: 108527 Result: Down-regulated in Transcription
  misc_feature: MA Experiment 108527 PARAMETER Experiment Name: Zm_5mM_NO_P Parameter: Age (day) Value: 8
  misc_feature: MA Experiment 108527 PARAMETER Experiment Name: Zm_5mM_NO_P Parameter: Organism Value: Zea mays
  misc_feature: MA Experiment 108527 PARAMETER Experiment Name: Zm_5mM_NO_P Parameter: Plant Line Value: 35A19
  misc_feature: MA Experiment 108527 PARAMETER Experiment Name: Zm_5mM_NO_P Parameter: Timepoint (hr) Value: 6
  misc_feature: MA Experiment 108527 PARAMETER Experiment Name: Zm_5mM_NO_P Parameter: Tissue Value: Aerial
  misc_feature: MA Experiment 108527 PARAMETER Experiment Name: Zm_5mM_NO_P Parameter: Treatment Value: 5mM NO vs. No Treatment
  misc_feature: MA Experiment ID: 108528 Result: Up-regulated in Transcription
  misc_feature: MA Experiment 108528 PARAMETER Experiment Name: Zm_Imbibed_Seeds_P Parameter: Age (day) Value: 5 vs. 2
  misc_feature: MA Experiment 108528 PARAMETER Experiment Name: Zm_Imbibed_Seeds_P Parameter: Organism Value: Zea mays
  misc_feature: MA Experiment 108528 PARAMETER Experiment Name: Zm_Imbibed_Seeds_P Parameter: Plant Line Value: 35A19
  misc_feature: MA Experiment 108528 PARAMETER Experiment Name: Zm_Imbibed_Seeds_P Parameter: Tissue Value: Aerial vs. Embryo
  misc_feature: MA Experiment ID: 108529 Result: Up-regulated in Transcription
  misc_feature: MA Experiment 108529 PARAMETER Experiment Name: Zm_Imbibed_Seeds_P Parameter: Age (day) Value: 5 vs. 2
  misc_feature: MA Experiment 108529 PARAMETER Experiment Name: Zm_Imbibed_Seeds_P Parameter: Organism Value: Zea mays
  misc_feature: MA Experiment 108529 PARAMETER Experiment Name: Zm_Imbibed_Seeds_P Parameter: Plant Line Value: 35A19
  misc_feature: MA Experiment 108529 PARAMETER Experiment Name: Zm_Imbibed_Seeds_P Parameter: Tissue Value: Roots vs. Embryo
  misc_feature: MA Experiment ID: 108530 Result: Up-regulated in Transcription
  misc_feature: MA Experiment 108530 PARAMETER Experiment Name: Zm_Imbibed_Seeds_P Parameter: Age (day) Value: 6 vs. 2
  misc_feature: MA Experiment 108530 PARAMETER Experiment Name: Zm_Imbibed_Seeds_P Parameter: Organism Value: Zea mays
  misc_feature: MA Experiment 108530 PARAMETER Experiment Name: Zm_Imbibed_Seeds_P Parameter: Plant Line Value: 35A19
  misc_feature: MA Experiment 108530 PARAMETER Experiment Name: Zm_Imbibed_Seeds_P Parameter: Tissue Value: Aerial vs. Embryo
  misc_feature: MA Experiment ID: 108534 Result: Down-regulated in Transcription
  misc_feature: MA Experiment 108534 PARAMETER Experiment Name: Zm_4deg_Cold_P Parameter: Age (hr) Value: 8
  misc_feature: MA Experiment 108534 PARAMETER Experiment Name: Zm_4deg_Cold_P Parameter: Organism Value: Zea mays
  misc_feature: MA Experiment 108534 PARAMETER Experiment Name: Zm_4deg_Cold_P Parameter: Plant Line Value: 35A19
  misc_feature: MA Experiment 108534 PARAMETER Experiment Name: Zm_4deg_Cold_P Parameter: Temperature (deg C) Value: 4 vs. 22
  misc_feature: MA Experiment 108534 PARAMETER Experiment Name: Zm_4deg_Cold_P Parameter: Timepoint (hr) Value: 6
  misc_feature: MA Experiment 108534 PARAMETER Experiment Name: Zm_4deg_Cold_P Parameter: Tissue Value: Aerial
  misc_feature: MA Experiment ID: 108535 Result: Down-regulated in Transcription
  misc_feature: MA Experiment 108535 PARAMETER Experiment Name: Zm_Meristem_P Parameter: Age (day) Value: 8
  misc_feature: MA Experiment 108535 PARAMETER Experiment Name: Zm_Meristem_P Parameter: Organism Value: Zea mays
  misc_feature: MA Experiment 108535 PARAMETER Experiment Name: Zm_Meristem_P Parameter: Plant Line Value: 35A19
  misc_feature: MA Experiment 108535 PARAMETER Experiment Name: Zm_Meristem_P Parameter: Tissue Value: Root Meristem vs. Above Root Meristem
  misc_feature: MA Experiment ID: 108536 Result: Up-regulated in Transcription
  misc_feature: MA Experiment 108536 PARAMETER Experiment Name: Zm_Meristem_P Parameter: Age (day) Value: 8
  misc_feature: MA Experiment 108536 PARAMETER Experiment Name: Zm_Meristem_P Parameter: Organism Value: Zea mays
  misc_feature: MA Experiment 108536 PARAMETER Experiment Name: Zm_Meristem_P Parameter: Plant Line Value: 35A19
  misc_feature: MA Experiment 108536 PARAMETER Experiment Name: Zm_Meristem_P Parameter: Tissue Value: Shoot Meristem vs. Above Shoot Meristem
  misc_feature: MA Experiment ID: 108545 Result: Up-regulated in Transcription
  misc_feature: MA Experiment 108545 PARAMETER Experiment Name: Zm_Imbibed_Seeds_P Parameter: Age (day) Value: 3 vs. 2
  misc_feature: MA Experiment 108545 PARAMETER Experiment Name: Zm_Imbibed_Seeds_P Parameter: Organism Value: Zea mays
  misc_feature: MA Experiment 108545 PARAMETER Experiment Name: Zm_Imbibed_Seeds_P Parameter: Plant Line Value: 35A19
  misc_feature: MA Experiment 108545 PARAMETER Experiment Name: Zm_Imbibed_Seeds_P Parameter: Tissue Value: Aerial vs. Embryo
  misc_feature: MA Experiment ID: 108546 Result: Up-regulated in Transcription
  misc_feature: MA Experiment 108546 PARAMETER Experiment Name: Zm_Imbibed_Seeds_P Parameter: Age (day) Value: 3 vs. 2
  misc_feature: MA Experiment 108546 PARAMETER Experiment Name: Zm_Imbibed_Seeds_P Parameter: Organism Value: Zea mays
  misc_feature: MA Experiment 108546 PARAMETER Experiment Name: Zm_Imbibed_Seeds_P Parameter: Plant Line Value: 35A19
  misc_feature: MA Experiment 108546 PARAMETER Experiment Name: Zm_Imbibed_Seeds_P Parameter: Tissue Value: Roots vs. Embryo
  misc_feature: MA Experiment ID: 108547 Result: Up-regulated in Transcription
  misc_feature: MA Experiment 108547 PARAMETER Experiment Name: Zm_Imbibed_Seeds_P Parameter: Age (day) Value: 4 vs. 2
  misc_feature: MA Experiment 108547 PARAMETER Experiment Name: Zm_Imbibed_Seeds_P Parameter: Organism Value: Zea mays
  misc_feature: MA Experiment 108547 PARAMETER Experiment Name: Zm_Imbibed_Seeds_P Parameter: Plant Line Value: 35A19
  misc_feature: MA Experiment 108547 PARAMETER Experiment Name: Zm_Imbibed_Seeds_P Parameter: Tissue Value: Aerial vs. Embryo
  misc_feature: MA Experiment ID: 20000480 Result: Down-regulated in Transcription
  misc_feature: MA Experiment 20000480 PARAMETER Experiment Name: Zm_Drought_P Parameter: Age (day) Value: 11
  misc_feature: MA Experiment 20000480 PARAMETER Experiment Name: Zm_Drought_P Parameter: Organism Value: Zea mays
  misc_feature: MA Experiment 20000480 PARAMETER Experiment Name: Zm_Drought_P Parameter: Plant Line Value: 35A19
  misc_feature: MA Experiment 20000480 PARAMETER Experiment Name: Zm_Drought_P Parameter: Timepoint (hr) Value: 72
  misc_feature: MA Experiment 20000480 PARAMETER Experiment Name: Zm_Drought_P Parameter: Tissue Value: Aerial
  misc_feature: MA Experiment 20000480 PARAMETER Experiment Name: Zm_Drought_P Parameter: Treatment Value: Drought vs. No Drought
  misc_feature: MA Experiment ID: 20000535 Result: Down-regulated in Transcription
  misc_feature: MA Experiment 20000535 PARAMETER Experiment Name: Zm_Hybrid_Seed_Dev_P Parameter: DAP Value: 30 vs. 12
  misc_feature: MA Experiment 20000535 PARAMETER Experiment Name: Zm_Hybrid_Seed_Dev_P Parameter: Organism Value: Zea mays
  misc_feature: MA Experiment 20000535 PARAMETER Experiment Name: Zm_Hybrid_Seed_Dev_P Parameter: Plant Line Value: 35A19
  misc_feature: MA Experiment 20000535 PARAMETER Experiment Name: Zm_Hybrid_Seed_Dev_P Parameter: Tissue Value: Embryo vs. Unfert Floret
  misc_feature: MA Experiment ID: 20001613 Result: Down-regulated in Transcription
  misc_feature: MA Experiment 20001613 PARAMETER Experiment Name: Zm_50ppm_KNO3_L-to-H_P Parameter: Age (day) Value: 20
  misc_feature: MA Experiment 20001613 PARAMETER Experiment Name: Zm_50ppm_KNO3_L-to-H_P Parameter: Organism Value: Zea mays
  misc_feature: MA Experiment 20001613 PARAMETER Experiment Name: Zm_50ppm_KNO3_L-to-H_P Parameter: Plant Line Value: 35A19
  misc_feature: MA Experiment 20001613 PARAMETER Experiment Name: Zm_50ppm_KNO3_L-to-H_P Parameter: Timepoint (hr) Value: 24
  misc_feature: MA Experiment 20001613 PARAMETER Experiment Name: Zm_50ppm_KNO3_L-to-H_P Parameter: Tissue Value: Roots
  misc_feature: MA Experiment 20001613 PARAMETER Experiment Name: Zm_50ppm_KNO3_L-to-H_P Parameter: Treatment Value: 50ppm KNO3 vs. 50ppm KCl
  misc_feature: MA Experiment ID: 20001614 Result: Down-regulated in Transcription
  misc_feature: MA Experiment 20001614 PARAMETER Experiment Name: Zm_50ppm_KNO3_L-to-H_P Parameter: Age (day) Value: 21
  misc_feature: MA Experiment 20001614 PARAMETER Experiment Name: Zm_50ppm_KNO3_L-to-H_P Parameter: Organism Value: Zea mays
  misc_feature: MA Experiment 20001614 PARAMETER Experiment Name: Zm_50ppm_KNO3_L-to-H_P Parameter: Plant Line Value: 35A19
  misc_feature: MA Experiment 20001614 PARAMETER Experiment Name: Zm_50ppm_KNO3_L-to-H_P Parameter: Timepoint (hr) Value: 48
  misc_feature: MA Experiment 20001614 PARAMETER Experiment Name: Zm_50ppm_KNO3_L-to-H_P Parameter: Tissue Value: Roots
  misc_feature: MA Experiment 20001614 PARAMETER Experiment Name: Zm_50ppm_KNO3_L-to-H_P Parameter: Treatment Value: 50ppm KNO3 vs. 50ppm KCl
aagggggaggggagctttccacttcacggctgatgagtgatgaccctaccagaaatcgacccgatacggctcctgcgccagatcgtccatcaatagcccgaatcacactcatcacaagcctcaaacttttccaaaccaatttagatgcggcgtgagtgctaaagcgctctctggactctgtttcgcagtggccgcagctgcagcgtcctcttccctttttgccatccagcatcacctgtgccgccggcgcgtaattgcaccgcggtcactggttaataggaagaagggaaggaggaggggggagcggtgtgccggggtatcgtcgtgcccatgggcgtgcacgccaggtcgatgagctggtatatggggtcgccggcgccggggagcgccgccgagggcgaggggcagcgcgcgctgagaagcagctccggtggcagcgacggcagcttcgacaccaacatggtcatcatcctcgccgcgctgctgttcgcgctcctcttcgcgatgggcctcaactcgctcgcgcgctgcctcatccgctgggcacgccgcgcgccggccggggaggacggcggcgccggcgggctaaagaagcgcgcgctccggagcatccccgtcgaggtgtacggcgcgtgcggcgccgacggggcggcggctgtcgccgccgacgtctgcgccatctgcctcggcgagttcgcggacggcgagaaggtgcgcgtgctgccgcgctgcgcccacggcttccacgtccgctgcgtcgacacctggctcctgtcgcacgactcctgccccacgtgccggggctccgtgctcgacggcgcaaaggccgccgcctctgctcccgccgccgggggcaaccggcggcagggaagcgaggctgctgccatcgcaattgtcattggatgacgtggacgtgtgggggcccgcgtgcccactggtggtggagccacacggtatgcgagactagcttcgttccgtggtagtgagatattttgctgtgatgagaagccgacgagtcgcggcggcccatctctcagtcaagacacagcatggccttcaggatattatcccttcggtctgtacttgtgcatggtcgtcgcagctgatcctgtttgtgtatactaggagtggatgatgaggtatgccgctataggcttgcaataatacagttttgtttgtacatgttcgatttgacacaattttagagcactgagcagagc

SEQ ID NO: 5216 - protein, 191 aa, Zea mays subsp. mays
  peptide (1)..(191): Ceres Seq. ID no. 12376641
  misc_feature (115)..(156): Pfam Name: Zinc finger, C3HC4 type (RING finger) Pfam Description: Zinc finger, C3HC4 type (RING finger)
  misc_feature (1)..(190): Homolog of NCBI NO: 34907826 NR Description: P0485B12.26 [Oryza sativa (japonica
  misc_feature (22)..(162): Homolog of NCBI NO: 15241087 NR Description: putative protein; protein id: At5g01880.1
  misc_feature (17)..(184): Homolog of NCBI NO: 15239062 NR Description: RING zinc finger protein-like; protein id:
  misc_feature (34)..(161): Homolog of NCBI NO: 15228395 NR Description: putative RING zinc finger protein; protein id: [Arabidopsis thaliana] >gi|6630539|gb|AAF19558.1|AC011708_1 RING zinc finger protein [Arabidopsis thaliana]
  misc_feature (34)..(183): Homolog of NCBI NO: 32488364 NR Description: OSJNBb0108J11.16 [Oryza sativa (japonica
  misc_feature (41)..(157): Homolog of NCBI NO: 15227839 NR Description: putative RING zinc finger protein; protein id: supported by cDNA: gi_13877952, supported by cDNA: gi_17065625,
  misc_feature (31)..(168): Homolog of NCBI NO: 9293902 NR Description: contains similarity to RING zinc finger
  misc_feature (41)..(161): Homolog of NCBI NO: 7489432 NR Description: probable ring finger protein - barley
  misc_feature (37)..(168): Homolog of NCBI NO: 15222073 NR Description: RING-H2 finger protein RHA3a, putative; protein
  misc_feature (38)..(168): Homolog of NCBI NO: 17016985 NR Description: RING-H2 zinc finger protein [Cucumis melo]
MGVHARSMSWYMGSPAPGSAAEGEGQRALRSSSGGSDGSFDTNMVIILAALLFALLFAMGLNSLARCLIRWARRAPAGEDGGAGGLKKRALRSIPVEVYGACGADGAAAVAADVCAICLGEFADGEKVRVLPRCAHGFHVRCVDTWLLSHDSCPTCRGSVLDGAKAAASAPAAGGNRRQGSEAAAIAIVIG

SEQ ID NO: 5217 - protein, 184 aa, Zea mays subsp. mays
  peptide (1)..(184): Ceres Seq. ID no. 12376642
  misc_feature (108)..(149): Pfam Name: Zinc finger, C3HC4 type (RING finger) Pfam Description: Zinc finger, C3HC4 type (RING finger)
  misc_feature (1)..(183): Homolog of NCBI NO: 34907826 NR Description: P0485B12.26 [Oryza sativa (japonica
  misc_feature (15)..(155): Homolog of NCBI NO: 15241087 NR Description: putative protein; protein id: At5g01880.1
  misc_feature (10)..(177): Homolog of NCBI NO: 15239062 NR Description: RING zinc finger protein-like; protein id:
  misc_feature (27)..(154): Homolog of NCBI NO: 15228395 NR Description: putative RING zinc finger protein; protein id: [Arabidopsis thaliana] >gi|6630539|gb|AAF19558.1|AC011708_1 RING zinc finger protein [Arabidopsis thaliana]
  misc_feature (27)..(176): Homolog of NCBI NO: 32488364 NR Description: OSJNBb0108J11.16 [Oryza sativa (japonica
  misc_feature (34)..(150): Homolog of NCBI NO: 15227839 NR Description: putative RING zinc finger protein; protein id: supported by cDNA: gi_13877952, supported by cDNA: gi_17065625,
  misc_feature (24)..(161): Homolog of NCBI NO: 9293902 NR Description: contains similarity to RING zinc finger
  misc_feature (34)..(154): Homolog of NCBI NO: 7489432 NR Description: probable ring finger protein - barley
  misc_feature (30)..(161): Homolog of NCBI NO: 15222073 NR Description: RING-H2 finger protein RHA3a, putative; protein
  misc_feature (31)..(161): Homolog of NCBI NO: 17016985 NR Description: RING-H2 zinc finger protein [Cucumis melo]
MSWYMGSPAPGSAAEGEGQRALRSSSGGSDGSFDTNMVIILAALLFALLFAMGLNSLARCLIRWARRAPAGEDGGAGGLKKRALRSIPVEVYGACGADGAAAVAADVCAICLGEFADGEKVRVLPRCAHGFHVRCVDTWLLSHDSCPTCRGSVLDGAKAAASAPAAGGNRRQGSEAAAIAIVIG

SEQ ID NO: 5218 - protein, 180 aa, Zea mays subsp. mays
  peptide (1)..(180): Ceres Seq. ID no. 12376643
  misc_feature (104)..(145): Pfam Name: Zinc finger, C3HC4 type (RING finger) Pfam Description: Zinc finger, C3HC4 type (RING finger)
  misc_feature (1)..(179): Homolog of NCBI NO: 34907826 NR Description: P0485B12.26 [Oryza sativa (japonica
  misc_feature (11)..(151): Homolog of NCBI NO: 15241087 NR Description: putative protein; protein id: At5g01880.1
  misc_feature (6)..(173): Homolog of NCBI NO: 15239062 NR Description: RING zinc finger protein-like; protein id:
  misc_feature (23)..(150): Homolog of NCBI NO: 15228395 NR Description: putative RING zinc finger protein; protein id: [Arabidopsis thaliana] >gi|6630539|gb|AAF19558.1|AC011708_1 RING zinc finger protein [Arabidopsis thaliana]
  misc_feature (23)..(172): Homolog of NCBI NO: 32488364 NR Description: OSJNBb0108J11.16 [Oryza sativa (japonica
  misc_feature (30)..(146): Homolog of NCBI NO: 15227839 NR Description: putative RING zinc finger protein; protein id: supported by cDNA: gi_13877952, supported by cDNA: gi_17065625,
  misc_feature (20)..(157): Homolog of NCBI NO: 9293902 NR Description: contains similarity to RING zinc finger
  misc_feature (30)..(150): Homolog of NCBI NO: 7489432 NR Description: probable ring finger protein - barley
  misc_feature (26)..(157): Homolog of NCBI NO: 15222073 NR Description: RING-H2 finger protein RHA3a, putative; protein
  misc_feature (27)..(157): Homolog of NCBI NO: 17016985 NR Description: RING-H2 zinc finger protein [Cucumis melo]
MGSPAPGSAAEGEGQRALRSSSGGSDGSFDTNMVIILAALLFALLFAMGLNSLARCLIRWARRAPAGEDGGAGGLKKRALRSIPVEVYGACGADGAAAVAADVCAICLGEFADGEKVRVLPRCAHGFHVRCVDTWLLSHDSCPTCRGSVLDGAKAAASAPAAGGNRRQGSEAAAIAIVIG

SEQ ID NO: 5219 - DNA, 1402 bp, Zea mays subsp. mays
  misc_feature (1)..(1402): Ceres Seq. ID no. 12409656
  misc_feature: MA Experiment ID: 108527 Result: Down-regulated in Transcription
  misc_feature: MA Experiment 108527 PARAMETER Experiment Name: Zm_5mM_NO_P Parameter: Age (day) Value: 8
  misc_feature: MA Experiment 108527 PARAMETER Experiment Name: Zm_5mM_NO_P Parameter: Organism Value: Zea mays
  misc_feature: MA Experiment 108527 PARAMETER Experiment Name: Zm_5mM_NO_P Parameter: Plant Line Value: 35A19
  misc_feature: MA Experiment 108527 PARAMETER Experiment Name: Zm_5mM_NO_P Parameter: Timepoint (hr) Value: 6
  misc_feature: MA Experiment 108527 PARAMETER Experiment Name: Zm_5mM_NO_P Parameter: Tissue Value: Aerial
  misc_feature: MA Experiment 108527 PARAMETER Experiment Name: Zm_5mM_NO_P Parameter: Treatment Value: 5mM NO vs. No Treatment
  misc_feature: MA Experiment ID: 108535 Result: Down-regulated in Transcription
  misc_feature: MA Experiment 108535 PARAMETER Experiment Name: Zm_Meristem_P Parameter: Age (day) Value: 8
  misc_feature: MA Experiment 108535 PARAMETER Experiment Name: Zm_Meristem_P Parameter: Organism Value: Zea mays
  misc_feature: MA Experiment 108535 PARAMETER Experiment Name: Zm_Meristem_P Parameter: Plant Line Value: 35A19
  misc_feature: MA Experiment 108535 PARAMETER Experiment Name: Zm_Meristem_P Parameter: Tissue Value: Root Meristem vs. Above Root Meristem
  misc_feature: MA Experiment ID: 108543 Result: Up-regulated in Transcription
  misc_feature: MA Experiment ID: 108544 Result: Up-regulated in Transcription
  misc_feature: MA Experiment ID: 20000477 Result: Down-regulated in Transcription
  misc_feature: MA Experiment 20000477 PARAMETER Experiment Name: Zm_5mM_SA_P Parameter: Age (day) Value: 10
  misc_feature: MA Experiment 20000477 PARAMETER Experiment Name: Zm_5mM_SA_P Parameter: Organism Value: Zea mays
  misc_feature: MA Experiment 20000477 PARAMETER Experiment Name: Zm_5mM_SA_P Parameter: Plant Line Value: 35A19
  misc_feature: MA Experiment 20000477 PARAMETER Experiment Name: Zm_5mM_SA_P Parameter: Timepoint (hr) Value: 48
  misc_feature: MA Experiment 20000477 PARAMETER Experiment Name: Zm_5mM_SA_P Parameter: Tissue Value: Aerial
  misc_feature: MA Experiment 20000477 PARAMETER Experiment Name: Zm_5mM_SA_P Parameter: Treatment Value: 5mM SA vs. No Treatment
  misc_feature: MA Experiment ID: 20000478 Result: Down-regulated in Transcription
  misc_feature: MA Experiment 20000478 PARAMETER Experiment Name: Zm_5mM_SA_P Parameter: Age (day) Value: 11
  misc_feature: MA Experiment 20000478 PARAMETER Experiment Name: Zm_5mM_SA_P Parameter: Organism Value: Zea mays
  misc_feature: MA Experiment 20000478 PARAMETER Experiment Name: Zm_5mM_SA_P Parameter: Plant Line Value: 35A19
  misc_feature: MA Experiment 20000478 PARAMETER Experiment Name: Zm_5mM_SA_P Parameter: Timepoint (hr) Value: 72
  misc_feature: MA Experiment 20000478 PARAMETER Experiment Name: Zm_5mM_SA_P Parameter: Tissue Value: Aerial
  misc_feature: MA Experiment 20000478 PARAMETER Experiment Name: Zm_5mM_SA_P Parameter: Treatment Value: 5mM SA vs. No Treatment
  misc_feature: MA Experiment ID: 20000479 Result: Down-regulated in Transcription
  misc_feature: MA Experiment 20000479 PARAMETER Experiment Name: Zm_Drought_P Parameter: Age (day) Value: 10
  misc_feature: MA Experiment 20000479 PARAMETER Experiment Name: Zm_Drought_P Parameter: Organism Value: Zea mays
  misc_feature: MA Experiment 20000479 PARAMETER Experiment Name: Zm_Drought_P Parameter: Plant Line Value: 35A19
  misc_feature: MA Experiment 20000479 PARAMETER Experiment Name: Zm_Drought_P Parameter: Timepoint (hr) Value: 48
  misc_feature: MA Experiment 20000479 PARAMETER Experiment Name: Zm_Drought_P Parameter: Tissue Value: Aerial
  misc_feature: MA Experiment 20000479 PARAMETER Experiment Name: Zm_Drought_P Parameter: Treatment Value: Drought vs. No Drought
  misc_feature: MA Experiment ID: 20000480 Result: Down-regulated in Transcription
  misc_feature: MA Experiment 20000480 PARAMETER Experiment Name: Zm_Drought_P Parameter: Age (day) Value: 11
  misc_feature: MA Experiment 20000480 PARAMETER Experiment Name: Zm_Drought_P Parameter: Organism Value: Zea mays
  misc_feature: MA Experiment 20000480 PARAMETER Experiment Name: Zm_Drought_P Parameter: Plant Line Value: 35A19
  misc_feature: MA Experiment 20000480 PARAMETER Experiment Name: Zm_Drought_P Parameter: Timepoint (hr) Value: 72
  misc_feature: MA Experiment 20000480 PARAMETER Experiment Name: Zm_Drought_P Parameter: Tissue Value: Aerial
  misc_feature: MA Experiment 20000480 PARAMETER Experiment Name: Zm_Drought_P Parameter: Treatment Value: Drought vs. No Drought
  misc_feature: MA Experiment ID: 20000492 Result: Down-regulated in Transcription
  misc_feature: MA Experiment 20000492 PARAMETER Experiment Name: Zm_Hybrid_Seed_Dev_P Parameter: DAP Value: 12
  misc_feature: MA Experiment 20000492 PARAMETER Experiment Name: Zm_Hybrid_Seed_Dev_P Parameter: Organism Value: Zea mays
  misc_feature: MA Experiment 20000492 PARAMETER Experiment Name: Zm_Hybrid_Seed_Dev_P Parameter: Plant Line Value: 35A19
  misc_feature: MA Experiment 20000492 PARAMETER Experiment Name: Zm_Hybrid_Seed_Dev_P Parameter: Tissue Value: Fert Kernel vs. Unfert Floret
  misc_feature: MA Experiment ID: 20000535 Result: Down-regulated in Transcription
  misc_feature: MA Experiment 20000535 PARAMETER Experiment Name: Zm_Hybrid_Seed_Dev_P Parameter: DAP Value: 30 vs. 12
  misc_feature: MA Experiment 20000535 PARAMETER Experiment Name: Zm_Hybrid_Seed_Dev_P Parameter: Organism Value: Zea mays
  misc_feature: MA Experiment 20000535 PARAMETER Experiment Name: Zm_Hybrid_Seed_Dev_P Parameter: Plant Line Value: 35A19
  misc_feature: MA Experiment 20000535 PARAMETER Experiment Name: Zm_Hybrid_Seed_Dev_P Parameter: Tissue Value: Embryo vs. Unfert Floret
agaagacagaggccagtcacaaggcgatagcagcaggtggtggcaagatgacggtgctccactctccggttggagttaggagcatcgtgacctccttggtggctttcttcatcctagccagctccatcgtgttcctcctcgacagaggccaggaagagcaagtgcaagtggcagtcgagcatggacgccaagaagtgcaggtgaagctggaatccgggctgcaagaaccggcgataagagggacaacccaagagggggacgccagcaacgaggagtgcaactggtccaggggaaggtgggtgtacgacaacgtgtcccgcccattgtacagcgggctcaagtgctccttcatcttccccgaggtggcctgtgacaagtatggcaggaaggatgccatgtaccagcactggagatggcagcctcatggtcatggatgcgacctcccaagatttgatgccatcaagctgcttgaaaatctgagaaacaagagaatggtgtttgtgggcgactcagtcaacaggaaccaatgggtctctctcgtgtgcatggtggaggcctcaatacctgacgacaggctcaagatacgcaccttcaatggctcactcatctccttcaaggcattggaatacaacgcaacgatagatttctactggtcaccactactggtggaatctaacagcgacaaccccattatccaccgggtggagtaccggatcataagggcagacagaattgagaagcatgccagtgtctggagggatgccgacatcattgtcttcaattcttacctgtggtggaggaagcagaaggatgacatgaggatgaaggtcatgtatggttcattcgaagatggtgatgcaaagttagacgagatggaaatggtcgatggtttcgagatagctctcaagaaactaaccgaatggctgggggagaatattgacaagaacaagactaggatatttttcgcaggatcgtcaccaacacattcctgggctagcaactggggtggagaagacaagaacaagtgccttaacgaaacagagccgatctacaaaaccggatacaaagctgcaactacagactacagcttgatggccaaagctaagcactactttcgaacattggagccgaaaggcatacatgttcagatactgaacatcaccgagctgtctgactaccgcaaggacgggcatcctacggtgtacaggaaacagtttgctcctctgacgaaagagcaaatcgcagacccagccagttacgcggattgcacgcactggtgcctccccggagttccagatgtctggaacgagtttttatatggctacctcgtgcaaaaatgatgtacaaaactgtcagtcaggttcgttttgccccttatatataatgtacaaatggcatactc

SEQ ID NO: 5220 - protein, 445 aa, Zea mays subsp. mays
  peptide (1)..(445): Ceres Seq. ID no. 12409657
  misc_feature (74)..(443): Homolog of NCBI NO: 7487161 NR Description: hypothetical protein At2g38320 [imported] -
  misc_feature (74)..(443): Homolog of NCBI NO: 18404712 NR Description: expressed protein; protein id: At2g38320.1, by cDNA: gi_13878094 [Arabidopsis thaliana] unknown protein [Arabidopsis thaliana]
  misc_feature (85)..(442): Homolog of NCBI NO: 18413698 NR Description: putative protein; protein id: At5g01620.1, by cDNA: 108209., supported by cDNA: gi_19347853 [Arabidopsis >gi|19347854|gb|AAL86006.1| unknown protein [Arabidopsis
  misc_feature (85)..(442): Homolog of NCBI NO: 21536676 NR Description: unknown [Arabidopsis thaliana]
  misc_feature (85)..(442): Homolog of NCBI NO: 11291876 NR Description: hypothetical protein F7A7.140 - Arabidopsis >gi|7327821|emb|CAB82278.1| putative protein [Arabidopsis
  misc_feature (85)..(442): Homolog of NCBI NO: 28876013 NR Description: unknown protein [Oryza sativa (japonica
  misc_feature (88)..(442): Homolog of NCBI NO: 28393743 NR Description: unknown protein [Arabidopsis thaliana]
  misc_feature (90)..(442): Homolog of NCBI NO: 15228429 NR Description: unknown protein; protein id: At3g11030.1 thaliana] >gi|6016691|gb|AAF01518.1|AC009991_14 unknown protein thaliana] >gi|27754560|gb|AAO22727.1| unknown protein
  misc_feature (73)..(443): Homolog of NCBI NO: 28876029 NR Description: hypothetical protein [Oryza sativa (japonica
  misc_feature (88)..(442): Homolog of NCBI NO: 15226647 NR Description: hypothetical protein; protein id: At2g40320.1
KTEASHKAIAAGGGKMTVLHSPVGVRSIVTSLVAFFILASSIVFLLDRGQEEQVQVAVEHGRQEVQVKLESGLQEPAIRGTTQEGDASNEECNWSRGRWVYDNVSRPLYSGLKCSFIFPEVACDKYGRKDAMYQHWRWQPHGHGCDLPRFDAIKLLENLRNKRMVFVGDSVNRNQWVSLVCMVEASIPDDRLKIRTFNGSLISFKALEYNATIDFYWSPLLVESNSDNPIIHRVEYRIIRADRIEKHASVWRDADIIVFNSYLWWRKQKDDMRMKVMYGSFEDGDAKLDEMEMVDGFEIALKKLTEWLGENIDKNKTRIFFAGSSPTHSWASNWGGEDKNKCLNETEPIYKTGYKAATTDYSLMAKAKHYFRTLEPKGIHVQILNITELSDYRKDGHPTVYRKQFAPLTKEQIADPASYADCTHWCLPGVPDVWNEFLYGYLVQK

SEQ ID NO: 5221 - protein, 430 aa, Zea mays subsp. mays
  peptide (1)..(430): Ceres Seq. ID no. 12409658
  misc_feature (58)..(428): Homolog of NCBI NO: 28876029 NR Description: hypothetical protein [Oryza sativa (japonica
  misc_feature (73)..(427): Homolog of NCBI NO: 15226647 NR Description: hypothetical protein; protein id: At2g40320.1
  misc_feature (59)..(428): Homolog of NCBI NO: 7487161 NR Description: hypothetical protein At2g38320 [imported] -
  misc_feature (59)..(428): Homolog of NCBI NO: 18404712 NR Description: expressed protein; protein id: At2g38320.1, by cDNA: gi_13878094 [Arabidopsis thaliana] unknown protein [Arabidopsis thaliana]
  misc_feature (70)..(427): Homolog of NCBI NO: 18413698 NR Description: putative protein; protein id: At5g01620.1, by cDNA: 108209., supported by cDNA: gi_19347853 [Arabidopsis >gi|19347854|gb|AAL86006.1| unknown protein [Arabidopsis
  misc_feature (70)..(427): Homolog of NCBI NO: 21536676 NR Description: unknown [Arabidopsis thaliana]
  misc_feature (70)..(427): Homolog of NCBI NO: 11291876 NR Description: hypothetical protein F7A7.140 - Arabidopsis >gi|7327821|emb|CAB82278.1| putative protein [Arabidopsis
  misc_feature (70)..(427): Homolog of NCBI NO: 28876013 NR Description: unknown protein [Oryza sativa (japonica
  misc_feature (73)..(427): Homolog of NCBI NO: 28393743 NR Description: unknown protein [Arabidopsis thaliana]
  misc_feature (75)..(427): Homolog of NCBI NO: 15228429 NR Description: unknown protein; protein id: At3g11030.1 thaliana] >gi|6016691|gb|AAF01518.1|AC009991_14 unknown protein thaliana] >gi|27754560|gb|AAO22727.1| unknown protein
MTVLHSPVGVRSIVTSLVAFFILASSIVFLLDRGQEEQVQVAVEHGRQEVQVKLESGLQEPAIRGTTQEGDASNEECNWSRGRWVYDNVSRPLYSGLKCSFIFPEVACDKYGRKDAMYQHWRWQPHGHGCDLPRFDAIKLLENLRNKRMVFVGDSVNRNQWVSLVCMVEASIPDDRLKIRTFNGSLISFKALEYNATIDFYWSPLLVESNSDNPIIHRVEYRIIRADRIEKHASVWRDADIIVFNSYLWWRKQKDDMRMKVMYGSFEDGDAKLDEMEMVDGFEIALKKLTEWLGENIDKNKTRIFFAGSSPTHSWASNWGGEDKNKCLNETEPIYKTGYKAATTDYSLMAKAKHYFRTLEPKGIHVQILNITELSDYRKDGHPTVYRKQFAPLTKEQIADPASYADCTHWCLPGVPDVWNEFLYGYLVQK

SEQ ID NO: 5222 - protein, 314 aa, Zea mays subsp. mays
  peptide (1)..(314): Ceres Seq. ID no. 12409659
  misc_feature (1)..(312): Homolog of NCBI NO: 7487161 NR Description: hypothetical protein At2g38320 [imported] -
  misc_feature (1)..(312): Homolog of NCBI NO: 18404712 NR Description: expressed protein; protein id: At2g38320.1, by cDNA: gi_13878094 [Arabidopsis thaliana] unknown protein [Arabidopsis thaliana]
  misc_feature (1)..(311): Homolog of NCBI NO: 18413698 NR Description: putative protein; protein id: At5g01620.1, by cDNA: 108209., supported by cDNA: gi_19347853 [Arabidopsis >gi|19347854|gb|AAL86006.1| unknown protein [Arabidopsis
  misc_feature (1)..(311): Homolog of NCBI NO: 21536676 NR Description: unknown [Arabidopsis thaliana]
  misc_feature (1)..(311): Homolog of NCBI NO: 11291876 NR Description: hypothetical protein F7A7.140 - Arabidopsis >gi|7327821|emb|CAB82278.1| putative protein [Arabidopsis
  misc_feature (1)..(311): Homolog of NCBI NO: 28876013 NR Description: unknown protein [Oryza sativa (japonica
  misc_feature (1)..(311): Homolog of NCBI NO: 28393743 NR Description: unknown protein [Arabidopsis thaliana]
  misc_feature (1)..(311): Homolog of NCBI NO: 15228429 NR Description: unknown protein; protein id: At3g11030.1 thaliana] >gi|6016691|gb|AAF01518.1|AC009991_14 unknown protein thaliana] >gi|27754560|gb|AAO22727.1| unknown protein
  misc_feature (1)..(312): Homolog of NCBI NO: 28876029 NR Description: hypothetical protein [Oryza sativa (japonica
  misc_feature (1)..(311): Homolog of NCBI NO: 15226647 NR Description: hypothetical protein; protein id: At2g40320.1
MYQHWRWQPHGHGCDLPRFDAIKLLENLRNKRMVFVGDSVNRNQWVSLVCMVEASIPDDRLKIRTFNGSLISFKALEYNATIDFYWSPLLVESNSDNPIIHRVEYRIIRADRIEKHASVWRDADIIVFNSYLWWRKQKDDMRMKVMYGSFEDGDAKLDEMEMVDGFEIALKKLTEWLGENIDKNKTRIFFAGSSPTHSWASNWGGEDKNKCLNETEPIYKTGYKAATTDYSLMAKAKHYFRTLEPKGIHVQILNITELSDYRKDGHPTVYRKQFAPLTKEQIADPASYADCTHWCLPGVPDVWNEFLYGYLVQK

SEQ ID NO: 5223 - DNA, 891 bp, Zea mays subsp. mays
  misc_feature (1)..(891): Ceres Seq. ID no. 13498431
  misc_feature: MA Experiment ID: 108530 Result: Down-regulated in Transcription
  misc_feature: MA Experiment 108530 PARAMETER Experiment Name: Zm_Imbibed_Seeds_P Parameter: Age (day) Value: 6 vs. 2
  misc_feature: MA Experiment 108530 PARAMETER Experiment Name: Zm_Imbibed_Seeds_P Parameter: Organism Value: Zea mays
  misc_feature: MA Experiment 108530 PARAMETER Experiment Name: Zm_Imbibed_Seeds_P Parameter: Plant Line Value: 35A19
  misc_feature: MA Experiment 108530 PARAMETER Experiment Name: Zm_Imbibed_Seeds_P Parameter: Tissue Value: Aerial vs. Embryo
  misc_feature: MA Experiment ID: 108535 Result: Up-regulated in Transcription
  misc_feature: MA Experiment 108535 PARAMETER Experiment Name: Zm_Meristem_P Parameter: Age (day) Value: 8
  misc_feature: MA Experiment 108535 PARAMETER Experiment Name: Zm_Meristem_P Parameter: Organism Value: Zea mays
  misc_feature: MA Experiment 108535 PARAMETER Experiment Name: Zm_Meristem_P Parameter: Plant Line Value: 35A19
  misc_feature: MA Experiment 108535 PARAMETER Experiment Name: Zm_Meristem_P Parameter: Tissue Value: Root Meristem vs. Above Root Meristem
  misc_feature: MA Experiment ID: 108544 Result: Down-regulated in Transcription
  misc_feature: MA Experiment ID: 20000488 Result: Up-regulated in Transcription
  misc_feature: MA Experiment 20000488 PARAMETER Experiment Name: Zm_50mM_NH4NO3_L_to_H_P Parameter: Organism Value: Zea mays
  misc_feature: MA Experiment 20000488 PARAMETER Experiment Name: Zm_50mM_NH4NO3_L_to_H_P Parameter: Timepoint (hr) Value: 8
  misc_feature: MA Experiment 20000488 PARAMETER Experiment Name: Zm_50mM_NH4NO3_L_to_H_P Parameter: Tissue Value: Leaves
  misc_feature: MA Experiment 20000488 PARAMETER Experiment Name: Zm_50mM_NH4NO3_L_to_H_P Parameter: Treatment Value: 50mM NH4NO3 vs. 100mM Mannitol
  misc_feature: MA Experiment ID: 20001612 Result: Up-regulated in Transcription
  misc_feature: MA Experiment 20001612 PARAMETER Experiment Name: Zm_50ppm_KNO3_L-to-H_P Parameter: Age (day) Value: 19
  misc_feature: MA Experiment 20001612 PARAMETER Experiment Name: Zm_50ppm_KNO3_L-to-H_P Parameter: Organism Value: Zea mays
  misc_feature: MA Experiment 20001612 PARAMETER Experiment Name: Zm_50ppm_KNO3_L-to-H_P Parameter: Plant Line Value: 35A19
  misc_feature: MA Experiment 20001612 PARAMETER Experiment Name: Zm_50ppm_KNO3_L-to-H_P Parameter: Timepoint (hr) Value: 8
  misc_feature: MA Experiment 20001612 PARAMETER Experiment Name: Zm_50ppm_KNO3_L-to-H_P Parameter: Tissue Value: Roots
  misc_feature: MA Experiment 20001612 PARAMETER Experiment Name: Zm_50ppm_KNO3_L-to-H_P Parameter: Treatment Value: 50ppm KNO3 vs. 50ppm KCl
aagcctcctccaaattaaaccgccggcgcctccgcttcgcgttctcgcctcatctcctcacgctcaggatccggcggcgaaggtaaggcaagatgtacacagcgaggaagaagatccagaaggataagggccttgagccctccgagttcgaggactccgtcgcccaggctttcttcgacctggagaacggtaaccaggagctcaagagcgacctcaaggacctttacatcaacggtgctatccagctggatgttgccgggagcaggaaggctgttgtgatccacgtcccataccgcttgcgcaaggccttcaggaagatccatgtcaggatcgtcagggagctggagaagaaattcagcggcaaggatgtggtaattgttgccacaaggaggatcgtgaggccgcccaagaagggttcagctgttcagcgccctcgcaccaggactctgactgctgtccatgatggcatcctggaggatgttgtcttcccagctgagattgtggggaagcgtgtcaggtaccgtctggatggtgccaagatcatcaagatcttcttggacccaaaggagaggaacaacaccgaatacaagctggacacctacactacggtctaccgcaggctgtgtgggaaagatgtggtctttgagtaccctatggccgaaaatgcataaatatgacgcccggatatccccattttattttgttgaatctggatgtttctttggggtctcaactagactgctccgtatgtacttcaaaaaccatagttttgatgccaaagttgttgcctaggaatttggtactcgggaattggtagcggacgtgaacaatgttaagttttgagcatttaaatttacctttgtcatgataacatgttgcgagtttttattt

SEQ ID NO: 5224 - protein, 192 aa, Zea mays subsp. mays
  peptide (1)..(192): Ceres Seq. ID no. 13498432
  misc_feature (4)..(190): Pfam Name: Ribosomal protein S7e Pfam Description: Ribosomal protein S7e
  misc_feature (1)..(192): Homolog of NCBI NO: 4588906 NR Description: ribosomal protein S7 [Secale cereale]
  misc_feature (1)..(192): Homolog of NCBI NO: 22671664 NR Description: ribosomal protein S7 [Oryza sativa (japonica
  misc_feature (1)..(192): Homolog of NCBI NO: 14787424 NR Description: Ribosomal protein S7 [Hordeum vulgare subsp.
  misc_feature (1)..(190): Homolog of NCBI NO: 20139964 NR Description: 40S ribosomal protein S7 unknown [Avicennia marina] >gi|4128206|gb|AAD03501.1| 40S
  misc_feature (1)..(190): Homolog of NCBI NO: 20139962 NR Description: 40S ribosomal protein S7
  misc_feature (1)..(190): Homolog of NCBI NO: 15221972 NR Description: 40S ribosomal protein S7 (RPS7A) [Arabidopsis >gi|30694420|ref|NP_849786.1| 40S ribosomal protein S7 (RPS7A) thaliana] >gi|25294579|pir||A96526 probable 40S ribosomal protein
  misc_feature (1)..(190): Homolog of NCBI NO: 15232926 NR Description: 40S ribosomal protein S7 (RPS7B) [Arabidopsis >gi|30678607|ref|NP_850504.1| 40S ribosomal protein S7 (RPS7B) thaliana] >gi|6957719|gb|AAF32463.1| putative 40S ribosomal
  misc_feature (1)..(188): Homolog of NCBI NO: 15237278 NR Description: 40S ribosomal protein S7 (RPS7C) [Arabidopsis
  misc_feature (1)..(188): Homolog of NCBI NO: 21592413 NR Description: 40S ribosomal protein S7-like [Arabidopsis
  misc_feature (1)..(187): Homolog of NCBI NO: 22758886 NR Description: ribosomal protein S7 [Argopecten irradians]
MYTARKKIQKDKGLEPSEFEDSVAQAFFDLENGNQELKSDLKDLYINGAIQLDVAGSRKAVVIHVPYRLRKAFRKIHVRIVRELEKKFSGKDVVIVATRRIVRPPKKGSAVQRPRTRTLTAVHDGILEDVVFPAEIVGKRVRYRLDGAKIIKIFLDPKERNNTEYKLDTYTTVYRRLCGKDVVFEYPMAENA

SEQ ID NO: 5225 - protein, 110 aa, Zea mays subsp. mays
  peptide (1)..(110): Ceres Seq. ID no. 13498433
MMASWRMLSSQLRLWGSVSGTVWMVPRSSRSSWTQRRGTTPNTSWTPTLRSTAGCVGKMWSLSTLWPKMHKYDARISPFYFVESGCFFGVSTRLLRMYFKNHSFDAKVVA

SEQ ID NO: 5226 - protein, 109 aa, Zea mays subsp. mays
  peptide (1)..(109): Ceres Seq. ID no. 13498434
MASWRMLSSQLRLWGSVSGTVWMVPRSSRSSWTQRRGTTPNTSWTPTLRSTAGCVGKMWSLSTLWPKMHKYDARISPFYFVESGCFFGVSTRLLRMYFKNHSFDAKVVA

SEQ ID NO: 5227 - DNA, 1442 bp, Zea mays subsp. mays
  misc_feature (1)..(1442): Ceres Seq. ID no. 12434863
  misc_feature: MA Experiment ID: 20000478 Result: Down-regulated in Transcription
  misc_feature: MA Experiment 20000478 PARAMETER Experiment Name: Zm_5mM_SA_P Parameter: Age (day) Value: 11
  misc_feature: MA Experiment 20000478 PARAMETER Experiment Name: Zm_5mM_SA_P Parameter: Organism Value: Zea mays
  misc_feature: MA Experiment 20000478 PARAMETER Experiment Name: Zm_5mM_SA_P Parameter: Plant Line Value: 35A19
  misc_feature: MA Experiment 20000478 PARAMETER Experiment Name: Zm_5mM_SA_P Parameter: Timepoint (hr) Value: 72
  misc_feature: MA Experiment 20000478 PARAMETER Experiment Name: Zm_5mM_SA_P Parameter: Tissue Value: Aerial
  misc_feature: MA Experiment 20000478 PARAMETER Experiment Name: Zm_5mM_SA_P Parameter: Treatment Value: 5mM SA vs. No Treatment
  misc_feature: MA Experiment ID: 20000479 Result: Down-regulated in Transcription
  misc_feature: MA Experiment 20000479 PARAMETER Experiment Name: Zm_Drought_P Parameter: Age (day) Value: 10
  misc_feature: MA Experiment 20000479 PARAMETER Experiment Name: Zm_Drought_P Parameter: Organism Value: Zea mays
  misc_feature: MA Experiment 20000479 PARAMETER Experiment Name: Zm_Drought_P Parameter: Plant Line Value: 35A19
  misc_feature: MA Experiment 20000479 PARAMETER Experiment Name: Zm_Drought_P Parameter: Timepoint (hr) Value: 48
  misc_feature: MA Experiment 20000479 PARAMETER Experiment Name: Zm_Drought_P Parameter: Tissue Value: Aerial
  misc_feature: MA Experiment 20000479 PARAMETER Experiment Name: Zm_Drought_P Parameter: Treatment Value: Drought vs. No Drought
acctttggcttttctggctttatataatcattcgttcaccctttatccatcaccacctaatttcccaacaaatttcaatctccatcgatcgattcctcccgaacccgacccgatggcctccgacgccgccgccgagccctcctccggcgtcacccaccccccgcgctacgtcatcggttacgcgctcgcgccgaagaagcagcagagcttcatccagccgtcgctggtggcccaggcggcgtcgcggggcatggacctcgtccccgtggatgcgtcgcagcccctcgcagagcaagggcccttccacctcctcatccacaagctctacggagacgactggcgcgcccagctcgtggccttcgccgcgcgccacccggccgtccccatcgtcgacccgccccacgccatcgaccgcctccacaaccgcatctccatgctccaggtcgtctccgagctcgaccacgccgccgaccaggacagcactttcggtatccccagccaggtcgtcgtctacgacgccgccgcgctcgccgacttcggactccttgccgcgctccgcttcccgctcatcgccaagcccctcgtcgccgacggcaccgccaagtcccacaagatgtcgctcgtctaccaccgcgagggcctcggcaagctccgcccgccgcttgtgctccaggagttcgtcaaccatggcggcgtcatcttcaaggtctacgtcgtcggcggccacgtcacttgcgtcaagcgccgtagccttcccgacgtgtcccccgaggatgacgcatcggcccagggatccgtctccttctcccaggtctccaacctccccactgagcgcacggcggaggagtactacggcgaaaagagtctcgaggacgccgtcgtgccgcccgccgcattcatcaaccagatcgcgggcggcctccgccgcgcgctgggcctgcaactcttcaacttcgacatgatccgcgacgtccgcgccggcgaccgctatctcgtcattgacatcaactacttcccgggctacgccaagatgccaggatacgagactgtcctcacggatttcttctgggagatggtccatgaggacggcgtgggcaaccaacaggaggagaaaggggccaaccatgttgtcgtgaaataagatgatgattgatggcactggatatctggcgaatgctgctgattctggatgcagaattcgatgaggggatttagttggttgtagtatctggcgaatgctgctggttctggatgcagaatttgatgaggggatttagttggatttcaacccacagcatgccgaggacctcctagctctttccagaccagttgtttaggtatcttttctgggtaagtcagcttcatctagtttagtctgtctgaacaaaagagtgggacatgacccaaacggaattctaatgaaaaatgagctctctatctgc

SEQ ID NO: 5228 - protein, 379 aa, Zea mays subsp. mays
  peptide (1)..(379): Ceres Seq. ID no. 12434864
  misc_feature (55)..(357): Pfam Name: Inositol 1, 3, 4-trisphosphate 5/6-kinase Pfam Description: Inositol 1, 3, 4-trisphosphate 5/6-kinase
  misc_feature (38)..(379): Homolog of NCBI NO: 27549256 NR Description: inositol phosphate kinase [Zea mays]
  misc_feature (42)..(362): Homolog of NCBI NO: 37537118 NR Description: putative inositol 1,3,4-trisphosphate 5/6-kinase
  misc_feature (55)..(359): Homolog of NCBI NO: 7487924 NR Description: inositol 1,3,4-trisphosphate 5/6-kinase (EC
  misc_feature (55)..(359): Homolog of NCBI NO: 15237403 NR Description: Inositol 1,3,4-Trisphosphate 5/6 kinase; protein At5g16760.1, supported by cDNA: 30653., supported by cDNA: supported by cDNA: gi_20465296, supported by cDNA: gi_3396078
  misc_feature (57)..(359): Homolog of NCBI NO: 18413088 NR Description: inositol 1,3,4-trisphosphate 5/6-kinase-like protein id: At4g08170.1, supported by cDNA: gi_15215757, by cDNA: gi_16323319 [Arabidopsis thaliana]
  misc_feature (31)..(359): Homolog of NCBI NO: 37530372 NR Description: putative inositol 1,3,4-trisphosphate 5/6-kinase
  misc_feature (37)..(354): Homolog of NCBI NO: 27311236 NR Description: Putative inositol 1,3,4-trisphosphate 5/6-kinase
  misc_feature (57)..(340): Homolog of NCBI NO: 7487925 NR Description: inositol 1,3,4-trisphosphate 5/6-kinase homolog
  misc_feature (182)..(355): Homolog of NCBI NO: 30689810 NR Description: expressed protein [Arabidopsis thaliana]
  misc_feature (55)..(189): Homolog of NCBI NO: 30689810 NR Description: expressed protein [Arabidopsis thaliana]
PLAFLALYNHSFTLYPSPPNFPTNFNLHRSIPPEPDPMASDAAAEPSSGVTHPPRYVIGYALAPKKQQSFIQPSLVAQAASRGMDLVPVDASQPLAEQGPFHLLIHKLYGDDWRAQLVAFAARHPAVPIVDPPHAIDRLHNRISMLQVVSELDHAADQDSTFGIPSQVVVYDAAALADFGLLAALRFPLIAKPLVADGTAKSHKMSLVYHREGLGKLRPPLVLQEFVNHGGVIFKVYVVGGHVTCVKRRSLPDVSPEDDASAQGSVSFSQVSNLPTERTAEEYYGEKSLEDAVVPPAAFINQIAGGLRRALGLQLFNFDMIRDVRAGDRYLVIDINYFPGYAKMPGYETVLTDFFWEMVHEDGVGNQQEEKGANHVVVK

SEQ ID NO: 5229 - protein, 342 aa, Zea mays subsp. mays
  peptide (1)..(342): Ceres Seq. ID no. 12434865
  misc_feature (18)..(320): Pfam Name: Inositol 1, 3, 4-trisphosphate 5/6-kinase Pfam Description: Inositol 1, 3, 4-trisphosphate 5/6-kinase
  misc_feature (1)..(342): Homolog of NCBI NO: 27549256 NR Description: inositol phosphate kinase [Zea mays]
  misc_feature (5)..(325): Homolog of NCBI NO: 37537118 NR Description: putative inositol 1,3,4-trisphosphate 5/6-kinase
  misc_feature (18)..(322): Homolog of NCBI NO: 7487924 NR Description: inositol 1,3,4-trisphosphate 5/6-kinase (EC
  misc_feature (18)..(322): Homolog of NCBI NO: 15237403 NR Description: Inositol 1,3,4-Trisphosphate 5/6 kinase; protein At5g16760.1, supported by cDNA: 30653., supported by cDNA: supported by cDNA: gi_20465296, supported by cDNA: gi_3396078
  misc_feature (20)..(322): Homolog of NCBI NO: 18413088 NR Description: inositol 1,3,4-trisphosphate 5/6-kinase-like protein id: At4g08170.1, supported by cDNA: gi_15215757, by cDNA: gi_16323319 [Arabidopsis thaliana]
  misc_feature (1)..(322): Homolog of NCBI NO: 37530372 NR Description: putative inositol 1,3,4-trisphosphate 5/6-kinase
  misc_feature (1)..(317): Homolog of NCBI NO: 27311236 NR Description: Putative inositol 1,3,4-trisphosphate 5/6-kinase
  misc_feature (20)..(303): Homolog of NCBI NO: 7487925 NR Description: inositol 1,3,4-trisphosphate 5/6-kinase homolog
  misc_feature (145)..(318): Homolog of NCBI NO: 30689810 NR Description: expressed protein [Arabidopsis thaliana]
  misc_feature (18)..(152): Homolog of NCBI NO: 30689810 NR Description: expressed protein [Arabidopsis thaliana]
MASDAAAEPSSGVTHPPRYVIGYALAPKKQQSFIQPSLVAQAASRGMDLVPVDASQPLAEQGPFHLLIHKLYGDDWRAQLVAFAARHPAVPIVDPPHAIDRLHNRISMLQVVSELDHAADQDSTFGIPSQVVVYDAAALADFGLLAALRFPLIAKPLVADGTAKSHKMSLVYHREGLGKLRPPLVLQEFVNHGGVIFKVYVVGGHVTCVKRRSLPDVSPEDDASAQGSVSFSQVSNLPTERTAEEYYGEKSLEDAVVPPAAFINQIAGGLRRALGLQLFNFDMIRDVRAGDRYLVIDINYFPGYAKMPGYETVLTDFFWEMVHEDGVGNQQEEKGANHVVVK

SEQ ID NO: 5230 - protein, 319 aa, Zea mays subsp. mays
  peptide (1)..(319): Ceres Seq. ID no. 12434866
  misc_feature (34)..(319): Pfam Name: Equine herpesvirus glycoprotein gp2 Pfam Description: Equine herpesvirus glycoprotein gp2
  misc_feature (33)..(319): Homolog of NCBI NO: 13592175 NR Description: ppg3 [Leishmania major]
  misc_feature (45)..(319): Homolog of NCBI NO: 13592175 NR Description: ppg3 [Leishmania major]
  misc_feature (40)..(319): Homolog of NCBI NO: 13592175 NR Description: ppg3 [Leishmania major]
  misc_feature (13)..(319): Homolog of NCBI NO: 13592175 NR Description: ppg3 [Leishmania major]
  misc_feature (40)..(319): Homolog of NCBI NO: 13592175 NR Description: ppg3 [Leishmania major]
  misc_feature (40)..(319): Homolog of NCBI NO: 13592175 NR Description: ppg3 [Leishmania major]
  misc_feature (33)..(283): Homolog of NCBI NO: 11359723 NR Description: proteophosphoglycan, membrane-associated - Leishmania major (fragment) >gi|5420389|emb|CAB46680.1|
  misc_feature (13)..(319): Homolog of NCBI NO: 5420387 NR Description: proteophosphoglycan [Leishmania major]
  misc_feature (33)..(319): Homolog of NCBI NO: 23017082 NR Description: hypothetical protein [Thermobifida fusca]
  misc_feature (95)..(319): Homolog of NCBI NO: 5420387 NR Description: proteophosphoglycan [Leishmania major]
LWLFWLYIIIRSPFIHHHLISQQISISIDRFLPNPTRWPPTPPPSPPPASPTPRATSSVTRSRRRSSRASSSRRWWPRRRRGAWTSSPWMRRSPSQSKGPSTSSSTSSTETTGAPSSWPSPRATRPSPSSTRPTPSTASTTASPCSRSSPSSTTPPTRTALSVSPARSSSTTPPRSPTSDSLPRSASRSSPSPSSPTAPPSPTRCRSSTTARASASSARRLCSRSSSTMAASSSRSTSSAATSLASSAVAFPTCPPRMTHRPRDPSPSPRSPTSPLSARRRSTTAKRVSRTPSCRPPHSSTRSRAASAARWACNSSTST

SEQ ID NO: 5231 - DNA, 1400 bp, Zea mays subsp. mays
  misc_feature (1)..(1400): Ceres Seq. ID no. 13501217
  misc_feature: MA Experiment ID: 108504 Result: Up-regulated in Transcription
  misc_feature: MA Experiment 108504 PARAMETER Experiment Name: Zm_Drought_P Parameter: Age (day) Value: 8
  misc_feature: MA Experiment 108504 PARAMETER Experiment Name: Zm_Drought_P Parameter: Organism Value: Zea mays
  misc_feature: MA Experiment 108504 PARAMETER Experiment Name: Zm_Drought_P Parameter: Plant Line Value: 35A19
  misc_feature: MA Experiment 108504 PARAMETER Experiment Name: Zm_Drought_P Parameter: Timepoint (hr) Value: 12
  misc_feature: MA Experiment 108504 PARAMETER Experiment Name: Zm_Drought_P Parameter: Tissue Value: Aerial
  misc_feature: MA Experiment 108504 PARAMETER Experiment Name: Zm_Drought_P Parameter: Treatment Value: Drought vs. No Drought
  misc_feature: MA Experiment ID: 108513 Result: Up-regulated in Transcription
  misc_feature: MA Experiment 108513 PARAMETER Experiment Name: Zm_100uM_ABA_P Parameter: Age (day) Value: 8
  misc_feature: MA Experiment 108513 PARAMETER Experiment Name: Zm_100uM_ABA_P Parameter: Organism Value: Zea mays
  misc_feature: MA Experiment 108513 PARAMETER Experiment Name: Zm_100uM_ABA_P Parameter: Plant Line Value: 35A19
  misc_feature: MA Experiment 108513 PARAMETER Experiment Name: Zm_100uM_ABA_P Parameter: Timepoint (hr) Value: 6
  misc_feature: MA Experiment 108513 PARAMETER Experiment Name: Zm_100uM_ABA_P Parameter: Tissue Value: Aerial
  misc_feature: MA Experiment 108513 PARAMETER Experiment Name: Zm_100uM_ABA_P Parameter: Treatment Value: 100uM ABA vs. No Treatment
  misc_feature: MA Experiment ID: 108523 Result: Down-regulated in Transcription
  misc_feature: MA Experiment 108523 PARAMETER Experiment Name: Zm_42deg_Heat_P Parameter: Age (day) Value: 8
  misc_feature: MA Experiment 108523 PARAMETER Experiment Name: Zm_42deg_Heat_P Parameter: Organism Value: Zea mays
  misc_feature: MA Experiment 108523 PARAMETER Experiment Name: Zm_42deg_Heat_P Parameter: Plant Line Value: 35A19
  misc_feature: MA Experiment 108523 PARAMETER Experiment Name: Zm_42deg_Heat_P Parameter: Temperature (deg C) Value: 42 vs. 22
  misc_feature: MA Experiment 108523 PARAMETER Experiment Name: Zm_42deg_Heat_P Parameter: Timepoint (hr) Value: 6
  misc_feature: MA Experiment 108523 PARAMETER Experiment Name: Zm_42deg_Heat_P Parameter: Tissue Value: Aerial
  misc_feature: MA Experiment ID: 108527 Result: Down-regulated in Transcription
  misc_feature: MA Experiment 108527 PARAMETER Experiment Name: Zm_5mM_NO_P Parameter: Age (day) Value: 8
  misc_feature: MA Experiment 108527 PARAMETER Experiment Name: Zm_5mM_NO_P Parameter: Organism Value: Zea mays
  misc_feature: MA Experiment 108527 PARAMETER Experiment Name: Zm_5mM_NO_P Parameter: Plant Line Value: 35A19
  misc_feature: MA Experiment 108527 PARAMETER Experiment Name: Zm_5mM_NO_P Parameter: Timepoint (hr) Value: 6
  misc_feature: MA Experiment 108527 PARAMETER Experiment Name: Zm_5mM_NO_P Parameter: Tissue Value: Aerial
  misc_feature: MA Experiment 108527 PARAMETER Experiment Name: Zm_5mM_NO_P Parameter: Treatment Value: 5mM NO vs. No Treatment
  misc_feature: MA Experiment ID: 108530 Result: Up-regulated in Transcription
  misc_feature: MA Experiment 108530 PARAMETER Experiment Name: Zm_Imbibed_Seeds_P Parameter: Age (day) Value: 6 vs. 2
  misc_feature: MA Experiment 108530 PARAMETER Experiment Name: Zm_Imbibed_Seeds_P Parameter: Organism Value: Zea mays
  misc_feature: MA Experiment 108530 PARAMETER Experiment Name: Zm_Imbibed_Seeds_P Parameter: Plant Line Value: 35A19
  misc_feature: MA Experiment 108530 PARAMETER Experiment Name: Zm_Imbibed_Seeds_P Parameter: Tissue Value: Aerial vs. Embryo
  misc_feature: MA Experiment ID: 108540 Result: Up-regulated in Transcription
  misc_feature: MA Experiment 108540 PARAMETER Experiment Name: Zm_20percent_PEG_P Parameter: Age (day) Value: 8
  misc_feature: MA Experiment 108540 PARAMETER Experiment Name: Zm_20percent_PEG_P Parameter: Organism Value: Zea mays
  misc_feature: MA Experiment 108540 PARAMETER Experiment Name: Zm_20percent_PEG_P Parameter: Plant Line Value: 35A19
  misc_feature: MA Experiment 108540 PARAMETER Experiment Name: Zm_20percent_PEG_P Parameter: Timepoint (hr) Value: 6
  misc_feature: MA Experiment 108540 PARAMETER Experiment Name: Zm_20percent_PEG_P Parameter: Tissue Value: Aerial
  misc_feature: MA Experiment 108540 PARAMETER Experiment Name: Zm_20percent_PEG_P Parameter: Treatment Value: 20percent PEG vs. No Treatment
  misc_feature: MA Experiment ID: 108556 Result: Up-regulated in Transcription
  misc_feature: MA Experiment 108556 PARAMETER Experiment Name: Zm_Drought_P Parameter: Age (day) Value: 9
  misc_feature: MA Experiment 108556 PARAMETER Experiment Name: Zm_Drought_P Parameter: Organism Value: Zea mays
  misc_feature: MA Experiment 108556 PARAMETER Experiment Name: Zm_Drought_P Parameter: Plant Line Value: 35A19
  misc_feature: MA Experiment 108556 PARAMETER Experiment Name: Zm_Drought_P Parameter: Timepoint (hr) Value: 24
  misc_feature: MA Experiment 108556 PARAMETER Experiment Name: Zm_Drought_P Parameter: Tissue Value: Aerial
  misc_feature: MA Experiment 108556 PARAMETER Experiment Name: Zm_Drought_P Parameter: Treatment Value: Drought vs. No Drought
  misc_feature: MA Experiment ID: 108559 Result: Down-regulated in Transcription
  misc_feature: MA Experiment 108559 PARAMETER Experiment Name: Zm_5mM_NO_P Parameter: Age (day) Value: 8
  misc_feature: MA Experiment 108559 PARAMETER Experiment Name: Zm_5mM_NO_P Parameter: Organism Value: Zea mays
  misc_feature: MA Experiment 108559 PARAMETER Experiment Name: Zm_5mM_NO_P Parameter: Plant Line Value: 35A19
  misc_feature: MA Experiment 108559 PARAMETER Experiment Name: Zm_5mM_NO_P Parameter: Timepoint (hr) Value: 12
  misc_feature: MA Experiment 108559 PARAMETER Experiment Name: Zm_5mM_NO_P Parameter: Tissue Value: Aerial
  misc_feature: MA Experiment 108559 PARAMETER Experiment Name: Zm_5mM_NO_P Parameter: Treatment Value: 5mM NO vs. No Treatment
  misc_feature: MA Experiment ID: 108689 Result: Up-regulated in Transcription
  misc_feature: MA Experiment 108689 PARAMETER Experiment Name: Zm_Drought_Roots_P Parameter: Age (day) Value: 9
  misc_feature: MA Experiment 108689 PARAMETER Experiment Name: Zm_Drought_Roots_P Parameter: Organism Value: Zea mays
  misc_feature: MA Experiment 108689 PARAMETER Experiment Name: Zm_Drought_Roots_P Parameter: Plant Line Value: 35A19
  misc_feature: MA Experiment 108689 PARAMETER Experiment Name: Zm_Drought_Roots_P Parameter: Timepoint (hr) Value: 24
  misc_feature: MA Experiment 108689 PARAMETER Experiment Name: Zm_Drought_Roots_P Parameter: Tissue Value: Roots
  misc_feature: MA Experiment 108689 PARAMETER Experiment Name: Zm_Drought_Roots_P Parameter: Treatment Value: Drought vs. No Drought
  misc_feature: MA Experiment ID: 20000478 Result: Up-regulated in Transcription
  misc_feature: MA Experiment 20000478 PARAMETER Experiment Name: Zm_5mM_SA_P Parameter: Age (day) Value: 11
  misc_feature: MA Experiment 20000478 PARAMETER Experiment Name: Zm_5mM_SA_P Parameter: Organism Value: Zea mays
  misc_feature: MA Experiment 20000478 PARAMETER Experiment Name: Zm_5mM_SA_P Parameter: Plant Line Value: 35A19
  misc_feature: MA Experiment 20000478 PARAMETER Experiment Name: Zm_5mM_SA_P Parameter: Timepoint (hr) Value: 72
  misc_feature: MA Experiment 20000478 PARAMETER Experiment Name: Zm_5mM_SA_P Parameter: Tissue Value: Aerial
  misc_feature: MA Experiment 20000478 PARAMETER Experiment Name: Zm_5mM_SA_P Parameter: Treatment Value: 5mM SA vs. No Treatment
  misc_feature: MA Experiment ID: 20000480 Result: Up-regulated in Transcription
  misc_feature: MA Experiment 20000480 PARAMETER Experiment Name: Zm_Drought_P Parameter: Age (day) Value: 11
  misc_feature: MA Experiment 20000480 PARAMETER Experiment Name: Zm_Drought_P Parameter: Organism Value: Zea mays
  misc_feature: MA Experiment 20000480 PARAMETER Experiment Name: Zm_Drought_P Parameter: Plant Line Value: 35A19
  misc_feature: MA Experiment 20000480 PARAMETER Experiment Name: Zm_Drought_P Parameter: Timepoint (hr) Value: 72
  misc_feature: MA Experiment 20000480 PARAMETER Experiment Name: Zm_Drought_P Parameter: Tissue Value: Aerial
  misc_feature: MA Experiment 20000480 PARAMETER Experiment Name: Zm_Drought_P Parameter: Treatment Value: Drought vs. No Drought
  misc_feature: MA Experiment ID: 20000487 Result: Down-regulated in Transcription
  misc_feature: MA Experiment 20000487 PARAMETER Experiment Name: Zm_50mM_NH4NO3_L_to_H_P Parameter: Organism Value: Zea mays
  misc_feature: MA Experiment 20000487 PARAMETER Experiment Name: Zm_50mM_NH4NO3_L_to_H_P Parameter: Timepoint (hr) Value: 4
  misc_feature: MA Experiment 20000487 PARAMETER Experiment Name: Zm_50mM_NH4NO3_L_to_H_P Parameter: Tissue Value: Leaves
  misc_feature: MA Experiment 20000487 PARAMETER Experiment Name: Zm_50mM_NH4NO3_L_to_H_P Parameter: Treatment Value: 50mM NH4NO3 vs. 100mM Mannitol
  misc_feature: MA Experiment ID: 20000488 Result: Down-regulated in Transcription
  misc_feature: MA Experiment 20000488 PARAMETER Experiment Name: Zm_50mM_NH4NO3_L_to_H_P Parameter: Organism Value: Zea mays
  misc_feature: MA Experiment 20000488 PARAMETER Experiment Name: Zm_50mM_NH4NO3_L_to_H_P Parameter: Timepoint (hr) Value: 8
  misc_feature: MA Experiment 20000488 PARAMETER Experiment Name: Zm_50mM_NH4NO3_L_to_H_P Parameter: Tissue Value: Leaves
  misc_feature: MA Experiment 20000488 PARAMETER Experiment Name: Zm_50mM_NH4NO3_L_to_H_P Parameter: Treatment Value: 50mM NH4NO3 vs. 100mM Mannitol
  misc_feature: MA Experiment ID: 20000626 Result: Up-regulated in Transcription
  misc_feature: MA Experiment 20000626 PARAMETER Experiment Name: Zm_Herbicide-Treatments_P Parameter: Timepoint (hr) Value: 12
  misc_feature: MA Experiment 20000626 PARAMETER Experiment Name: Zm_Herbicide-Treatments_P Parameter: Tissue Value: Aerial
  misc_feature: MA Experiment 20000626 PARAMETER Experiment Name: Zm_Herbicide-Treatments_P Parameter: Treatment Value: Roundup vs. No Treatment
  misc_feature: MA Experiment ID: 20000629 Result: Up-regulated in Transcription
  misc_feature: MA Experiment 20000629 PARAMETER Experiment Name: Zm_Herbicide-Treatments_P Parameter: Timepoint (hr) Value: 12
  misc_feature: MA Experiment 20000629 PARAMETER Experiment Name: Zm_Herbicide-Treatments_P Parameter: Tissue Value: Aerial
  misc_feature: MA Experiment 20000629 PARAMETER Experiment Name: Zm_Herbicide-Treatments_P Parameter: Treatment Value: Trimec vs. No Treatment
gcacgagaccattacctagaacatcctaatcgaaaagaaagactattcccctcaaccctccaaaagaagagaggactgttgaaacttggatgccatggcatacgtccacacgccaccgtaccagtcgagatcaagacggcaataatagacaagaacaaggtgcgtggcagtgcactcgacgatattaatggagctgctttgcacgggcggcagacagccgtagacagagcagtgacggtcgtcgtacacagatcacgatgctgctcccacactcttcgtcagcctctgcaactgctaccactcgtgggctagcactagcagcagcagcagcagcaccgccgcgtccgaccgctcgcccccggcgcgcgcgcctcctgcctccacgcgcgcgggccgagacgcatgcgacgggcgttggcgccgaccgcgcggccgaggcgcttctccaaagcgggctgcgccgtgagtcgctgccgcggcacgtcgcggtggtgatggacgggaactcgcggtgggcgcgcgagcgggggctgacgcccgcggacggccacaaggccggcggccgcaacctggagcgggtcgttgcgctgtcgcgcgcctggggcatccgcgcgctcaccgccttcgtctgctcccgcgagaacttgnnccgccccaaggccgaggtcgactacatgatgggcttgtccgagtggntgataggcgacaacatcgacaagctctcgaggcaggggatccggctgcaggtgatcggcgacgccgcgaagatgccagcctctctgcggagcgcagcggcgcaggccgacgaggccacgaggcacaactcgcagctgcacgtgatgctggccatctgctacagcgggcgatgggacatggtccaggcgtgccgggagctggcccgggaggcgcaggcgaaccggctcagtccggacgacatcgacgagtcggtcatcgccggcaagctcgcgacgagcgccgccggcgagttctcctgtcccgacctggtcatcagaaccagcggcgagatgaggctcagcaacttcttgctgtggcagtcggcgtactcggagttgttcttcaccggcaagatgtggcctgactttggggaggctgagtacctggaagcgttgcgctccttccagggcagagaccgccgcttcggccaatcaaaattactctaacagtctaactcgatggagccacgaagtggagcgccagtatatgtgaagagttatggattgttcggttagctttcattccatttagattaaataagattgaatgaatttaaatcttaagtaagttaaactttttttaaaatttttttaatcccatcaaataaatgagtaacaggattaatggaacaaagtcttaattggaatttgtcctgttttttaaac

SEQ ID NO: 5232 - protein, 307 aa, Zea mays subsp. mays
  peptide (1)..(307): Ceres Seq. ID no. 13501218
  misc_feature (79)..(302): Pfam Name: Putative undecaprenyl diphosphate synthase Pfam Description: Putative undecaprenyl diphosphate synthase
  misc_feature (24)..(306): Homolog of NCBI NO: 34908428 NR Description: putative undecaprenyl pyrophosphate synthetase
  misc_feature (60)..(305): Homolog of NCBI NO: 15237748 NR Description: dehydrodolichyl diphosphate synthase [DEDOL-PP putative [Arabidopsis thaliana] >gi|8843797|dbj|BAA97345.1| similarity to unknown protein~gb|AAF22257.1~gene_id:MZN1.21
  misc_feature (56)..(302): Homolog of NCBI NO: 7447521 NR Description: hypothetical protein At2g23410 [imported] -
  misc_feature (56)..(302): Homolog of NCBI NO: 18400264 NR Description: dehydrodolichyl diphosphate synthase [DEDOL-PP [Arabidopsis thaliana] >gi|25453539|pir||T52648 dehydrodolichyl
  misc_feature (70)..(307): Homolog of NCBI NO: 17230924 NR Description: undecaprenyl pyrophosphate synthetase [Nostoc sp.
  misc_feature (63)..(305): Homolog of NCBI NO: 23125792 NR Description: hypothetical protein [Nostoc punctiforme]
  misc_feature (67)..(302): Homolog of NCBI NO: 18424144 NR Description: dehydrodolichyl diphosphate synthase [DEDOL-PP putative [Arabidopsis thaliana] >gi|19699277|gb|AAL91250.1| [Arabidopsis thaliana] >gi|28416467|gb|AAO42764.1|
  misc_feature (67)..(303): Homolog of NCBI NO: 17230487 NR Description: undecaprenyl pyrophosphate synthetase [Nostoc sp.
  misc_feature (63)..(303): Homolog of NCBI NO: 37519677 NR Description: undecaprenyl pyrophosphate synthetase violaceus] >gi|35210668|dbj|BAC88049.1| undecaprenyl
  misc_feature (69)..(303): Homolog of NCBI NO: 8843800 NR Description: cis-prenyltransferase homolog-like; undecaprenyl
  misc_feature (131)..(131): Xaa is any aa, unknown or other
  misc_feature (147)..(147): Xaa is any aa, unknown or other
MLLPHSSSASATATTRGLALAAAAAAPPRPTARPRRARLLPPRARAETHATGVGADRAAEALLQSGLRRESLPRHVAVVMDGNSRWARERGLTPADGHKAGGRNLERVVALSRAWGIRALTAFVCSRENLXRPKAEVDYMMGLSEWXIGDNIDKLSRQGIRLQVIGDAAKMPASLRSAAAQADEATRHNSQLHVMLAICYSGRWDMVQACRELAREAQANRLSPDDIDESVIAGKLATSAAGEFSCPDLVIRTSGEMRLSNFLLWQSAYSELFFTGKMWPDFGEAEYLEALRSFQGRDRRFGQSKLL

SEQ ID NO: 5233 - protein, 228 aa, Zea mays subsp. mays
  peptide (1)..(228): Ceres Seq. ID no. 13501219
  misc_feature (1)..(223): Pfam Name: Putative undecaprenyl diphosphate synthase Pfam Description: Putative undecaprenyl diphosphate synthase
  misc_feature (1)..(227): Homolog of NCBI NO: 34908428 NR Description: putative undecaprenyl pyrophosphate synthetase
  misc_feature (1)..(226): Homolog of NCBI NO: 15237748 NR Description: dehydrodolichyl diphosphate synthase [DEDOL-PP putative [Arabidopsis thaliana] >gi|8843797|dbj|BAA97345.1| similarity to unknown protein~gb|AAF22257.1~gene_id:MZN1.21
  misc_feature (1)..(223): Homolog of NCBI NO: 7447521 NR Description: hypothetical protein At2g23410 [imported] -
  misc_feature (1)..(223): Homolog of NCBI NO: 18400264 NR Description: dehydrodolichyl diphosphate synthase [DEDOL-PP [Arabidopsis thaliana] >gi|25453539|pir||T52648 dehydrodolichyl
  misc_feature (1)..(228): Homolog of NCBI NO: 17230924 NR Description: undecaprenyl pyrophosphate synthetase [Nostoc sp.
  misc_feature (1)..(226): Homolog of NCBI NO: 23125792 NR Description: hypothetical protein [Nostoc punctiforme]
  misc_feature (1)..(223): Homolog of NCBI NO: 18424144 NR Description: dehydrodolichyl diphosphate synthase [DEDOL-PP putative [Arabidopsis thaliana] >gi|19699277|gb|AAL91250.1| [Arabidopsis thaliana] >gi|28416467|gb|AAO42764.1|
  misc_feature (1)..(224): Homolog of NCBI NO: 17230487 NR Description: undecaprenyl pyrophosphate synthetase [Nostoc sp.
  misc_feature (1)..(224): Homolog of NCBI NO: 37519677 NR Description: undecaprenyl pyrophosphate synthetase violaceus] >gi|35210668|dbj|BAC88049.1| undecaprenyl
  misc_feature (1)..(224): Homolog of NCBI NO: 8843800 NR Description: cis-prenyltransferase homolog-like; undecaprenyl
  misc_feature (52)..(52): Xaa is any aa, unknown or other
  misc_feature (68)..(68): Xaa is any aa, unknown or other
MDGNSRWARERGLTPADGHKAGGRNLERVVALSRAWGIRALTAFVCSRENLXRPKAEVDYMMGLSEWXIGDNIDKLSRQGIRLQVIGDAAKMPASLRSAAAQADEATRHNSQLHVMLAICYSGRWDMVQACRELAREAQANRLSPDDIDESVIAGKLATSAAGEFSCPDLVIRTSGEMRLSNFLLWQSAYSELFFTGKMWPDFGEAEYLEALRSFQGRDRRFGQSKLL

SEQ ID NO: 5234 - protein, 168 aa, Zea mays subsp. mays
  peptide (1)..(168): Ceres Seq. ID no. 13501220
  misc_feature (1)..(163): Pfam Name: Putative undecaprenyl diphosphate synthase Pfam Description: Putative undecaprenyl diphosphate synthase
  misc_feature (1)..(167): Homolog of NCBI NO: 34908428 NR Description: putative undecaprenyl pyrophosphate synthetase
  misc_feature (1)..(166): Homolog of NCBI NO: 15237748 NR Description: dehydrodolichyl diphosphate synthase [DEDOL-PP putative [Arabidopsis thaliana] >gi|8843797|dbj|BAA97345.1| similarity to unknown protein~gb|AAF22257.1~gene_id:MZN1.21
  misc_feature (1)..(163): Homolog of NCBI NO: 7447521 NR Description: hypothetical protein At2g23410 [imported] -
  misc_feature (1)..(163): Homolog of NCBI NO: 18400264 NR Description: dehydrodolichyl diphosphate synthase [DEDOL-PP [Arabidopsis thaliana] >gi|25453539|pir||T52648 dehydrodolichyl
  misc_feature (1)..(168): Homolog of NCBI NO: 17230924 NR Description: undecaprenyl pyrophosphate synthetase [Nostoc sp.
  misc_feature (1)..(166): Homolog of NCBI NO: 23125792 NR Description: hypothetical protein [Nostoc punctiforme]
  misc_feature (1)..(163): Homolog of NCBI NO: 18424144 NR Description: dehydrodolichyl diphosphate synthase [DEDOL-PP putative [Arabidopsis thaliana] >gi|19699277|gb|AAL91250.1| [Arabidopsis thaliana] >gi|28416467|gb|AAO42764.1|
  misc_feature (1)..(164): Homolog of NCBI NO: 17230487 NR Description: undecaprenyl pyrophosphate synthetase [Nostoc sp.
  misc_feature (1)..(164): Homolog of NCBI NO: 37519677 NR Description: undecaprenyl pyrophosphate synthetase violaceus] >gi|35210668|dbj|BAC88049.1| undecaprenyl
  misc_feature (1)..(164): Homolog of NCBI NO: 8843800 NR Description: cis-prenyltransferase homolog-like; undecaprenyl
  misc_feature (8)..(8): Xaa is any aa, unknown or other
MMGLSEWXIGDNIDKLSRQGIRLQVIGDAAKMPASLRSAAAQADEATRHNSQLHVMLAICYSGRWDMVQACRELAREAQANRLSPDDIDESVIAGKLATSAAGEFSCPDLVIRTSGEMRLSNFLLWQSAYSELFFTGKMWPDFGEAEYLEALRSFQGRDRRFGQSKLL

SEQ ID NO: 5235 - DNA, 1668 bp, Zea mays subsp. mays
  misc_feature (1)..(1668): Ceres Seq. ID no. 12406933
  misc_feature: MA Experiment ID: 108543 Result: Down-regulated in Transcription
  misc_feature: MA Experiment ID: 108689 Result: Down-regulated in Transcription
  misc_feature: MA Experiment 108689 PARAMETER Experiment Name: Zm_Drought_Roots_P Parameter: Age (day) Value: 9
  misc_feature: MA Experiment 108689 PARAMETER Experiment Name: Zm_Drought_Roots_P Parameter: Organism Value: Zea mays
  misc_feature: MA Experiment 108689 PARAMETER Experiment Name: Zm_Drought_Roots_P Parameter: Plant Line Value: 35A19
  misc_feature: MA Experiment 108689 PARAMETER Experiment Name: Zm_Drought_Roots_P Parameter: Timepoint (hr) Value: 24
  misc_feature: MA Experiment 108689 PARAMETER Experiment Name: Zm_Drought_Roots_P Parameter: Tissue Value: Roots
  misc_feature: MA Experiment 108689 PARAMETER Experiment Name: Zm_Drought_Roots_P Parameter: Treatment Value: Drought vs. No Drought
  misc_feature: MA Experiment ID: 20000534 Result: Down-regulated in Transcription
  misc_feature: MA Experiment 20000534 PARAMETER Experiment Name: Zm_Hybrid_Pollen_P Parameter: Age (day) Value: 8
  misc_feature: MA Experiment 20000534 PARAMETER Experiment Name: Zm_Hybrid_Pollen_P Parameter: Organism Value: Zea mays
  misc_feature: MA Experiment 20000534 PARAMETER Experiment Name: Zm_Hybrid_Pollen_P Parameter: Plant Line Value: 35A19
  misc_feature: MA Experiment 20000534 PARAMETER Experiment Name: Zm_Hybrid_Pollen_P Parameter: Tissue Value: Pollen vs. Aerial
attccacgctgcctcggccggcacctacctcccccacttcgccgccggcgggtggagtcgggccggagcagccgctagctcgcctctgttaccccaaaaaagacaaaaaaaataaagagagagtaccaagcaagccgccggcagctcgggcagccatggggcacggcgtcagctgcgctcgcacgggcgacgagcacaactacttccgcgcggcgcaggtcggggacctcgacgccctggacgcgctcctcgccgccgacccctccctcgcccgccgcgccacgctctacgaccgtctctccgcgctgcacatcaccgccgccaatggccacctcgaggtgatgtccatgatcttgaatcacggggtaccgccggacgccgtgaaccggcacaagcagacgccgctgatgctcgcggcgatgcacggcaagatcgactgcgcgcggaagctcctgcaggccggcgccaatatcctgatgttcgactccctgcacgggcggacctgcctgcaccacgcgtcctacttcggccacgtcgactgcctgcgggccatcctcgcggcggcgcggaccacgccggtggccgactcatggggtttcgcccggttcgtcaacgtcagggacgaccgcggcgccacgccgctgcacctcgccgccaggcagggccgccccgcctgcgtgcaggtgctgctggagaacggcgccattgtctccgccctcaccggctcctacgggttccccggcagcacgtcgctgcatctggccgctcgaagcgggaacctggactgcatccggaaactgctcgcctggggcggggatcgtctccagagggactcagcagggaggattccttacgccgtggcgctgaagcgcaaccacggggcgtgcgcggcgctgctgaacccgtcggcggcggagcccatggtgtggccttccccgctcaagttcatcagcgagctggacccggaggcgaaggctctcctggaagcggcactgatggacgccaatagggagagggaggagaagatcctcaagggcatcaccaagtatccgcaggcatcgcctacttcgccttgcgagcacgatgccattgacgaagcgtcctcggaggccagcgacgcggagctgtgctgcatctgcttcgagcaggcgtgcagcatcgaggtgcaggactgcgggcaccagatgtgcgcggcgtgcacgctggcgctgtgctgccacagcaagccgaacccggcgacgctgacgccgccgtcgccggcctgcccgttctgccgcggcagcatctcgaggctgctggtggcccgggcgagccccgacgccgatgacgacaaggccgccgccgccgcctcgtccccgcagctcgtccggcggcgaccgcacaacctcagctgggcggcggcgacggcgtggacaagcccgagcacgacctgtgatcgccatttgatgctgtgcgtggctgagcagacagcagagcacgaccattttaaaagctgaagcaggcattgccactggctttccaagatgagagacatcacatccaagcgtgattatctactacttgtaatgcatcctcttcttctcccccatgtttggtctatttttgggcgtgctaggatgcacctggccggcatgcagctgcgcgatatggttgagctgagcttgagcc

SEQ ID NO: 5236 - protein, 497 aa, Zea mays subsp. mays
  peptide (1)..(497): Ceres Seq. ID no. 12406934
  misc_feature (246)..(278): Pfam Name: Ankyrin repeat Pfam Description: Ankyrin repeat
  misc_feature (52)..(474): Homolog of NCBI NO: 14279688 NR Description: receptor-like kinase Xa21-binding protein 3
  misc_feature (52)..(451): Homolog of NCBI NO: 34906062 NR Description: putative receptor-like kinase Xa21-binding
  misc_feature (52)..(435): Homolog of NCBI NO: 30684032 NR Description: RING zinc finger ankyrin protein -related thaliana] >gi|14596109|gb|AAK68782.1| putative RING zinc finger protein [Arabidopsis thaliana] >gi|20148259|gb|AAM10020.1|
  misc_feature (83)..(435): Homolog of NCBI NO: 25408016 NR Description: probable RING zinc finger ankyrin protein - Arabidopsis thaliana >gi|3927831|gb|AAC79588.1| putative RING finger ankyrin protein [Arabidopsis thaliana]
  misc_feature (52)..(268): Homolog of NCBI NO: 16226319 NR Description: At2g28840/F8N16.13 [Arabidopsis thaliana]
  misc_feature (331)..(474): Homolog of NCBI NO: 25044835 NR Description: RING zinc finger protein [Ananas comosus]
  misc_feature (52)..(258): Homolog of NCBI NO: 15240746 NR Description: putative protein; protein id: At5g07270.1
  misc_feature (365)..(429): Homolog of NCBI NO: 15240746 NR Description: putative protein; protein id: At5g07270.1
  misc_feature (307)..(388): Homolog of NCBI NO: 37535186 NR Description: hypothetical protein [Oryza sativa (japonica group)] >gi|22758309|gb|AAN05513.1| hypothetical protein [Oryza
  misc_feature (52)..(227): Homolog of NCBI NO: 34898056 NR Description: Similar to mouse ankyrin 3 (AC005727) [Oryza
STLPRPAPTSPTSPPAGGVGPEQPLARLCYPKKDKKNKERVPSKPPAARAAMGHGVSCARTGDEHNYFRAAQVGDLDALDALLAADPSLARRATLYDRLSALHITAANGHLEVMSMILNHGVPPDAVNRHKQTPLMLAAMHGKIDCARKLLQAGANILMFDSLHGRTCLHHASYFGHVDCLRAILAAARTTPVADSWGFARFVNVRDDRGATPLHLAARQGRPACVQVLLENGAIVSALTGSYGFPGSTSLHLAARSGNLDCIRKLLAWGGDRLQRDSAGRIPYAVALKRNHGACAALLNPSAAEPMVWPSPLKFISELDPEAKALLEAALMDANREREEKILKGITKYPQASPTSPCEHDAIDEASSEASDAELCCICFEQACSIEVQDCGHQMCAACTLALCCHSKPNPATLTPPSPACPFCRGSISRLLVARASPDADDDKAAAAASSPQLVRRRPHNLSWAAATAWTSPSTTCDRHLMLCVAEQTAEHDHFKS

SEQ ID NO: 5237 - protein, 446 aa, Zea mays subsp. mays
  peptide (1)..(446): Ceres Seq. ID no. 12406935
  misc_feature (195)..(227): Pfam Name: Ankyrin repeat Pfam Description: Ankyrin repeat
  misc_feature (1)..(423): Homolog of NCBI NO: 14279688 NR Description: receptor-like kinase Xa21-binding protein 3
  misc_feature (1)..(400): Homolog of NCBI NO: 34906062 NR Description: putative receptor-like kinase Xa21-binding
  misc_feature (1)..(384): Homolog of NCBI NO: 30684032 NR Description: RING zinc finger ankyrin protein -related thaliana] >gi|14596109|gb|AAK68782.1| putative RING zinc finger protein [Arabidopsis thaliana] >gi|20148259|gb|AAM10020.1|
  misc_feature (32)..(384): Homolog of NCBI NO: 25408016 NR Description: probable RING zinc finger ankyrin protein - Arabidopsis thaliana >gi|3927831|gb|AAC79588.1| putative RING finger ankyrin protein [Arabidopsis thaliana]
  misc_feature (1)..(217): Homolog of NCBI NO: 16226319 NR Description: At2g28840/F8N16.13 [Arabidopsis thaliana]
  misc_feature (280)..(423): Homolog of NCBI NO: 25044835 NR Description: RING zinc finger protein [Ananas comosus]
  misc_feature (1)..(207): Homolog of NCBI NO: 15240746 NR Description: putative protein; protein id: At5g07270.1
  misc_feature (314)..(378): Homolog of NCBI NO: 15240746 NR Description: putative protein; protein id: At5g07270.1
  misc_feature (256)..(337): Homolog of NCBI NO: 37535186 NR Description: hypothetical protein [Oryza sativa (japonica group)] >gi|22758309|gb|AAN05513.1| hypothetical protein [Oryza
  misc_feature (1)..(176): Homolog of NCBI NO: 34898056 NR Description: Similar to mouse ankyrin 3 (AC005727) [Oryza
MGHGVSCARTGDEHNYFRAAQVGDLDALDALLAADPSLARRATLYDRLSALHITAANGHLEVMSMILNHGVPPDAVNRHKQTPLMLAAMHGKIDCARKLLQAGANILMFDSLHGRTCLHHASYFGHVDCLRAILAAARTTPVADSWGFARFVNVRDDRGATPLHLAARQGRPACVQVLLENGAIVSALTGSYGFPGSTSLHLAARSGNLDCIRKLLAWGGDRLQRDSAGRIPYAVALKRNHGACAALLNPSAAEPMVWPSPLKFISELDPEAKALLEAALMDANREREEKILKGITKYPQASPTSPCEHDAIDEASSEASDAELCCICFEQACSIEVQDCGHQMCAACTLALCCHSKPNPATLTPPSPACPFCRGSISRLLVARASPDADDDKAAAAASSPQLVRRRPHNLSWAAATAWTSPSTTCDRHLMLCVAEQTAEHDHFKS

SEQ ID NO: 5238 - protein, 384 aa, Zea mays subsp. mays
  peptide (1)..(384): Ceres Seq. ID no. 12406936
  misc_feature (133)..(165): Pfam Name: Ankyrin repeat Pfam Description: Ankyrin repeat
  misc_feature (1)..(338): Homolog of NCBI NO: 34906062 NR Description: putative receptor-like kinase Xa21-binding
  misc_feature (1)..(322): Homolog of NCBI NO: 30684032 NR Description: RING zinc finger ankyrin protein -related thaliana] >gi|14596109|gb|AAK68782.1| putative RING zinc finger protein [Arabidopsis thaliana] >gi|20148259|gb|AAM10020.1|
  misc_feature (1)..(322): Homolog of NCBI NO: 25408016 NR Description: probable RING zinc finger ankyrin protein - Arabidopsis thaliana >gi|3927831|gb|AAC79588.1| putative RING finger ankyrin protein [Arabidopsis thaliana]
  misc_feature (1)..(155): Homolog of NCBI NO: 16226319 NR Description: At2g28840/F8N16.13 [Arabidopsis thaliana]
  misc_feature (218)..(361): Homolog of NCBI NO: 25044835 NR Description: RING zinc finger protein [Ananas comosus]
  misc_feature (1)..(361): Homolog of NCBI NO: 14279688 NR Description: receptor-like kinase Xa21-binding protein 3
  misc_feature (1)..(145): Homolog of NCBI NO: 15240746 NR Description: putative protein; protein id: At5g07270.1
  misc_feature (252)..(316): Homolog of NCBI NO: 15240746 NR Description: putative protein; protein id: At5g07270.1
  misc_feature (194)..(275): Homolog of NCBI NO: 37535186 NR Description: hypothetical protein [Oryza sativa (japonica group)] >gi|22758309|gb|AAN05513.1| hypothetical protein [Oryza
  misc_feature (1)..(114): Homolog of NCBI NO: 34898056 NR Description: Similar to mouse ankyrin 3 (AC005727) [Oryza
MSMILNHGVPPDAVNRHKQTPLMLAAMHGKIDCARKLLQAGANILMFDSLHGRTCLHHASYFGHVDCLRAILAAARTTPVADSWGFARFVNVRDDRGATPLHLAARQGRPACVQVLLENGAIVSALTGSYGFPGSTSLHLAARSGNLDCIRKLLAWGGDRLQRDSAGRIPYAVALKRNHGACAALLNPSAAEPMVWPSPLKFISELDPEAKALLEAALMDANREREEKILKGITKYPQASPTSPCEHDAIDEASSEASDAELCCICFEQACSIEVQDCGHQMCAACTLALCCHSKPNPATLTPPSPACPFCRGSISRLLVARASPDADDDKAAAAASSPQLVRRRPHNLSWAAATAWTSPSTTCDRHLMLCVAEQTAEHDHFKS

SEQ ID NO: 5239 - DNA, 1202 bp, Zea mays subsp. mays
  misc_feature (1)..(1202): Ceres Seq. ID no. 12356239
  misc_feature: MA Experiment ID: 108504 Result: Up-regulated in Transcription
  misc_feature: MA Experiment 108504 PARAMETER Experiment Name: Zm_Drought_P Parameter: Age (day) Value: 8
  misc_feature: MA Experiment 108504 PARAMETER Experiment Name: Zm_Drought_P Parameter: Organism Value: Zea mays
  misc_feature: MA Experiment 108504 PARAMETER Experiment Name: Zm_Drought_P Parameter: Plant Line Value: 35A19
  misc_feature: MA Experiment 108504 PARAMETER Experiment Name: Zm_Drought_P Parameter: Timepoint (hr) Value: 12
  misc_feature: MA Experiment 108504 PARAMETER Experiment Name: Zm_Drought_P Parameter: Tissue Value: Aerial
  misc_feature: MA Experiment 108504 PARAMETER Experiment Name: Zm_Drought_P Parameter: Treatment Value: Drought vs. No Drought
  misc_feature: MA Experiment ID: 108536 Result: Up-regulated in Transcription
  misc_feature: MA Experiment 108536 PARAMETER Experiment Name: Zm_Meristem_P Parameter: Age (day) Value: 8
  misc_feature: MA Experiment 108536 PARAMETER Experiment Name: Zm_Meristem_P Parameter: Organism Value: Zea mays
  misc_feature: MA Experiment 108536 PARAMETER Experiment Name: Zm_Meristem_P Parameter: Plant Line Value: 35A19
  misc_feature: MA Experiment 108536 PARAMETER Experiment Name: Zm_Meristem_P Parameter: Tissue Value: Shoot Meristem vs. Above Shoot Meristem
  misc_feature: MA Experiment ID: 108544 Result: Up-regulated in Transcription
  misc_feature: MA Experiment ID: 108556 Result: Up-regulated in Transcription
  misc_feature: MA Experiment 108556 PARAMETER Experiment Name: Zm_Drought_P Parameter: Age (day) Value: 9
  misc_feature: MA Experiment 108556 PARAMETER Experiment Name: Zm_Drought_P Parameter: Organism Value: Zea mays
  misc_feature: MA Experiment 108556 PARAMETER Experiment Name: Zm_Drought_P Parameter: Plant Line Value: 35A19
  misc_feature: MA Experiment 108556 PARAMETER Experiment Name: Zm_Drought_P Parameter: Timepoint (hr) Value: 24
  misc_feature: MA Experiment 108556 PARAMETER Experiment Name: Zm_Drought_P Parameter: Tissue Value: Aerial
  misc_feature: MA Experiment 108556 PARAMETER Experiment Name: Zm_Drought_P Parameter: Treatment Value: Drought vs. No Drought
  misc_feature: MA Experiment ID: 108559 Result: Up-regulated in Transcription
  misc_feature: MA Experiment 108559 PARAMETER Experiment Name: Zm_5mM_NO_P Parameter: Age (day) Value: 8
  misc_feature: MA Experiment 108559 PARAMETER Experiment Name: Zm_5mM_NO_P Parameter: Organism Value: Zea mays
  misc_feature: MA Experiment 108559 PARAMETER Experiment Name: Zm_5mM_NO_P Parameter: Plant Line Value: 35A19
  misc_feature: MA Experiment 108559 PARAMETER Experiment Name: Zm_5mM_NO_P Parameter: Timepoint (hr) Value: 12
  misc_feature: MA Experiment 108559 PARAMETER Experiment Name: Zm_5mM_NO_P Parameter: Tissue Value: Aerial
  misc_feature: MA Experiment 108559 PARAMETER Experiment Name: Zm_5mM_NO_P Parameter: Treatment Value: 5mM NO vs. No Treatment
  misc_feature: MA Experiment ID: 108687 Result: Down-regulated in Transcription
  misc_feature: MA Experiment 108687 PARAMETER Experiment Name: Zm_Embryos-Flowers__P Parameter: Tissue Value: Embryo vs. Aerial+
  misc_feature: MA Experiment ID: 108689 Result: Up-regulated in Transcription
  misc_feature: MA Experiment 108689 PARAMETER Experiment Name: Zm_Drought_Roots_P Parameter: Age (day) Value: 9
  misc_feature: MA Experiment 108689 PARAMETER Experiment Name: Zm_Drought_Roots_P Parameter: Organism Value: Zea mays
  misc_feature: MA Experiment 108689 PARAMETER Experiment Name: Zm_Drought_Roots_P Parameter: Plant Line Value: 35A19
  misc_feature: MA Experiment 108689 PARAMETER Experiment Name: Zm_Drought_Roots_P Parameter: Timepoint (hr) Value: 24
  misc_feature: MA Experiment 108689 PARAMETER Experiment Name: Zm_Drought_Roots_P Parameter: Tissue Value: Roots
  misc_feature: MA Experiment 108689 PARAMETER Experiment Name: Zm_Drought_Roots_P Parameter: Treatment Value: Drought vs. No Drought
  misc_feature: MA Experiment ID: 20000480 Result: Up-regulated in Transcription
  misc_feature: MA Experiment 20000480 PARAMETER Experiment Name: Zm_Drought_P Parameter: Age (day) Value: 11
  misc_feature: MA Experiment 20000480 PARAMETER Experiment Name: Zm_Drought_P Parameter: Organism Value: Zea mays
  misc_feature: MA Experiment 20000480 PARAMETER Experiment Name: Zm_Drought_P Parameter: Plant Line Value: 35A19
  misc_feature: MA Experiment 20000480 PARAMETER Experiment Name: Zm_Drought_P Parameter: Timepoint (hr) Value: 72
  misc_feature: MA Experiment 20000480 PARAMETER Experiment Name: Zm_Drought_P Parameter: Tissue Value: Aerial
  misc_feature: MA Experiment 20000480 PARAMETER Experiment Name: Zm_Drought_P Parameter: Treatment Value: Drought vs. No Drought
  misc_feature: MA Experiment ID: 20000535 Result: Down-regulated in Transcription
  misc_feature: MA Experiment 20000535 PARAMETER Experiment Name: Zm_Hybrid_Seed_Dev_P Parameter: DAP Value: 30 vs. 12
  misc_feature: MA Experiment 20000535 PARAMETER Experiment Name: Zm_Hybrid_Seed_Dev_P Parameter: Organism Value: Zea mays
  misc_feature: MA Experiment 20000535 PARAMETER Experiment Name: Zm_Hybrid_Seed_Dev_P Parameter: Plant Line Value: 35A19
  misc_feature: MA Experiment 20000535 PARAMETER Experiment Name: Zm_Hybrid_Seed_Dev_P Parameter: Tissue Value: Embryo vs. Unfert Floret
atcctttgctggcacgaccaaaaacttctcttcatccaatctgcaactccctcccgcaccaaaccttacccaggactaggaggaggaaagaaatggaggaataaagcagagtgagaagagaagaggaagcgaggcctctgctccagctcctatacaggagcgagcgacccagacgcctctgcttcggtgcttcccagtgccagtagtcgccaatccgcccaggtctcatgcttcggtccacgcacccacccagccccagcagcggcagctccgacgccacgatggtcgggggcggcgccccgagcggcgccaagctgctgcagatcctcaacgtgcgggtggtgggcagcggcgaccgcgtggtggtgctgtcccacgggttcggcacggaccagtcggcgtggagccgcgtgctcccctacctcacccgcgaccaccgcgtggtgctctacgacctcgtctgcgccggcagcgtcaacccggagcacttcgacttccgccgctacgacacgctggactcgtacgtcgacgacctgctcgccatcctcgacgcgctccgcgtctcgcgctgcgccttcgtcgggcactccgtgtccgccatgatcggcatcctcgcctccatccgccgccccgagctcttcgccaaggctcgtcctcatcggcgcgtcgcccaggttcctgaacgaccacgactaccacggcgggttcgagctgccggagatccagcaggtgttcgacgcgatggcggccaactactcggcgtgggcgaccgggtacgccccgctggcggttggcgcggacgtgcccgcggcggtgcaggagttcagccgcacgctcttcaacatgcggccggacatctcgctccacgtctgccgcaccgtgttcaacacggacctccgcggcgtgctgggcatggtgcgcgccccctgcgtggtggtgcagaccacccgcgacgtctccgtcccggcctccgtcgccgcctacctcaaggcccacctcggcggccgcaccgccgtcgagttcctccagaccgagggccacctcccgcacctcagcgcccccggcctcctcgcccaggtgctccgccgcgcgctcgcccggtactagcagccgggccggccaggcctgtttttaccgcctcgatttacccctgccgagaccgagaatcaagaaatggcgcgactcgcgccgtttgctgtgtc

SEQ ID NO: 5240 - protein, 325 aa, Zea mays subsp. mays
  peptide (1)..(325): Ceres Seq. ID no. 12356240
  misc_feature (70)..(140): Pfam Name: alpha/beta hydrolase fold Pfam Description: alpha/beta hydrolase fold
  misc_feature (30)..(140): Homolog of NCBI NO: 21593927 NR Description: unknown [Arabidopsis thaliana]
  misc_feature (30)..(140): Homolog of NCBI NO: 18396732 NR Description: expressed protein; protein id: At3g03990.1, by cDNA: 6052., supported by cDNA: gi_17381266, supported by gi_20453358 [Arabidopsis thaliana]
  misc_feature (35)..(140): Homolog of NCBI NO: 15235567 NR Description: putative protein; protein id: At4g37470.1, by cDNA: gi_15810302, supported by cDNA: gi_20259140 [Arabidopsis
  misc_feature (35)..(140): Homolog of NCBI NO: 40736991 NR Description: putative hydrolases [Oryza sativa (japonica
  misc_feature (35)..(140): Homolog of NCBI NO: 24216360 NR Description: Predicted hydrolases or acyltransferases, hydrolase superfamily [Leptospira interrogans serovar lai str. >gi|24197640|gb|AAN50859.1|AE011521_5 Predicted hydrolases or
  misc_feature (30)..(138): Homolog of NCBI NO: 15230110 NR Description: unknown protein; protein id: At3g24420.1
  misc_feature (34)..(138): Homolog of NCBI NO: 34912326 NR Description: P0451D05.26 [Oryza sativa (japonica
  misc_feature (36)..(140): Homolog of NCBI NO: 22298700 NR Description: ORF_ID:tlr1157~hypothetical protein
  misc_feature (35)..(139): Homolog of NCBI NO: 16080463 NR Description: similar to hydrolase [Bacillus subtilis]
  misc_feature (35)..(151): Homolog of NCBI NO: 22987307 NR Description: hypothetical protein [Burkholderia fungorum]
MLRSTHPPSPSSGSSDATMVGGGAPSGAKLLQILNVRVVGSGDRVVVLSHGFGTDQSAWSRVLPYLTRDHRVVLYDLVCAGSVNPEHFDFRRYDTLDSYVDDLLAILDALRVSRCAFVGHSVSAMIGILASIRRPELFAKARPHRRVAQVPERPRLPRRVRAAGDPAGVRRDGGQLLGVGDRVRPAGGWRGRARGGAGVQPHALQHAAGHLAPRLPHRVQHGPPRRAGHGARPLRGGADHPRRLRPGLRRRLPQGPPRRPHRRRVPPDRGPPPAPQRPRPPRPGAPPRARPVLAAGPARPVFTASIYPCRDRESRNGATRAVCCV

SEQ ID NO: 5241 - protein, 307 aa, Zea mays subsp. mays
  peptide (1)..(307): Ceres Seq. ID no. 12356241
  misc_feature (52)..(122): Pfam Name: alpha/beta hydrolase fold Pfam Description: alpha/beta hydrolase fold
  misc_feature (12)..(122): Homolog of NCBI NO: 21593927 NR Description: unknown [Arabidopsis thaliana]
  misc_feature (12)..(122): Homolog of NCBI NO: 18396732 NR Description: expressed protein; protein id: At3g03990.1, by cDNA: 6052., supported by cDNA: gi_17381266, supported by gi_20453358 [Arabidopsis thaliana]
  misc_feature (17)..(122): Homolog of NCBI NO: 15235567 NR Description: putative protein; protein id: At4g37470.1, by cDNA: gi_15810302, supported by cDNA: gi_20259140 [Arabidopsis
  misc_feature (17)..(122): Homolog of NCBI NO: 40736991 NR Description: putative hydrolases [Oryza sativa (japonica
  misc_feature (17)..(122): Homolog of NCBI NO: 24216360 NR Description: Predicted hydrolases or acyltransferases, hydrolase superfamily [Leptospira interrogans serovar lai str. >gi|24197640|gb|AAN50859.1|AE011521_5 Predicted hydrolases or
  misc_feature (12)..(120): Homolog of NCBI NO: 15230110 NR Description: unknown protein; protein id: At3g24420.1
  misc_feature (16)..(120): Homolog of NCBI NO: 34912326 NR Description: P0451D05.26 [Oryza sativa (japonica
  misc_feature (18)..(122): Homolog of NCBI NO: 22298700 NR Description: ORF_ID:tlr1157~hypothetical protein
  misc_feature (17)..(121): Homolog of NCBI NO: 16080463 NR Description: similar to hydrolase [Bacillus subtilis]
  misc_feature (17)..(133): Homolog of NCBI NO: 22987307 NR Description: hypothetical protein [Burkholderia fungorum]
MVGGGAPSGAKLLQILNVRVVGSGDRVVVLSHGFGTDQSAWSRVLPYLTRDHRVVLYDLVCAGSVNPEHFDFRRYDTLDSYVDDLLAILDALRVSRCAFVGHSVSAMIGILASIRRPELFAKARPHRRVAQVPERPRLPRRVRAAGDPAGVRRDGGQLLGVGDRVRPAGGWRGRARGGAGVQPHALQHAAGHLAPRLPHRVQHGPPRRAGHGARPLRGGADHPRRLRPGLRRRLPQGPPRRPHRRRVPPDRGPPPAPQRPRPPRPGAPPRARPVLAAGPARPVFTASIYPCRDRESRNGATRAVCCV

SEQ ID NO: 5242 - protein, 201 aa, Zea mays subsp. mays
  peptide (1)..(201): Ceres Seq. ID no. 12356242
  misc_feature (140)..(190): Pfam Name: Glycoprotein GG/GX Pfam Description: Glycoprotein GG/GX
  misc_feature (1)..(16): Homolog of NCBI NO: 21593927 NR Description: unknown [Arabidopsis thaliana]
  misc_feature (1)..(16): Homolog of NCBI NO: 18396732 NR Description: expressed protein; protein id: At3g03990.1, by cDNA: 6052., supported by cDNA: gi_17381266, supported by gi_20453358 [Arabidopsis thaliana]
  misc_feature (1)..(16): Homolog of NCBI NO: 15235567 NR Description: putative protein; protein id: At4g37470.1, by cDNA: gi_15810302, supported by cDNA: gi_20259140 [Arabidopsis
  misc_feature (1)..(16): Homolog of NCBI NO: 40736991 NR Description: putative hydrolases [Oryza sativa (japonica
  misc_feature (1)..(16): Homolog of NCBI NO: 24216360 NR Description: Predicted hydrolases or acyltransferases, hydrolase superfamily [Leptospira interrogans serovar lai str. >gi|24197640|gb|AAN50859.1|AE011521_5 Predicted hydrolases or
  misc_feature (1)..(14): Homolog of NCBI NO: 15230110 NR Description: unknown protein; protein id: At3g24420.1
  misc_feature (1)..(14): Homolog of NCBI NO: 34912326 NR Description: P0451D05.26 [Oryza sativa (japonica
  misc_feature (1)..(16): Homolog of NCBI NO: 22298700 NR Description: ORF_ID:tlr1157~hypothetical protein
  misc_feature (1)..(15): Homolog of NCBI NO: 16080463 NR Description: similar to hydrolase [Bacillus subtilis]
  misc_feature (1)..(27): Homolog of NCBI NO: 22987307 NR Description: hypothetical protein [Burkholderia fungorum]
MIGILASIRRPELFAKARPHRRVAQVPERPRLPRRVRAAGDPAGVRRDGGQLLGVGDRVRPAGGWRGRARGGAGVQPHALQHAAGHLAPRLPHRVQHGPPRRAGHGARPLRGGADHPRRLRPGLRRRLPQGPPRRPHRRRVPPDRGPPPAPQRPRPPRPGAPPRARPVLAAGPARPVFTASIYPCRDRESRNGATRAVCCV

SEQ ID NO: 5243 - DNA, 1227 bp, Zea mays subsp. mays
  misc_feature (1)..(1227): Ceres Seq. ID no. 12409649
  misc_feature: MA Experiment ID: 108504 Result: Down-regulated in Transcription
  misc_feature: MA Experiment 108504 PARAMETER Experiment Name: Zm_Drought_P Parameter: Age (day) Value: 8
  misc_feature: MA Experiment 108504 PARAMETER Experiment Name: Zm_Drought_P Parameter: Organism Value: Zea mays
  misc_feature: MA Experiment 108504 PARAMETER Experiment Name: Zm_Drought_P Parameter: Plant Line Value: 35A19
  misc_feature: MA Experiment 108504 PARAMETER Experiment Name: Zm_Drought_P Parameter: Timepoint (hr) Value: 12
  misc_feature: MA Experiment 108504 PARAMETER Experiment Name: Zm_Drought_P Parameter: Tissue Value: Aerial
  misc_feature: MA Experiment 108504 PARAMETER Experiment Name: Zm_Drought_P Parameter: Treatment Value: Drought vs. No Drought
  misc_feature: MA Experiment ID: 108523 Result: Down-regulated in Transcription
  misc_feature: MA Experiment 108523 PARAMETER Experiment Name: Zm_42deg_Heat_P Parameter: Age (day) Value: 8
  misc_feature: MA Experiment 108523 PARAMETER Experiment Name: Zm_42deg_Heat_P Parameter: Organism Value: Zea mays
  misc_feature: MA Experiment 108523 PARAMETER Experiment Name: Zm_42deg_Heat_P Parameter: Plant Line Value: 35A19
  misc_feature: MA Experiment 108523 PARAMETER Experiment Name: Zm_42deg_Heat_P Parameter: Temperature (deg C) Value: 42 vs. 22
  misc_feature: MA Experiment 108523 PARAMETER Experiment Name: Zm_42deg_Heat_P Parameter: Timepoint (hr) Value: 6
  misc_feature: MA Experiment 108523 PARAMETER Experiment Name: Zm_42deg_Heat_P Parameter: Tissue Value: Aerial
  misc_feature: MA Experiment ID: 108527 Result: Down-regulated in Transcription
  misc_feature: MA Experiment 108527 PARAMETER Experiment Name: Zm_5mM_NO_P Parameter: Age (day) Value: 8
  misc_feature: MA Experiment 108527 PARAMETER Experiment Name: Zm_5mM_NO_P Parameter: Organism Value: Zea mays
  misc_feature: MA Experiment 108527 PARAMETER Experiment Name: Zm_5mM_NO_P Parameter: Plant Line Value: 35A19
  misc_feature: MA Experiment 108527 PARAMETER Experiment Name: Zm_5mM_NO_P Parameter: Timepoint (hr) Value: 6
  misc_feature: MA Experiment 108527 PARAMETER Experiment Name: Zm_5mM_NO_P Parameter: Tissue Value: Aerial
  misc_feature: MA Experiment 108527 PARAMETER Experiment Name: Zm_5mM_NO_P Parameter: Treatment Value: 5mM NO vs. No Treatment
  misc_feature: MA Experiment ID: 108529 Result: Up-regulated in Transcription
  misc_feature: MA Experiment 108529 PARAMETER Experiment Name: Zm_Imbibed_Seeds_P Parameter: Age (day) Value: 5 vs. 2
  misc_feature: MA Experiment 108529 PARAMETER Experiment Name: Zm_Imbibed_Seeds_P Parameter: Organism Value: Zea mays
  misc_feature: MA Experiment 108529 PARAMETER Experiment Name: Zm_Imbibed_Seeds_P Parameter: Plant Line Value: 35A19
  misc_feature: MA Experiment 108529 PARAMETER Experiment Name: Zm_Imbibed_Seeds_P Parameter: Tissue Value: Roots vs. Embryo
  misc_feature: MA Experiment ID: 108536 Result: Down-regulated in Transcription
  misc_feature: MA Experiment 108536 PARAMETER Experiment Name: Zm_Meristem_P Parameter: Age (day) Value: 8
  misc_feature: MA Experiment 108536 PARAMETER Experiment Name: Zm_Meristem_P Parameter: Organism Value: Zea mays
  misc_feature: MA Experiment 108536 PARAMETER Experiment Name: Zm_Meristem_P Parameter: Plant Line Value: 35A19
  misc_feature: MA Experiment 108536 PARAMETER Experiment Name: Zm_Meristem_P Parameter: Tissue Value: Shoot Meristem vs. Above Shoot Meristem
  misc_feature: MA Experiment ID: 108540 Result: Down-regulated in Transcription
  misc_feature: MA Experiment 108540 PARAMETER Experiment Name: Zm_20percent_PEG_P Parameter: Age (day) Value: 8
  misc_feature: MA Experiment 108540 PARAMETER Experiment Name: Zm_20percent_PEG_P Parameter: Organism Value: Zea mays
  misc_feature: MA Experiment 108540 PARAMETER Experiment Name: Zm_20percent_PEG_P Parameter: Plant Line Value: 35A19
  misc_feature: MA Experiment 108540 PARAMETER Experiment Name: Zm_20percent_PEG_P Parameter: Timepoint (hr) Value: 6
  misc_feature: MA Experiment 108540 PARAMETER Experiment Name: Zm_20percent_PEG_P Parameter: Tissue Value: Aerial
  misc_feature: MA Experiment 108540 PARAMETER Experiment Name: Zm_20percent_PEG_P Parameter: Treatment Value: 20percent PEG vs. No Treatment
  misc_feature: MA Experiment ID: 108543 Result: Up-regulated in Transcription
  misc_feature: MA Experiment ID: 108544 Result: Down-regulated in Transcription
  misc_feature: MA Experiment ID: 108559 Result: Down-regulated in Transcription
  misc_feature: MA Experiment 108559 PARAMETER Experiment Name: Zm_5mM_NO_P Parameter: Age (day) Value: 8
  misc_feature: MA Experiment 108559 PARAMETER Experiment Name: Zm_5mM_NO_P Parameter: Organism Value: Zea mays
  misc_feature: MA Experiment 108559 PARAMETER Experiment Name: Zm_5mM_NO_P Parameter: Plant Line Value: 35A19
  misc_feature: MA Experiment 108559 PARAMETER Experiment Name: Zm_5mM_NO_P Parameter: Timepoint (hr) Value: 12
  misc_feature: MA Experiment 108559 PARAMETER Experiment Name: Zm_5mM_NO_P Parameter: Tissue Value: Aerial
  misc_feature: MA Experiment 108559 PARAMETER Experiment Name: Zm_5mM_NO_P Parameter: Treatment Value: 5mM NO vs. No Treatment
  misc_feature: MA Experiment ID: 108597 Result: Down-regulated in Transcription
  misc_feature: MA Experiment 108597 PARAMETER Experiment Name: Zm_100uM_ABA_P Parameter: Age (day) Value: 9
  misc_feature: MA Experiment 108597 PARAMETER Experiment Name: Zm_100uM_ABA_P Parameter: Organism Value: Zea mays
  misc_feature: MA Experiment 108597 PARAMETER Experiment Name: Zm_100uM_ABA_P Parameter: Plant Line Value: 35A19
  misc_feature: MA Experiment 108597 PARAMETER Experiment Name: Zm_100uM_ABA_P Parameter: Timepoint (hr) Value: 24
  misc_feature: MA Experiment 108597 PARAMETER Experiment Name: Zm_100uM_ABA_P Parameter: Tissue Value: Aerial
  misc_feature: MA Experiment 108597 PARAMETER Experiment Name: Zm_100uM_ABA_P Parameter: Treatment Value: 100uM ABA vs. No Treatment
  misc_feature: MA Experiment ID: 108689 Result: Down-regulated in Transcription
  misc_feature: MA Experiment 108689 PARAMETER Experiment Name: Zm_Drought_Roots_P Parameter: Age (day) Value: 9
  misc_feature: MA Experiment 108689 PARAMETER Experiment Name: Zm_Drought_Roots_P Parameter: Organism Value: Zea mays
  misc_feature: MA Experiment 108689 PARAMETER Experiment Name: Zm_Drought_Roots_P Parameter: Plant Line Value: 35A19
  misc_feature: MA Experiment 108689 PARAMETER Experiment Name: Zm_Drought_Roots_P Parameter: Timepoint (hr) Value: 24
  misc_feature: MA Experiment 108689 PARAMETER Experiment Name: Zm_Drought_Roots_P Parameter: Tissue Value: Roots
  misc_feature: MA Experiment 108689 PARAMETER Experiment Name: Zm_Drought_Roots_P Parameter: Treatment Value: Drought vs. No Drought
  misc_feature: MA Experiment ID: 20000477 Result: Down-regulated in Transcription
  misc_feature: MA Experiment 20000477 PARAMETER Experiment Name: Zm_5mM_SA_P Parameter: Age (day) Value: 10
  misc_feature: MA Experiment 20000477 PARAMETER Experiment Name: Zm_5mM_SA_P Parameter: Organism Value: Zea mays
  misc_feature: MA Experiment 20000477 PARAMETER Experiment Name: Zm_5mM_SA_P Parameter: Plant Line Value: 35A19
  misc_feature: MA Experiment 20000477 PARAMETER Experiment Name: Zm_5mM_SA_P Parameter: Timepoint (hr) Value: 48
  misc_feature: MA Experiment 20000477 PARAMETER Experiment Name: Zm_5mM_SA_P Parameter: Tissue Value: Aerial
  misc_feature: MA Experiment 20000477 PARAMETER Experiment Name: Zm_5mM_SA_P Parameter: Treatment Value: 5mM SA vs. No Treatment
  misc_feature: MA Experiment ID: 20000478 Result: Down-regulated in Transcription
  misc_feature: MA Experiment 20000478 PARAMETER Experiment Name: Zm_5mM_SA_P Parameter: Age (day) Value: 11
  misc_feature: MA Experiment 20000478 PARAMETER Experiment Name: Zm_5mM_SA_P Parameter: Organism Value: Zea mays
  misc_feature: MA Experiment 20000478 PARAMETER Experiment Name: Zm_5mM_SA_P Parameter: Plant Line Value: 35A19
  misc_feature: MA Experiment 20000478 PARAMETER Experiment Name: Zm_5mM_SA_P Parameter: Timepoint (hr) Value: 72
  misc_feature: MA Experiment 20000478 PARAMETER Experiment Name: Zm_5mM_SA_P Parameter: Tissue Value: Aerial
  misc_feature: MA Experiment 20000478 PARAMETER Experiment Name: Zm_5mM_SA_P Parameter: Treatment Value: 5mM SA vs. No Treatment
  misc_feature: MA Experiment ID: 20000480 Result: Down-regulated in Transcription
  misc_feature: MA Experiment 20000480 PARAMETER Experiment Name: Zm_Drought_P Parameter: Age (day) Value: 11
  misc_feature: MA Experiment 20000480 PARAMETER Experiment Name: Zm_Drought_P Parameter: Organism Value: Zea mays
  misc_feature: MA Experiment 20000480 PARAMETER Experiment Name: Zm_Drought_P Parameter: Plant Line Value: 35A19
  misc_feature: MA Experiment 20000480 PARAMETER Experiment Name: Zm_Drought_P Parameter: Timepoint (hr) Value: 72
  misc_feature: MA Experiment 20000480 PARAMETER Experiment Name: Zm_Drought_P Parameter: Tissue Value: Aerial
  misc_feature: MA Experiment 20000480 PARAMETER Experiment Name: Zm_Drought_P Parameter: Treatment Value: Drought vs. No Drought
  misc_feature: MA Experiment ID: 20001608 Result: Down-regulated in Transcription
  misc_feature: MA Experiment 20001608 PARAMETER Experiment Name: Zm_50ppm_KNO3_L-to-H_P Parameter: Age (day) Value: 21
  misc_feature: MA Experiment 20001608 PARAMETER Experiment Name: Zm_50ppm_KNO3_L-to-H_P Parameter: Organism Value: Zea mays
  misc_feature: MA Experiment 20001608 PARAMETER Experiment Name: Zm_50ppm_KNO3_L-to-H_P Parameter: Plant Line Value: 35A19
  misc_feature: MA Experiment 20001608 PARAMETER Experiment Name: Zm_50ppm_KNO3_L-to-H_P Parameter: Timepoint (hr) Value: 48
  misc_feature: MA Experiment 20001608 PARAMETER Experiment Name: Zm_50ppm_KNO3_L-to-H_P Parameter: Tissue Value: Shoots
  misc_feature: MA Experiment 20001608 PARAMETER Experiment Name: Zm_50ppm_KNO3_L-to-H_P Parameter: Treatment Value: 50ppm KNO3 vs. 50ppm KCl
actacctcaggctgcttgaagtagtatgcatcagcggccctggtcctctctcccgctcccgctcaagggcagcagagaaagcagctgagcgctgactgtggatctcatccgtatcgcgtatatacgtcgtcctgtttggatccaccgcgttttgctaattcccttcgaaccggccggtggccttcgttctcccaccaggcctgtctgtctgctgtatccgccagagcttccatggattccaccctcttcatcatcggcgtcataggcaacatcatctcagttctcgtcttcatatcgcctatcaagacgttctggaggatcgtgcggggcgggacgacggaggagttcgagccggcgccgtacgtgttgacgctgctcaacgcgctgctgtggctctactacggcctcaccaagcccgacggcttcctcgtcgccaccgtcaatggctttggggctgtcatggaggccatctacgtcgtcctcttcatcgtctacgccgccaaccatgccacaagggttaagaccgcaaagctggcagcagcgttggacatcggtggcttcggagtcgtgtttgcggccaccacattcgccatcagtgaatttgaattgagaattatggtgataggaatgatatgtgcctgcctcaatgtgctcatgtacgggtcaccccttgcttctatgaaaacggtgatcacgacaaagagcgtggagttcatgccattcttcctgtccttcttcctcttcctcaacggaggcgtctgggcaacgtacgcggtgcttgaccgcgacatcttcctcgggatccccaatgggataggcttcgtgcttggcaccatccagctgatcgtctacgcgatctacatgaacagcaaggcctcccaatgcagcaaggaaacagcgtcctcgcctcttctgatggcctccgaccggggagaagcatctagccatgtctgatgatgagcttcgatcagtgcgcgcgctggagtatagcatagaagtctcttgctgtcaaaaacttcccagaccaacggtacctaccagcatgcatgcatgcaagaggttaccaatttttattgtttgaaaattcatgtaaaacttgtgacctccatggattgtttctttctttggtataagcttccaagatgttagattattagcacgatagttttgccagagaaggatgttgtcaatataatgaagaaatggtgaaaatccatacctttgatt

SEQ ID NO: 5244 - protein, 240 aa, Zea mays subsp. mays
  peptide (1)..(240): Ceres Seq. ID no. 12409650
  misc_feature (130)..(212): Pfam Name: MtN3/saliva family Pfam Description: MtN3/saliva family
  misc_feature (1)..(214): Homolog of NCBI NO: 27754697 NR Description: putative cytochrome c oxidoreductase [Arabidopsis
  misc_feature (1)..(214): Homolog of NCBI NO: 30683457 NR Description: nodulin MtN3 family protein [Arabidopsis thaliana]
  misc_feature (6)..(214): Homolog of NCBI NO: 30684193 NR Description: nodulin MtN3 family protein [Arabidopsis thaliana]
  misc_feature (1)..(221): Homolog of NCBI NO: 1619602 NR Description: MtN3 [Medicago truncatula]
  misc_feature (6)..(239): Homolog of NCBI NO: 15240040 NR Description: senescence-associated protein (SAG29); protein At5g13170.1, supported by cDNA: 38843., supported by cDNA:
  misc_feature (6)..(239): Homolog of NCBI NO: 21593422 NR Description: senescence-associated protein (SAG29)
  misc_feature (2)..(213): Homolog of NCBI NO: 14715258 NR Description: N3 like protein [Medicago truncatula]
  misc_feature (6)..(214): Homolog of NCBI NO: 15237803 NR Description: MtN3-like protein; protein id: At5g23660.1, by cDNA: gi_15982722, supported by cDNA: gi_16323439, supported
  misc_feature (1)..(238): Homolog of NCBI NO: 34912462 NR Description: MtN3-like protein [Oryza sativa (japonica
  misc_feature (7)..(221): Homolog of NCBI NO: 18413388 NR Description: putative protein; protein id: At4g10850.1, by cDNA: 33161. [Arabidopsis thaliana] contains similarity to Medicago truncatula MtN3 (GB:Y08726)
MDSTLFIIGVIGNIISVLVFISPIKTFWRIVRGGTTEEFEPAPYVLTLLNALLWLYYGLTKPDGFLVATVNGFGAVMEAIYVVLFIVYAANHATRVKTAKLAAALDIGGFGVVFAATTFAISEFELRIMVIGMICACLNVLMYGSPLASMKTVITTKSVEFMPFFLSFFLFLNGGVWATYAVLDRDIFLGIPNGIGFVLGTIQLIVYAIYMNSKASQCSKETASSPLLMASDRGEASSHV

SEQ ID NO: 5245 - protein, 164 aa, Zea mays subsp. mays
  peptide (1)..(164): Ceres Seq. ID no. 12409651
  misc_feature (54)..(136): Pfam Name: MtN3/saliva family Pfam Description: MtN3/saliva family
  misc_feature (1)..(138): Homolog of NCBI NO: 27754697 NR Description: putative cytochrome c oxidoreductase [Arabidopsis
  misc_feature (1)..(138): Homolog of NCBI NO: 30683457 NR Description: nodulin MtN3 family protein [Arabidopsis thaliana]
  misc_feature (1)..(138): Homolog of NCBI NO: 30684193 NR Description: nodulin MtN3 family protein [Arabidopsis thaliana]
  misc_feature (1)..(145): Homolog of NCBI NO: 1619602 NR Description: MtN3 [Medicago truncatula]
  misc_feature (1)..(163): Homolog of NCBI NO: 15240040 NR Description: senescence-associated protein (SAG29); protein At5g13170.1, supported by cDNA: 38843., supported by cDNA:
  misc_feature (1)..(163): Homolog of NCBI NO: 21593422 NR Description: senescence-associated protein (SAG29)
  misc_feature (1)..(137): Homolog of NCBI NO: 14715258 NR Description: N3 like protein [Medicago truncatula]
  misc_feature (1)..(138): Homolog of NCBI NO: 15237803 NR Description: MtN3-like protein; protein id: At5g23660.1, by cDNA: gi_15982722, supported by cDNA: gi_16323439, supported
  misc_feature (1)..(162): Homolog of NCBI NO: 34912462 NR Description: MtN3-like protein [Oryza sativa (japonica
  misc_feature (1)..(145): Homolog of NCBI NO: 18413388 NR Description: putative protein; protein id: At4g10850.1, by cDNA: 33161. [Arabidopsis thaliana] contains similarity to Medicago truncatula MtN3 (GB:Y08726)
MEAIYVVLFIVYAANHATRVKTAKLAAALDIGGFGVVFAATTFAISEFELRIMVIGMICACLNVLMYGSPLASMKTVITTKSVEFMPFFLSFFLFLNGGVWATYAVLDRDIFLGIPNGIGFVLGTIQLIVYAIYMNSKASQCSKETASSPLLMASDRGEASSHV

SEQ ID NO: 5246 - DNA, 1718 bp, Zea mays subsp. mays
  misc_feature (1)..(1718): Ceres Seq. ID no. 12409645
  misc_feature: MA Experiment ID: 108535 Result: Up-regulated in Transcription
  misc_feature: MA Experiment 108535 PARAMETER Experiment Name: Zm_Meristem_P Parameter: Age (day) Value: 8
  misc_feature: MA Experiment 108535 PARAMETER Experiment Name: Zm_Meristem_P Parameter: Organism Value: Zea mays
  misc_feature: MA Experiment 108535 PARAMETER Experiment Name: Zm_Meristem_P Parameter: Plant Line Value: 35A19
  misc_feature: MA Experiment 108535 PARAMETER Experiment Name: Zm_Meristem_P Parameter: Tissue Value: Root Meristem vs. Above Root Meristem
attcagcagcaccggcggcaccccgcagtcccggcgtcccgcacccacgccctacaggcagaccaagcaaatggcgatctcgatctcgcaggaggccttcgactccatggtccgggagaacatggaggacctcggcatggaccccgatgaggccctcgctgacgccgttgaggcgctcaccctccagggcgccgatctctcaggtatcgttaagcgcgtgccgggagaggccaccgcggcggaggtgagcccggtggtgcgggttctggacgaactgaaggcctctctcagcgccagcggcggggtcggagcaggatctcgacggactcgtctctctgttcgatgagttgcgcaatctgtgctgctccggcgagggttcggagaatgcagcgatcgcggtacggaatggcgtcgtggaggcgctcgtcgccctgtgcgcgtccgctcgggtcgagcaggagaggttgcttgcttcggccttgaagagtctgagctccgtactccgtgatgtggcaagcactgaaaagttcagacgaagtgagggacccaaaattgtcatggatctcttgcaaggaggctcagaaaattcagatttattggatgctggatttagtgttgtggcagcaggttctgctggcaatgaagttgtgaaagagtcctttatggacctgaaggtcgatgaactcattctgcgggttatgaaggataaatcaaaatctaatgtgcaaagtttgtatgatgccatacgtgttctgttgaaacctgatgacaaccgagtggtagcttctcaggtatatggatactcccggagatttgctgaaatcggggttgcagaagttcttgtcaatgcacttcgtgagcaagtcgctccttccagtttgccatctgcttgtgctgctttaaagtcgattgcagtcaatgatgaaatatgccgttccatatctgaaaatggtggaattgatgtgcttcttcaatgcatcgacgaggcaggtgagcagaagaacaaagttgtagcaagatcttgctgctctttgttgtccaagcttgctgcaagcgatgcaaacaagtccattatcattcagcgaggtggttttgataggttcctaaagttgacatccagattttctgaagatcctgctataattcaagaggttatgtctatggtgacggtcctcacactgaggtcaccagaaaatgcagcacgtgcaatggaagaaggctatgggacactggctatacagtcaatgcaaaggttcccctcctccgggcagactcagaagcaagcatgccttatgattcgcaatcttgttgcccgaaaccctgagaacaggaccgtcctgcttaatgatggtgcagaaaagcttattagaaaggccatggccctgcacggaagctgtaaagatgctgcctcgtctgccttgagggacctgggcctcgacaactacaatgcatagacaccagtgaccagtcacaccatagaaagtgtgcgtcgagttagtttggtcgcggtagaatgttttggaggagaaatacattgtgagttatcgaggtgccgcactgaaatgagtttgtagaattgcgctactgtggttgcatcaatggtttcagtttgttgggcaatcaaacttcagggctattaggttgtctccggtaaatcttacatatgatcatacaatttttttttacagagtgaagtttaaaataggaaatgtttcaag

SEQ ID NO: 5247 - protein, 298 aa, Zea mays subsp. mays
  peptide (1)..(298): Ceres Seq. ID no. 12409646
  misc_feature (1)..(297): Homolog of NCBI NO: 18418335 NR Description: putative protein; protein id: At4g33945.1, by cDNA: gi_20466737 [Arabidopsis thaliana]
  misc_feature (1)..(297): Homolog of NCBI NO: 7485612 NR Description: hypothetical protein F17I5.130 - Arabidopsis >gi|3297818|emb|CAA19876.1| putative protein [Arabidopsis >gi|7270343|emb|CAB80111.1| putative protein [Arabidopsis
  misc_feature (1)..(292): Homolog of NCBI NO: 29789345 NR Description: arginine/serine-rich 14 splicing factor [Mus >gi|26349233|dbj|BAC38256.1| unnamed protein product [Mus
  misc_feature (1)..(292): Homolog of NCBI NO: 26348633 NR Description: unnamed protein product [Mus musculus] Unknown (protein for MGC:57975) [Mus musculus]
  misc_feature (1)..(292): Homolog of NCBI NO: 26340074 NR Description: unnamed protein product [Mus musculus]
  misc_feature (1)..(292): Homolog of NCBI NO: 34877647 NR Description: similar to hypothetical gene MGC19595 [Rattus
  misc_feature (1)..(292): Homolog of NCBI NO: 15529984 NR Description: hypothetical gene MGC19595 [Homo sapiens]
  misc_feature (1)..(292): Homolog of NCBI NO: 4106984 NR Description: R30923_1 [Homo sapiens]
  misc_feature (62)..(292): Homolog of NCBI NO: 13543170 NR Description: Unknown (protein for IMAGE:3601378) [Mus musculus]
  misc_feature (62)..(292): Homolog of NCBI NO: 20988329 NR Description: Unknown (protein for IMAGE:1364175) [Mus musculus]
MDLLQGGSENSDLLDAGFSVVAAGSAGNEVVKESFMDLKVDELILRVMKDKSKSNVQSLYDAIRVLLKPDDNRVVASQVYGYSRRFAEIGVAEVLVNALREQVAPSSLPSACAALKSIAVNDEICRSISENGGIDVLLQCIDEAGEQKNKVVARSCCSLLSKLAASDANKSIIIQRGGFDRFLKLTSRFSEDPAIIQEVMSMVTVLTLRSPENAARAMEEGYGTLAIQSMQRFPSSGQTQKQACLMIRNLVARNPENRTVLLNDGAEKLIRKAMALHGSCKDAASSALRDLGLDNYNA

SEQ ID NO: 5248 - protein, 263 aa, Zea mays subsp. mays
  peptide (1)..(263): Ceres Seq. ID no. 12409647
  misc_feature (1)..(262): Homolog of NCBI NO: 18418335 NR Description: putative protein; protein id: At4g33945.1, by cDNA: gi_20466737 [Arabidopsis thaliana]
  misc_feature (1)..(262): Homolog of NCBI NO: 7485612 NR Description: hypothetical protein F17I5.130 - Arabidopsis >gi|3297818|emb|CAA19876.1| putative protein [Arabidopsis >gi|7270343|emb|CAB80111.1| putative protein [Arabidopsis
  misc_feature (1)..(257): Homolog of NCBI NO: 29789345 NR Description: arginine/serine-rich 14 splicing factor [Mus >gi|26349233|dbj|BAC38256.1| unnamed protein product [Mus
  misc_feature (1)..(257): Homolog of NCBI NO: 26348633 NR Description: unnamed protein product [Mus musculus] Unknown (protein for MGC:57975) [Mus musculus]
  misc_feature (1)..(257): Homolog of NCBI NO: 26340074 NR Description: unnamed protein product [Mus musculus]
  misc_feature (1)..(257): Homolog of NCBI NO: 34877647 NR Description: similar to hypothetical gene MGC19595 [Rattus
  misc_feature (1)..(257): Homolog of NCBI NO: 15529984 NR Description: hypothetical gene MGC19595 [Homo sapiens]
  misc_feature (1)..(257): Homolog of NCBI NO: 4106984 NR Description: R30923_1 [Homo sapiens]
  misc_feature (27)..(257): Homolog of NCBI NO: 13543170 NR Description: Unknown (protein for IMAGE:3601378) [Mus musculus]
  misc_feature (27)..(257): Homolog of NCBI NO: 20988329 NR Description: Unknown (protein for IMAGE:1364175) [Mus musculus]
MDLKVDELILRVMKDKSKSNVQSLYDAIRVLLKPDDNRVVASQVYGYSRRFAEIGVAEVLVNALREQVAPSSLPSACAALKSIAVNDEICRSISENGGIDVLLQCIDEAGEQKNKVVARSCCSLLSKLAASDANKSIIIQRGGFDRFLKLTSRFSEDPAIIQEVMSMVTVLTLRSPENAARAMEEGYGTLAIQSMQRFPSSGQTQKQACLMIRNLVARNPENRTVLLNDGAEKLIRKAMALHGSCKDAASSALRDLGLDNYNA

SEQ ID NO: 5249 - protein, 251 aa, Zea mays subsp. mays
  peptide (1)..(251): Ceres Seq. ID no. 12409648
  misc_feature (1)..(250): Homolog of NCBI NO: 18418335 NR Description: putative protein; protein id: At4g33945.1, by cDNA: gi_20466737 [Arabidopsis thaliana]
  misc_feature (1)..(250): Homolog of NCBI NO: 7485612 NR Description: hypothetical protein F17I5.130 - Arabidopsis >gi|3297818|emb|CAA19876.1| putative protein [Arabidopsis >gi|7270343|emb|CAB80111.1| putative protein [Arabidopsis
  misc_feature (1)..(245): Homolog of NCBI NO: 29789345 NR Description: arginine/serine-rich 14 splicing factor [Mus >gi|26349233|dbj|BAC38256.1| unnamed protein product [Mus
  misc_feature (1)..(245): Homolog of NCBI NO: 26348633 NR Description: unnamed protein product [Mus musculus] Unknown (protein for MGC:57975) [Mus musculus]
  misc_feature (1)..(245): Homolog of NCBI NO: 26340074 NR Description: unnamed protein product [Mus musculus]
  misc_feature (1)..(245): Homolog of NCBI NO: 34877647 NR Description: similar to hypothetical gene MGC19595 [Rattus
  misc_feature (1)..(245): Homolog of NCBI NO: 15529984 NR Description: hypothetical gene MGC19595 [Homo sapiens]
  misc_feature (1)..(245): Homolog of NCBI NO: 4106984 NR Description: R30923_1 [Homo sapiens]
  misc_feature (15)..(245): Homolog of NCBI NO: 13543170 NR Description: Unknown (protein for IMAGE:3601378) [Mus musculus]
  misc_feature (15)..(245): Homolog of NCBI NO: 20988329 NR Description: Unknown (protein for IMAGE:1364175) [Mus musculus]
MKDKSKSNVQSLYDAIRVLLKPDDNRVVASQVYGYSRRFAEIGVAEVLVNALREQVAPSSLPSACAALKSIAVNDEICRSISENGGIDVLLQCIDEAGEQKNKVVARSCCSLLSKLAASDANKSIIIQRGGFDRFLKLTSRFSEDPAIIQEVMSMVTVLTLRSPENAARAMEEGYGTLAIQSMQRFPSSGQTQKQACLMIRNLVARNPENRTVLLNDGAEKLIRKAMALHGSCKDAASSALRDLGLDNYNA

SEQ ID NO: 5250 - DNA, 1636 bp, Zea mays subsp. mays
  misc_feature (1)..(1636): Ceres Seq. ID no. 13498765
  misc_feature: MA Experiment ID: 108556 Result: Up-regulated in Transcription
  misc_feature: MA Experiment 108556 PARAMETER Experiment Name: Zm_Drought_P Parameter: Age (day) Value: 9
  misc_feature: MA Experiment 108556 PARAMETER Experiment Name: Zm_Drought_P Parameter: Organism Value: Zea mays
  misc_feature: MA Experiment 108556 PARAMETER Experiment Name: Zm_Drought_P Parameter: Plant Line Value: 35A19
  misc_feature: MA Experiment 108556 PARAMETER Experiment Name: Zm_Drought_P Parameter: Timepoint (hr) Value: 24
  misc_feature: MA Experiment 108556 PARAMETER Experiment Name: Zm_Drought_P Parameter: Tissue Value: Aerial
  misc_feature: MA Experiment 108556 PARAMETER Experiment Name: Zm_Drought_P Parameter: Treatment Value: Drought vs. No Drought
  misc_feature: MA Experiment ID: 108687 Result: Down-regulated in Transcription
  misc_feature: MA Experiment 108687 PARAMETER Experiment Name: Zm_Embryos-Flowers__P Parameter: Tissue Value: Embryo vs. Aerial+
  misc_feature: MA Experiment ID: 20000478 Result: Up-regulated in Transcription
  misc_feature: MA Experiment 20000478 PARAMETER Experiment Name: Zm_5mM_SA_P Parameter: Age (day) Value: 11
  misc_feature: MA Experiment 20000478 PARAMETER Experiment Name: Zm_5mM_SA_P Parameter: Organism Value: Zea mays
  misc_feature: MA Experiment 20000478 PARAMETER Experiment Name: Zm_5mM_SA_P Parameter: Plant Line Value: 35A19
  misc_feature: MA Experiment 20000478 PARAMETER Experiment Name: Zm_5mM_SA_P Parameter: Timepoint (hr) Value: 72
  misc_feature: MA Experiment 20000478 PARAMETER Experiment Name: Zm_5mM_SA_P Parameter: Tissue Value: Aerial
  misc_feature: MA Experiment 20000478 PARAMETER Experiment Name: Zm_5mM_SA_P Parameter: Treatment Value: 5mM SA vs. No Treatment
  misc_feature: MA Experiment ID: 20000479 Result: Up-regulated in Transcription
  misc_feature: MA Experiment 20000479 PARAMETER Experiment Name: Zm_Drought_P Parameter: Age (day) Value: 10
  misc_feature: MA Experiment 20000479 PARAMETER Experiment Name: Zm_Drought_P Parameter: Organism Value: Zea mays
  misc_feature: MA Experiment 20000479 PARAMETER Experiment Name: Zm_Drought_P Parameter: Plant Line Value: 35A19
  misc_feature: MA Experiment 20000479 PARAMETER Experiment Name: Zm_Drought_P Parameter: Timepoint (hr) Value: 48
  misc_feature: MA Experiment 20000479 PARAMETER Experiment Name: Zm_Drought_P Parameter: Tissue Value: Aerial
  misc_feature: MA Experiment 20000479 PARAMETER Experiment Name: Zm_Drought_P Parameter: Treatment Value: Drought vs. No Drought
  misc_feature: MA Experiment ID: 20000480 Result: Up-regulated in Transcription
  misc_feature: MA Experiment 20000480 PARAMETER Experiment Name: Zm_Drought_P Parameter: Age (day) Value: 11
  misc_feature: MA Experiment 20000480 PARAMETER Experiment Name: Zm_Drought_P Parameter: Organism Value: Zea mays
  misc_feature: MA Experiment 20000480 PARAMETER Experiment Name: Zm_Drought_P Parameter: Plant Line Value: 35A19
  misc_feature: MA Experiment 20000480 PARAMETER Experiment Name: Zm_Drought_P Parameter: Timepoint (hr) Value: 72
  misc_feature: MA Experiment 20000480 PARAMETER Experiment Name: Zm_Drought_P Parameter: Tissue Value: Aerial
  misc_feature: MA Experiment 20000480 PARAMETER Experiment Name: Zm_Drought_P Parameter: Treatment Value: Drought vs. No Drought
acacatttttacccctcgcggcggccccaccgaccgccggggcgcagcggcgtcgccgcgggcaacgccgtcacgtcacgtgcatcacgacaatctcctcctccgcctcgtcttcctgccaggccgcgggagcaccagcccagcggcagatcagtcgacgcgggcgattccagggtttagagaggagcggagatggtgaaggtcatccaggggcgcccggccgagatggggttccggatgccggcggagtgggagccgcacgagcagtgctggatgggatggcctgagcgtccagataactggagggagaatgctggtccagctcaagaggtatttgctagaactgcaattgccatttcaaagtttgaacccgtcacgttatgtgcaagtgccaagcagtaccccaaagtccacgagctgatggaacatgaaaccaacatcagggtcgttgagatgagcatgaacgattcctggttccgcgacatgggccccacttttgtcactcataaaggggattcaggaattgcagaacaaacaatagcaggaattgattggcaattcaatgcctggggaggaatctatgacgactggagtcttgacagcgatgttgccaagaaaatagtcgagatcgagaggatccctaggtttccccaaaaaattatccttgagggtggaagcattcatgtagatggagaaggtacatgcattacaacggaagaatgcttgctgaatcctaataggaaccccaacatgaccaaactagagatagagaatgagctgaaggattttcttggagtctcgaaggtcatctggatacctcgtggactttatggtgacgaggatacaaacggccacgttgacaacctgtgctgcttcatcaaacccggtgtgatcctgctgtcgtggaccgacgacgagaaggaccatcagtacgaacggtcggtcgaggcgctgtctgttctctcccagtccgtcgacgcgaaagggcggcagctccaagtggtgaagatccacgtccccgggcctctgtacatgacagaggaagaggcacagggcgttgtttcatcggggcattctgtaccgaggccagcgggcacgaggttggccgcctcgtacgtcaacttctacatcgccaatggggggatcatagcgccttccttcggtgacaggtgggacgaggaggcgtatgcggttctccagaaggcgtttcctgatcacgaggtggtgatggtcgaaggcggacgggagatcgcgctgggaggtgggaacattcactgcatcacgcagcagcagcccgtgcgcccgtcctaggtgaaaccggcgtcgacgcgaagcgatgaagagtatgctgctcctgtgtttaagcaggtgggttggtcccctgtcgttattacgctcaccaatacgcgcgcgaaataagccgtaggtacaagttccttgacaaatactgtatgagtactattaggccttgttggtgggtcggaacgattcctaaccgaattgtttatctaatttatataaattttgattagctggaacgattccgggtgtaatccgatagaaacgaacaaggccttatactatacggcacaaatgccacagtcgtggatcaaaatggtactagttcctgtctacg

SEQ ID NO: 5251 - protein, 372 aa, Zea mays subsp. mays
  peptide (1)..(372): Ceres Seq. ID no. 13498766
  misc_feature (14)..(368): Pfam Name: Porphyromonas-type peptidyl-arginine deiminase Pfam Description: Porphyromonas-type peptidyl-arginine deiminase
  misc_feature (5)..(348): Homolog of NCBI NO: 38606518 NR Description: OSJNBa0016O02.3 [Oryza sativa (japonica
  misc_feature (9)..(372): Homolog of NCBI NO: 15241536 NR Description: expressed protein [Arabidopsis thaliana]
  misc_feature (9)..(372): Homolog of NCBI NO: 26452202 NR Description: unknown protein [Arabidopsis thaliana]
  misc_feature (9)..(372): Homolog of NCBI NO: 14289303 NR Description: hypothetical protein [Arabidopsis thaliana]
  misc_feature (9)..(368): Homolog of NCBI NO: 15595489 NR Description: conserved hypothetical protein [Pseudomonas
  misc_feature (5)..(368): Homolog of NCBI NO: 23472721 NR Description: hypothetical protein [Pseudomonas syringae pv.
  misc_feature (5)..(368): Homolog of NCBI NO: 28872501 NR Description: conserved hypothetical protein [Pseudomonas pv. tomato str. DC3000] >gi|28855756|gb|AAO58815.1| conserved
  misc_feature (1)..(368): Homolog of NCBI NO: 23105724 NR Description: hypothetical protein [Azotobacter vinelandii]
  misc_feature (2)..(368): Homolog of NCBI NO: 26987008 NR Description: conserved hypothetical protein [Pseudomonas KT2440] >gi|24981625|gb|AAN65897.1|AE016217_9 conserved
  misc_feature (5)..(368): Homolog of NCBI NO: 23061592 NR Description: hypothetical protein [Pseudomonas fluorescens
MVKVIQGRPAEMGFRMPAEWEPHEQCWMGWPERPDNWRENAGPAQEVFARTAIAISKFEPVTLCASAKQYPKVHELMEHETNIRVVEMSMNDSWFRDMGPTFVTHKGDSGIAEQTIAGIDWQFNAWGGIYDDWSLDSDVAKKIVEIERIPRFPQKIILEGGSIHVDGEGTCITTEECLLNPNRNPNMTKLEIENELKDFLGVSKVIWIPRGLYGDEDTNGHVDNLCCFIKPGVILLSWTDDEKDHQYERSVEALSVLSQSVDAKGRQLQVVKIHVPGPLYMTEEEAQGVVSSGHSVPRPAGTRLAASYVNFYIANGGIIAPSFGDRWDEEAYAVLQKAFPDHEVVMVEGGREIALGGGNIHCITQQQPVRPS

SEQ ID NO: 5252 - protein, 361 aa, Zea mays subsp. mays
  peptide (1)..(361): Ceres Seq. ID no. 13498767
  misc_feature (3)..(357): Pfam Name: Porphyromonas-type peptidyl-arginine deiminase Pfam Description: Porphyromonas-type peptidyl-arginine deiminase
  misc_feature (1)..(337): Homolog of NCBI NO: 38606518 NR Description: OSJNBa0016O02.3 [Oryza sativa (japonica
  misc_feature (1)..(361): Homolog of NCBI NO: 15241536 NR Description: expressed protein [Arabidopsis thaliana]
  misc_feature (1)..(361): Homolog of NCBI NO: 26452202 NR Description: unknown protein [Arabidopsis thaliana]
  misc_feature (1)..(361): Homolog of NCBI NO: 14289303 NR Description: hypothetical protein [Arabidopsis thaliana]
  misc_feature (1)..(357): Homolog of NCBI NO: 15595489 NR Description: conserved hypothetical protein [Pseudomonas
  misc_feature (1)..(357): Homolog of NCBI NO: 23472721 NR Description: hypothetical protein [Pseudomonas syringae pv.
  misc_feature (1)..(357): Homolog of NCBI NO: 28872501 NR Description: conserved hypothetical protein [Pseudomonas pv. tomato str. DC3000] >gi|28855756|gb|AAO58815.1| conserved
  misc_feature (1)..(357): Homolog of NCBI NO: 23105724 NR Description: hypothetical protein [Azotobacter vinelandii]
  misc_feature (1)..(357): Homolog of NCBI NO: 26987008 NR Description: conserved hypothetical protein [Pseudomonas KT2440] >gi|24981625|gb|AAN65897.1|AE016217_9 conserved
  misc_feature (1)..(357): Homolog of NCBI NO: 23061592 NR Description: hypothetical protein [Pseudomonas fluorescens
MGFRMPAEWEPHEQCWMGWPERPDNWRENAGPAQEVFARTAIAISKFEPVTLCASAKQYPKVHELMEHETNIRVVEMSMNDSWFRDMGPTFVTHKGDSGIAEQTIAGIDWQFNAWGGIYDDWSLDSDVAKKIVEIERIPRFPQKIILEGGSIHVDGEGTCITTEECLLNPNRNPNMTKLEIENELKDFLGVSKVIWIPRGLYGDEDTNGHVDNLCCFIKPGVILLSWTDDEKDHQYERSVEALSVLSQSVDAKGRQLQVVKIHVPGPLYMTEEEAQGVVSSGHSVPRPAGTRLAASYVNFYIANGGIIAPSFGDRWDEEAYAVLQKAFPDHEVVMVEGGREIALGGGNIHCITQQQPVRPS

SEQ ID NO: 5253 - protein, 357 aa, Zea mays subsp. mays
  peptide (1)..(357): Ceres Seq. ID no. 13498768
  misc_feature (1)..(353): Pfam Name: Porphyromonas-type peptidyl-arginine deiminase Pfam Description: Porphyromonas-type peptidyl-arginine deiminase
  misc_feature (1)..(333): Homolog of NCBI NO: 38606518 NR Description: OSJNBa0016O02.3 [Oryza sativa (japonica
  misc_feature (1)..(357): Homolog of NCBI NO: 15241536 NR Description: expressed protein [Arabidopsis thaliana]
  misc_feature (1)..(357): Homolog of NCBI NO: 26452202 NR Description: unknown protein [Arabidopsis thaliana]
  misc_feature (1)..(357): Homolog of NCBI NO: 14289303 NR Description: hypothetical protein [Arabidopsis thaliana]
  misc_feature (1)..(353): Homolog of NCBI NO: 15595489 NR Description: conserved hypothetical protein [Pseudomonas
  misc_feature (1)..(353): Homolog of NCBI NO: 23472721 NR Description: hypothetical protein [Pseudomonas syringae pv.
  misc_feature (1)..(353): Homolog of NCBI NO: 28872501 NR Description: conserved hypothetical protein [Pseudomonas pv. tomato str. DC3000] >gi|28855756|gb|AAO58815.1| conserved
  misc_feature (1)..(353): Homolog of NCBI NO: 23105724 NR Description: hypothetical protein [Azotobacter vinelandii]
  misc_feature (1)..(353): Homolog of NCBI NO: 26987008 NR Description: conserved hypothetical protein [Pseudomonas KT2440] >gi|24981625|gb|AAN65897.1|AE016217_9 conserved
  misc_feature (1)..(353): Homolog of NCBI NO: 23061592 NR Description: hypothetical protein [Pseudomonas fluorescens
MPAEWEPHEQCWMGWPERPDNWRENAGPAQEVFARTAIAISKFEPVTLCASAKQYPKVHELMEHETNIRVVEMSMNDSWFRDMGPTFVTHKGDSGIAEQTIAGIDWQFNAWGGIYDDWSLDSDVAKKIVEIERIPRFPQKIILEGGSIHVDGEGTCITTEECLLNPNRNPNMTKLEIENELKDFLGVSKVIWIPRGLYGDEDTNGHVDNLCCFIKPGVILLSWTDDEKDHQYERSVEALSVLSQSVDAKGRQLQVVKIHVPGPLYMTEEEAQGVVSSGHSVPRPAGTRLAASYVNFYIANGGIIAPSFGDRWDEEAYAVLQKAFPDHEVVMVEGGREIALGGGNIHCITQQQPVRPS

SEQ ID NO: 5254 - DNA, 964 bp, Zea mays subsp. mays
  misc_feature (1)..(964): Ceres Seq. ID no. 12409637
  misc_feature: MA Experiment ID: 108544 Result: Down-regulated in Transcription
  misc_feature: MA Experiment ID: 20000492 Result: Up-regulated in Transcription
  misc_feature: MA Experiment 20000492 PARAMETER Experiment Name: Zm_Hybrid_Seed_Dev_P Parameter: DAP Value: 12
  misc_feature: MA Experiment 20000492 PARAMETER Experiment Name: Zm_Hybrid_Seed_Dev_P Parameter: Organism Value: Zea mays
  misc_feature: MA Experiment 20000492 PARAMETER Experiment Name: Zm_Hybrid_Seed_Dev_P Parameter: Plant Line Value: 35A19
  misc_feature: MA Experiment 20000492 PARAMETER Experiment Name: Zm_Hybrid_Seed_Dev_P Parameter: Tissue Value: Fert Kernel vs. Unfert Floret
  misc_feature: MA Experiment ID: 20000535 Result: Up-regulated in Transcription
  misc_feature: MA Experiment 20000535 PARAMETER Experiment Name: Zm_Hybrid_Seed_Dev_P Parameter: DAP Value: 30 vs. 12
  misc_feature: MA Experiment 20000535 PARAMETER Experiment Name: Zm_Hybrid_Seed_Dev_P Parameter: Organism Value: Zea mays
  misc_feature: MA Experiment 20000535 PARAMETER Experiment Name: Zm_Hybrid_Seed_Dev_P Parameter: Plant Line Value: 35A19
  misc_feature: MA Experiment 20000535 PARAMETER Experiment Name: Zm_Hybrid_Seed_Dev_P Parameter: Tissue Value: Embryo vs. Unfert Floret
  misc_feature: MA Experiment ID: 20000626 Result: Up-regulated in Transcription
  misc_feature: MA Experiment 20000626 PARAMETER Experiment Name: Zm_Herbicide-Treatments_P Parameter: Timepoint (hr) Value: 12
  misc_feature: MA Experiment 20000626 PARAMETER Experiment Name: Zm_Herbicide-Treatments_P Parameter: Tissue Value: Aerial
  misc_feature: MA Experiment 20000626 PARAMETER Experiment Name: Zm_Herbicide-Treatments_P Parameter: Treatment Value: Roundup vs. No Treatment
cccaccatcccagggccgccgcgctgcttctctttcccgtcgcacctccaacgctgccgccgcggcagattaatccaacaccgggccgggatacgtgacaggtttctgagctcgcagctctacgccagcgatgccggagacggcggcgccgatcggcctgtcatgggcgcccaagcttccttccttcgcaacgaccagcggcggcagcaagagcgaccacgcgccgaacccgagcgctgcgcagggatcgctctggaaccgcgcgagcgacctcgtggacgggctgttcgttgccccgagggaccctaggcagctgaataagctggccaggaagaacgtcaaggacactgccggcaagggctggttcgacatgccagctccgaccatcactcccgagttgaagaaggatctcgagattttgcagctgaggcacgtaattgacccaaaaaggcacttcaagcgggcaggaaaatccaaggcccttcccaagtacttccaagtcggtacggtcgttgagcctgcatctgagttctactcaagtaggctgaaaaatagggaacgcaaggcaacattggttgacgagctgttatcagatcaatctctgaagagctacaggatgcgcaaggtacgtgaaattcaggagatccgtacaccaggaggcaaccaaaagtggaagaacaagggcaagaaaacgctcaagagggccaaggataggaggaaatgagactggcgtgctagccttgtggtccagttgtgagagaacagattggagaagtgaaccaaggagcgccttcaaataccccctctctcgatttgtgcggggtatatagattctggttccagtgtagtgtggtgaacttcagtaacatgatgaattgctttagatacttcaaaaaatgttgctgtaagtctgtaacacacatgtatggttttcagcccgtggttatcaattctgtcggttggg

SEQ ID NO: 5255 - protein, 197 aa, Zea mays subsp. mays
  peptide (1)..(197): Ceres Seq. ID no. 12409638
  misc_feature (1)..(196): Homolog of NCBI NO: 30692242 NR Description: expressed protein [Arabidopsis thaliana]
  misc_feature (1)..(196): Homolog of NCBI NO: 15221891 NR Description: hypothetical protein; protein id: At1g54770.1 thaliana] >gi|27754411|gb|AAO22654.1| unknown protein thaliana] >gi|28393935|gb|AAO42375.1| unknown protein
  misc_feature (1)..(173): Homolog of NCBI NO: 25405768 NR Description: T22H22.18 [imported] - Arabidopsis thaliana
  misc_feature (67)..(182): Homolog of NCBI NO: 19114999 NR Description: hypothetical protein [Schizosaccharomyces pombe]
  misc_feature (61)..(186): Homolog of NCBI NO: 8218113 NR Description: dJ561L24.2 (acidic 82 kDa protein) [Homo sapiens]
  misc_feature (61)..(187): Homolog of NCBI NO: 34859943 NR Description: similar to expressed sequence AA408582 [Rattus
  misc_feature (61)..(186): Homolog of NCBI NO: 24418931 NR Description: hypothetical protein MGC27716 [Mus musculus] expressed sequence AA408582 [Mus musculus]
  misc_feature (64)..(197): Homolog of NCBI NO: 17537287 NR Description: Acidic protein mRNA (29.6 kD) [Caenorhabditis >gi|7332042|gb|AAF60729.1| Hypothetical protein Y49F6B.2
  misc_feature (63)..(197): Homolog of NCBI NO: 39580393 NR Description: Hypothetical protein CBG17763 [Caenorhabditis
  misc_feature (54)..(191): Homolog of NCBI NO: 6323080 NR Description: Protein required for cell viability; Ylr051cp
MPETAAPIGLSWAPKLPSFATTSGGSKSDHAPNPSAAQGSLWNRASDLVDGLFVAPRDPRQLNKLARKNVKDTAGKGWFDMPAPTITPELKKDLEILQLRHVIDPKRHFKRAGKSKALPKYFQVGTVVEPASEFYSSRLKNRERKATLVDELLSDQSLKSYRMRKVREIQEIRTPGGNQKWKNKGKKTLKRAKDRRK

SEQ ID NO: 5256 - protein, 117 aa, Zea mays subsp. mays; identical to SEQ ID NO: 2272
  peptide (1)..(117): Ceres Seq. ID no. 12409639
  misc_feature (1)..(116): Homolog of NCBI NO: 30692242 NR Description: expressed protein [Arabidopsis thaliana]
  misc_feature (1)..(116): Homolog of NCBI NO: 15221891 NR Description: hypothetical protein; protein id: At1g54770.1 thaliana] >gi|27754411|gb|AAO22654.1| unknown protein thaliana] >gi|28393935|gb|AAO42375.1| unknown protein
  misc_feature (1)..(93): Homolog of NCBI NO: 25405768 NR Description: T22H22.18 [imported] - Arabidopsis thaliana
  misc_feature (1)..(102): Homolog of NCBI NO: 19114999 NR Description: hypothetical protein [Schizosaccharomyces pombe]
  misc_feature (1)..(106): Homolog of NCBI NO: 8218113 NR Description: dJ561L24.2 (acidic 82 kDa protein) [Homo sapiens]
  misc_feature (1)..(107): Homolog of NCBI NO: 34859943 NR Description: similar to expressed sequence AA408582 [Rattus
  misc_feature (1)..(106): Homolog of NCBI NO: 24418931 NR Description: hypothetical protein MGC27716 [Mus musculus] expressed sequence AA408582 [Mus musculus]
  misc_feature (1)..(117): Homolog of NCBI NO: 17537287 NR Description: Acidic protein mRNA (29.6 kD) [Caenorhabditis >gi|7332042|gb|AAF60729.1| Hypothetical protein Y49F6B.2
  misc_feature (1)..(117): Homolog of NCBI NO: 39580393 NR Description: Hypothetical protein CBG17763 [Caenorhabditis
  misc_feature (1)..(111): Homolog of NCBI NO: 6323080 NR Description: Protein required for cell viability; Ylr051cp

SEQ ID NO: 5257 - protein, 102 aa, Zea mays subsp. mays
  peptide (1)..(102): Ceres Seq. ID no. 12409640
PTIPGPPRCFSFPSHLQRCRRGRLIQHRAGIRDRFLSSQLYASDAGDGGADRPVMGAQASFLRNDQRRQQERPRAEPERCAGIALEPRERPRGRAVRCPEGP

SEQ ID NO: 5258 - DNA, 1140 bp, Zea mays subsp. mays; identical to SEQ ID NO: 4797
  misc_feature (1)..(1140): Ceres Seq. ID no. 12386869
  misc_feature: MA Experiment ID: 108528 Result: Up-regulated in Transcription
  misc_feature: MA Experiment 108528 PARAMETER Experiment Name: Zm_Imbibed_Seeds_P Parameter: Age (day) Value: 5 vs. 2
  misc_feature: MA Experiment 108528 PARAMETER Experiment Name: Zm_Imbibed_Seeds_P Parameter: Organism Value: Zea mays
  misc_feature: MA Experiment 108528 PARAMETER Experiment Name: Zm_Imbibed_Seeds_P Parameter: Plant Line Value: 35A19
  misc_feature: MA Experiment 108528 PARAMETER Experiment Name: Zm_Imbibed_Seeds_P Parameter: Tissue Value: Aerial vs. Embryo
  misc_feature: MA Experiment ID: 108530 Result: Up-regulated in Transcription
  misc_feature: MA Experiment 108530 PARAMETER Experiment Name: Zm_Imbibed_Seeds_P Parameter: Age (day) Value: 6 vs. 2
  misc_feature: MA Experiment 108530 PARAMETER Experiment Name: Zm_Imbibed_Seeds_P Parameter: Organism Value: Zea mays
  misc_feature: MA Experiment 108530 PARAMETER Experiment Name: Zm_Imbibed_Seeds_P Parameter: Plant Line Value: 35A19
  misc_feature: MA Experiment 108530 PARAMETER Experiment Name: Zm_Imbibed_Seeds_P Parameter: Tissue Value: Aerial vs. Embryo
  misc_feature: MA Experiment ID: 108543 Result: Up-regulated in Transcription
  misc_feature: MA Experiment ID: 108544 Result: Up-regulated in Transcription
  misc_feature: MA Experiment ID: 108688 Result: Down-regulated in Transcription
  misc_feature: MA Experiment 108688 PARAMETER Experiment Name: Zm_Embryos-Flowers__P Parameter: Tissue Value: Immature Flowers vs. Aerial+
  misc_feature: MA Experiment ID: 20000535 Result: Down-regulated in Transcription
  misc_feature: MA Experiment 20000535 PARAMETER Experiment Name: Zm_Hybrid_Seed_Dev_P Parameter: DAP Value: 30 vs. 12
  misc_feature: MA Experiment 20000535 PARAMETER Experiment Name: Zm_Hybrid_Seed_Dev_P Parameter: Organism Value: Zea mays
  misc_feature: MA Experiment 20000535 PARAMETER Experiment Name: Zm_Hybrid_Seed_Dev_P Parameter: Plant Line Value: 35A19
  misc_feature: MA Experiment 20000535 PARAMETER Experiment Name: Zm_Hybrid_Seed_Dev_P Parameter: Tissue Value: Embryo vs. Unfert Floret

SEQ ID NO: 5259 - protein, 274 aa, Zea mays subsp. mays; identical to SEQ ID NO: 4798
  peptide (1)..(274): Ceres Seq. ID no. 12386870
  misc_feature (92)..(270): Pfam Name: Ribose 5-phosphate isomerase A (phosphoriboisomerase A) Pfam Description: Ribose 5-phosphate isomerase A
  misc_feature (92)..(270): Pfam Name: Ribose 5-phosphate isomerase A (phosphoriboisomerase A) Pfam Description: Ribose 5-phosphate isomerase A
  misc_feature (92)..(270): Pfam Name: Ribose 5-phosphate isomerase A (phosphoriboisomerase A) Pfam Description: Ribose 5-phosphate isomerase A
  misc_feature (1)..(274): Homolog of NCBI NO: 34393835 NR Description: putative ribose-5-phosphate isomerase [Oryza
  misc_feature (31)..(274): Homolog of NCBI NO: 34393836 NR Description: putative ribose-5-phosphate isomerase [Oryza
  misc_feature (29)..(274): Homolog of NCBI NO: 18654317 NR Description: ribose-5-phosphate isomerase [Spinacia oleracea]
  misc_feature (1)..(274): Homolog of NCBI NO: 21594002 NR Description: putative ribose 5-phosphate isomerase
  misc_feature (1)..(274): Homolog of NCBI NO: 15229349 NR Description: putative ribose 5-phosphate isomerase; protein At3g04790.1, supported by cDNA: 6349., supported by cDNA:
  misc_feature (31)..(274): Homolog of NCBI NO: 34393836 NR Description: putative ribose-5-phosphate isomerase [Oryza
  misc_feature (1)..(274): Homolog of NCBI NO: 21594002 NR Description: putative ribose 5-phosphate isomerase
  misc_feature (26)..(274): Homolog of NCBI NO: 21592672 NR Description: putative ribose 5-phosphate isomerase
  misc_feature (26)..(274): Homolog of NCBI NO: 15226223 NR Description: putative ribose 5-phosphate isomerase; protein At2g01290.1, supported by cDNA: gi_15809809, supported by cDNA:
  misc_feature (1)..(274): Homolog of NCBI NO: 15229349 NR Description: putative ribose 5-phosphate isomerase; protein At3g04790.1, supported by cDNA: 6349., supported by cDNA:
  misc_feature (34)..(268): Homolog of NCBI NO: 38347196 NR Description: OSJNBa0023J03.8 [Oryza sativa (japonica
  misc_feature (26)..(274): Homolog of NCBI NO: 13430836 NR Description: putative ribose 5-phosphate isomerase
  misc_feature (26)..(274): Homolog of NCBI NO: 15223936 NR Description: putative ribose 5-phosphate isomerase; protein At1g71100.1, supported by cDNA: 3116., supported by cDNA: [Arabidopsis thaliana] >gi|25329397|pir||E96735 hypothetical
  misc_feature (26)..(274): Homolog of NCBI NO: 21592672 NR Description: putative ribose 5-phosphate isomerase
  misc_feature (26)..(274): Homolog of NCBI NO: 15226223 NR Description: putative ribose 5-phosphate isomerase; protein At2g01290.1, supported by cDNA: gi_15809809, supported by cDNA:
  misc_feature (1)..(274): Homolog of NCBI NO: 15229349 NR Description: putative ribose 5-phosphate isomerase; protein At3g04790.1, supported by cDNA: 6349., supported by cDNA:
  misc_feature (1)..(274): Homolog of NCBI NO: 21594002 NR Description: putative ribose 5-phosphate isomerase
  misc_feature (29)..(274): Homolog of NCBI NO: 18654317 NR Description: ribose-5-phosphate isomerase [Spinacia oleracea]
  misc_feature (31)..(274): Homolog of NCBI NO: 34393836 NR Description: putative ribose-5-phosphate isomerase [Oryza
  misc_feature (1)..(274): Homolog of NCBI NO: 34393835 NR Description: putative ribose-5-phosphate isomerase [Oryza
  misc_feature (34)..(268): Homolog of NCBI NO: 38347196 NR Description: OSJNBa0023J03.8 [Oryza sativa (japonica
  misc_feature (26)..(274): Homolog of NCBI NO: 13430836 NR Description: putative ribose 5-phosphate isomerase
  misc_feature (26)..(274): Homolog of NCBI NO: 15223936 NR Description: putative ribose 5-phosphate isomerase; protein At1g71100.1, supported by cDNA: 3116., supported by cDNA: [Arabidopsis thaliana] >gi|25329397|pir||E96735 hypothetical
  misc_feature (29)..(274): Homolog of NCBI NO: 18654317 NR Description: ribose-5-phosphate isomerase [Spinacia oleracea]
  misc_feature (1)..(274): Homolog of NCBI NO: 34393835 NR Description: putative ribose-5-phosphate isomerase [Oryza
  misc_feature (26)..(274): Homolog of NCBI NO: 15226223 NR Description: putative ribose 5-phosphate isomerase; protein At2g01290.1, supported by cDNA: gi_15809809, supported by cDNA:
  misc_feature (26)..(274): Homolog of NCBI NO: 21592672 NR Description: putative ribose 5-phosphate isomerase
  misc_feature (26)..(274): Homolog of NCBI NO: 15223936 NR Description: putative ribose 5-phosphate isomerase; protein At1g71100.1, supported by cDNA: 3116., supported by cDNA: [Arabidopsis thaliana] >gi|25329397|pir||E96735 hypothetical
  misc_feature (26)..(274): Homolog of NCBI NO: 13430836 NR Description: putative ribose 5-phosphate isomerase
  misc_feature (34)..(268): Homolog of NCBI NO: 38347196 NR Description: OSJNBa0023J03.8 [Oryza sativa (japonica

SEQ ID NO: 5260 - protein, 212 aa, Zea mays subsp. mays; identical to SEQ ID NO: 4799
  peptide (1)..(212): Ceres Seq. ID no. 12386871
  misc_feature (30)..(208): Pfam Name: Ribose 5-phosphate isomerase A (phosphoriboisomerase A) Pfam Description: Ribose 5-phosphate isomerase A
  misc_feature (30)..(208): Pfam Name: Ribose 5-phosphate isomerase A (phosphoriboisomerase A) Pfam Description: Ribose 5-phosphate isomerase A
  misc_feature (30)..(208): Pfam Name: Ribose 5-phosphate isomerase A (phosphoriboisomerase A) Pfam Description: Ribose 5-phosphate isomerase A
  misc_feature (1)..(212): Homolog of NCBI NO: 21592672 NR Description: putative ribose 5-phosphate isomerase
  misc_feature (1)..(212): Homolog of NCBI NO: 15223936 NR Description: putative ribose 5-phosphate isomerase; protein At1g71100.1, supported by cDNA: 3116., supported by cDNA: [Arabidopsis thaliana] >gi|25329397|pir||E96735 hypothetical
  misc_feature (1)..(212): Homolog of NCBI NO: 34393835 NR Description: putative ribose-5-phosphate isomerase [Oryza
  misc_feature (1)..(212): Homolog of NCBI NO: 18654317 NR Description: ribose-5-phosphate isomerase [Spinacia oleracea]
  misc_feature (1)..(212): Homolog of NCBI NO: 15229349 NR Description: putative ribose 5-phosphate isomerase; protein At3g04790.1, supported by cDNA: 6349., supported by cDNA:
  misc_feature (1)..(212): Homolog of NCBI NO: 34393836 NR Description: putative ribose-5-phosphate isomerase [Oryza
  misc_feature (1)..(212): Homolog of NCBI NO: 21594002 NR Description: putative ribose 5-phosphate isomerase
  misc_feature (1)..(212): Homolog of NCBI NO: 18654317 NR Description: ribose-5-phosphate isomerase [Spinacia oleracea]
  misc_feature (1)..(212): Homolog of NCBI NO: 34393836 NR Description: putative ribose-5-phosphate isomerase [Oryza
  misc_feature (1)..(212): Homolog of NCBI NO: 34393835 NR Description: putative ribose-5-phosphate isomerase [Oryza
  misc_feature (1)..(206): Homolog of NCBI NO: 38347196 NR Description: OSJNBa0023J03.8 [Oryza sativa (japonica
  misc_feature (1)..(212): Homolog of NCBI NO: 13430836 NR Description: putative ribose 5-phosphate isomerase
  misc_feature (1)..(212): Homolog of NCBI NO: 15223936 NR Description: putative ribose 5-phosphate isomerase; protein At1g71100.1, supported by cDNA: 3116., supported by cDNA: [Arabidopsis thaliana] >gi|25329397|pir||E96735 hypothetical
  misc_feature (1)..(212): Homolog of NCBI NO: 21592672 NR Description: putative ribose 5-phosphate isomerase
  misc_feature (1)..(212): Homolog of NCBI NO: 15226223 NR Description: putative ribose 5-phosphate isomerase; protein At2g01290.1, supported by cDNA: gi_15809809, supported by cDNA:
  misc_feature (1)..(212): Homolog of NCBI NO: 15229349 NR Description: putative ribose 5-phosphate isomerase; protein At3g04790.1, supported by cDNA: 6349., supported by cDNA:
  misc_feature (1)..(206): Homolog of NCBI NO: 38347196 NR Description: OSJNBa0023J03.8 [Oryza sativa (japonica
  misc_feature (1)..(212): Homolog of NCBI NO: 13430836 NR Description: putative ribose 5-phosphate isomerase
  misc_feature (1)..(212): Homolog of NCBI NO: 15223936 NR Description: putative ribose 5-phosphate isomerase; protein At1g71100.1, supported by cDNA: 3116., supported by cDNA: [Arabidopsis thaliana] >gi|25329397|pir||E96735 hypothetical
  misc_feature (1)..(212): Homolog of NCBI NO: 21592672 NR Description: putative ribose 5-phosphate isomerase
  misc_feature (1)..(212): Homolog of NCBI NO: 15226223 NR Description: putative ribose 5-phosphate isomerase; protein At2g01290.1, supported by cDNA: gi_15809809, supported by cDNA:
  misc_feature (1)..(212): Homolog of NCBI NO: 15229349 NR Description: putative ribose 5-phosphate isomerase; protein At3g04790.1, supported by cDNA: 6349., supported by cDNA:
  misc_feature (1)..(212): Homolog of NCBI NO: 21594002 NR Description: putative ribose 5-phosphate isomerase
  misc_feature (1)..(212): Homolog of NCBI NO: 18654317 NR Description: ribose-5-phosphate isomerase [Spinacia oleracea]
  misc_feature (1)..(212): Homolog of NCBI NO: 34393835 NR Description: putative ribose-5-phosphate isomerase [Oryza
  misc_feature (1)..(212): Homolog of NCBI NO: 15226223 NR Description: putative ribose 5-phosphate isomerase; protein At2g01290.1, supported by cDNA: gi_15809809, supported by cDNA:
  misc_feature (1)..(212): Homolog of NCBI NO: 21594002 NR Description: putative ribose 5-phosphate isomerase
  misc_feature (1)..(212): Homolog of NCBI NO: 34393836 NR Description: putative ribose-5-phosphate isomerase [Oryza
  misc_feature (1)..(212): Homolog of NCBI NO: 13430836 NR Description: putative ribose 5-phosphate isomerase
  misc_feature (1)..(206): Homolog of NCBI NO: 38347196 NR Description: OSJNBa0023J03.8 [Oryza sativa (japonica

SEQ ID NO: 5261 - protein, 178 aa, Zea mays subsp. mays; identical to SEQ ID NO: 4800
  peptide (1)..(178): Ceres Seq. ID no. 12386872

SEQ ID NO: 5262 - DNA, 1635 bp, Zea mays subsp. mays
  misc_feature (1)..(1635): Ceres Seq. ID no. 12358682
  misc_feature: MA Experiment ID: 108536 Result: Up-regulated in Transcription
  misc_feature: MA Experiment 108536 PARAMETER Experiment Name: Zm_Meristem_P Parameter: Age (day) Value: 8
  misc_feature: MA Experiment 108536 PARAMETER Experiment Name: Zm_Meristem_P Parameter: Organism Value: Zea mays
  misc_feature: MA Experiment 108536 PARAMETER Experiment Name: Zm_Meristem_P Parameter: Plant Line Value: 35A19
  misc_feature: MA Experiment 108536 PARAMETER Experiment Name: Zm_Meristem_P Parameter: Tissue Value: Shoot Meristem vs. Above Shoot Meristem
  misc_feature: MA Experiment ID: 108543 Result: Down-regulated in Transcription
aaggagatagagagagagggagtgagaagaaggagacgcgaggagagagagagagcggcaggcaggcaggcaggcaataaatggcagttttggtgcgcgcaggctgatggcggcgtggcaggtcctctctgtcgcctcaccgtcttaactccggccgcgcgccggcaccacaaaccacaccgctcggctgcgagcacgcgggttttaatccgtcgcagagcgcatgagcacgccgcccagagcgcagactacgacgagcagccgtctgtagagggggagggaccgagggagagatcagggcgtcaggccgttgtctctcagcttcaccttcaccttgccgggcacggcgaacggcacggcggcctatggatttggccacatggcggggttccctctaggtggaggaggccacagccgcgacgcccccgcgtcgtccgtcccgccggtgcacccctccgacgcagcgtccttcctctacgccgcgcgcgcgggagcgggcctgcagctatggcagcagcacgagcagcaacagcagcacccgttctacacctccaacatcatccgcttctccgatgacccgaccggcgccccgccctcgctcacgggcgccgcgtcgtcgtcgtcttcgcgcggcacgaggggccggcgcgggaagcggcggcggaggcggcggcggggtcagctgccaggactgcggcaaccaggccaagaaggactgcgtgcaccagcgctgccgcacctgctgcaagagccgcggcttcacctgcagcacccacgtcaagtccacctgggtccctgccgccaagagacgcgagcgccagcagcagctcgccgtgctagcggcctccgccgccgccacaaccgccggcgccggcccatcccgcgacccgaccaagcgccctcgcgcgcgcctctccgtcgccacccccgccacgtcctcggatggtcacggtcgcggagaggttcccacgggaggtgagctcggaggcggtgttccggtgcgtgcgcctggggccggtcgaccaggccgaggcggaggtcgcgtaccagaccaccgtcagcatcggcggccacgtgttcaagggcatccttcacgacgttggccctcacagcttgcctgccgctggagtcggaggcggcgccatcgagtaccacttccgccacgccggggacggattgccgccgagcacggcagccactggcgaagcaggcggcggtggcgtggggagtgtcgtcgtgtcatcggctgtggtgatggacccgtacccgacgcccggaccctacgccgccttccccgccggcgcgccgttcttccacggccacccgagacagtgaccgccggctcgctcgctcgccagcagccgtcccgctgtgtaacgacatcacgactcccatctctggctcgctcgatctgtcaatttcgttagcttcctaatttcttagcctcttgttgagatgcataaattcatgttccttctagagcctagctagctagcttaggcgcgggttagacttgtttgcttcttgagatcaattcatgaggtgagtagcaatatactcagtggctgcaagtggctaaaaatctgacatttaggaaccttgatgagacatttgagatggtttcttgcactgtgc

SEQ ID NO: 5263 - protein, 284 aa, Zea mays subsp. mays
  peptide (1)..(284): Ceres Seq. ID no. 12358683
  misc_feature (30)..(132): Pfam Name: Domain of unknown function (DUF702) Pfam Description: Domain of unknown function (DUF702)
  misc_feature (30)..(132): Homolog of NCBI NO: 15239350 NR Description: zinc finger protein SHI-like; protein id: supported by cDNA: gi_4929802 [Arabidopsis thaliana] putative zinc finger protein SHI [Arabidopsis thaliana]
  misc_feature (36)..(123): Homolog of NCBI NO: 15234365 NR Description: putative protein; protein id: At4g36260.1
  misc_feature (34)..(108): Homolog of NCBI NO: 15223669 NR Description: hypothetical protein; protein id: At1g19790.1
  misc_feature (34)..(96): Homolog of NCBI NO: 15222285 NR Description: unknown protein; protein id: At1g75520.1
  misc_feature (36)..(105): Homolog of NCBI NO: 15224110 NR Description: unknown protein; protein id: At2g18120.1
  misc_feature (35)..(92): Homolog of NCBI NO: 15226540 NR Description: hypothetical protein; protein id: At2g21400.1
  misc_feature (1)..(123): Homolog of NCBI NO: 34906658 NR Description: putative LRP(lateral root primordia) 1 [Oryza
  misc_feature (26)..(132): Homolog of NCBI NO: 15230389 NR Description: putative protein; protein id: At3g51060.1
  misc_feature (35)..(82): Homolog of NCBI NO: 33945875 NR Description: hypothetical protein [Lotus corniculatus var.
  misc_feature (42)..(92): Homolog of NCBI NO: 26984075 NR Description: hypothetical protein [Arabidopsis thaliana]
MTRPAPRPRSRAPRRRRLRAARGAGAGSGGGGGGGVSCQDCGNQAKKDCVHQRCRTCCKSRGFTCSTHVKSTWVPAAKRRERQQQLAVLAASAAATTAGAGPSRDPTKRPRARLSVATPATSSDGHGRGEVPTGGELGGGVPVRAPGAGRPGRGGGRVPDHRQHRRPRVQGHPSRRWPSQLACRWSRRRRHRVPLPPRRGRIAAEHGSHWRSRRRWRGECRRVIGCGDGPVPDARTLRRLPRRRAVLPRPPETVTAGSLARQQPSRCVTTSRLPSLARSICQFR

SEQ ID NO: 5264 - protein, 199 aa, Zea mays subsp. mays
  peptide (1)..(199): Ceres Seq. ID no. 12358684
MAGFPLGGGGHSRDAPASSVPPVHPSDAASFLYAARAGAGLQLWQQHEQQQQHPFYTSNIIRFSDDPTGAPPSLTGAASSSSSRGTRGRRGKRRRRRRRGQLPGLRQPGQEGLRAPALPHLLQEPRLHLQHPRQVHLGPCRQETRAPAAARRASGLRRRHNRRRRPIPRPDQAPSRAPLRRHPRHVLGWSRSRRGSHGR

SEQ ID NO: 5265 - protein, 191 aa, Zea mays subsp. mays
  peptide (1)..(191): Ceres Seq. ID no. 12358685
  misc_feature (125)..(191): Pfam Name: Glycoprotein GG/GX Pfam Description: Glycoprotein GG/GX
  misc_feature (167)..(191): Homolog of NCBI NO: 485464 NR Description: hypothetical protein 4 (phaC2 3' region) -
  misc_feature (9)..(191): Homolog of NCBI NO: 25989119 NR Description: unknown [Streptomyces aureofaciens]
  misc_feature (138)..(191): Homolog of NCBI NO: 485464 NR Description: hypothetical protein 4 (phaC2 3' region) -
  misc_feature (135)..(191): Homolog of NCBI NO: 151046 NR Description: alginate regulatory protein AlgR3
  misc_feature (135)..(191): Homolog of NCBI NO: 482295 NR Description: regulatory protein algP - Pseudomonas aeruginosa
  misc_feature (141)..(191): Homolog of NCBI NO: 485464 NR Description: hypothetical protein 4 (phaC2 3' region) -
  misc_feature (126)..(191): Homolog of NCBI NO: 13559031 NR Description: bA11M20.1 (TATA box binding protein
  misc_feature (135)..(191): Homolog of NCBI NO: 151002 NR Description: transcription regulatory protein
  misc_feature (135)..(191): Homolog of NCBI NO: 94816 NR Description: regulatory protein algR3 - Pseudomonas aeruginosa
  misc_feature (126)..(191): Homolog of NCBI NO: 4507349 NR Description: TBP-associated factor 4; TATA box binding protein associated factor, RNA polymerase II, C1, 130kD; TAF4 RNA
KEIEREGVRRRRREERERAAGRQAGNKWQFWCAQADGGVAGPLCRLTVLTPAARRHHKPHRSAASTRVLIRRRAHEHAAQSADYDEQPSVEGEGPRERSGRQAVVSQLHLHLAGHGERHGGLWIWPHGGVPSRWRRPQPRRPRVVRPAGAPLRRSVLPLRRARGSGPAAMAAARAATAAPVLHLQHHPLLR

SEQ ID NO: 5266 - DNA, 1544 bp, Zea mays subsp. mays
  misc_feature (1)..(1544): Ceres Seq. ID no. 12566452
  misc_feature: MA Experiment ID: 108522 Result: Down-regulated in Transcription
  misc_feature: MA Experiment 108522 PARAMETER Experiment Name: Zm_42deg_Heat_P Parameter: Age (day) Value: 8
  misc_feature: MA Experiment 108522 PARAMETER Experiment Name: Zm_42deg_Heat_P Parameter: Organism Value: Zea mays
  misc_feature: MA Experiment 108522 PARAMETER Experiment Name: Zm_42deg_Heat_P Parameter: Plant Line Value: 35A19
  misc_feature: MA Experiment 108522 PARAMETER Experiment Name: Zm_42deg_Heat_P Parameter: Temperature (deg C) Value: 42 vs. 22
  misc_feature: MA Experiment 108522 PARAMETER Experiment Name: Zm_42deg_Heat_P Parameter: Timepoint (hr) Value: 1
  misc_feature: MA Experiment 108522 PARAMETER Experiment Name: Zm_42deg_Heat_P Parameter: Tissue Value: Aerial
  misc_feature: MA Experiment ID: 108535 Result: Down-regulated in Transcription
  misc_feature: MA Experiment 108535 PARAMETER Experiment Name: Zm_Meristem_P Parameter: Age (day) Value: 8
  misc_feature: MA Experiment 108535 PARAMETER Experiment Name: Zm_Meristem_P Parameter: Organism Value: Zea mays
  misc_feature: MA Experiment 108535 PARAMETER Experiment Name: Zm_Meristem_P Parameter: Plant Line Value: 35A19
  misc_feature: MA Experiment 108535 PARAMETER Experiment Name: Zm_Meristem_P Parameter: Tissue Value: Root Meristem vs. Above Root Meristem
  misc_feature: MA Experiment ID: 108543 Result: Up-regulated in Transcription
  misc_feature: MA Experiment ID: 108689 Result: Down-regulated in Transcription
  misc_feature: MA Experiment 108689 PARAMETER Experiment Name: Zm_Drought_Roots_P Parameter: Age (day) Value: 9
  misc_feature: MA Experiment 108689 PARAMETER Experiment Name: Zm_Drought_Roots_P Parameter: Organism Value: Zea mays
  misc_feature: MA Experiment 108689 PARAMETER Experiment Name: Zm_Drought_Roots_P Parameter: Plant Line Value: 35A19
  misc_feature: MA Experiment 108689 PARAMETER Experiment Name: Zm_Drought_Roots_P Parameter: Timepoint (hr) Value: 24
  misc_feature: MA Experiment 108689 PARAMETER Experiment Name: Zm_Drought_Roots_P Parameter: Tissue Value: Roots
  misc_feature: MA Experiment 108689 PARAMETER Experiment Name: Zm_Drought_Roots_P Parameter: Treatment Value: Drought vs. No Drought
  misc_feature: MA Experiment ID: 20000478 Result: Down-regulated in Transcription
  misc_feature: MA Experiment 20000478 PARAMETER Experiment Name: Zm_5mM_SA_P Parameter: Age (day) Value: 11
  misc_feature: MA Experiment 20000478 PARAMETER Experiment Name: Zm_5mM_SA_P Parameter: Organism Value: Zea mays
  misc_feature: MA Experiment 20000478 PARAMETER Experiment Name: Zm_5mM_SA_P Parameter: Plant Line Value: 35A19
  misc_feature: MA Experiment 20000478 PARAMETER Experiment Name: Zm_5mM_SA_P Parameter: Timepoint (hr) Value: 72
  misc_feature: MA Experiment 20000478 PARAMETER Experiment Name: Zm_5mM_SA_P Parameter: Tissue Value: Aerial
  misc_feature: MA Experiment 20000478 PARAMETER Experiment Name: Zm_5mM_SA_P Parameter: Treatment Value: 5mM SA vs. No Treatment
  misc_feature: MA Experiment ID: 20000480 Result: Down-regulated in Transcription
  misc_feature: MA Experiment 20000480 PARAMETER Experiment Name: Zm_Drought_P Parameter: Age (day) Value: 11
  misc_feature: MA Experiment 20000480 PARAMETER Experiment Name: Zm_Drought_P Parameter: Organism Value: Zea mays
  misc_feature: MA Experiment 20000480 PARAMETER Experiment Name: Zm_Drought_P Parameter: Plant Line Value: 35A19
  misc_feature: MA Experiment 20000480 PARAMETER Experiment Name: Zm_Drought_P Parameter: Timepoint (hr) Value: 72
  misc_feature: MA Experiment 20000480 PARAMETER Experiment Name: Zm_Drought_P Parameter: Tissue Value: Aerial
  misc_feature: MA Experiment 20000480 PARAMETER Experiment Name: Zm_Drought_P Parameter: Treatment Value: Drought vs. No Drought
  misc_feature: MA Experiment ID: 20000492 Result: Down-regulated in Transcription
  misc_feature: MA Experiment 20000492 PARAMETER Experiment Name: Zm_Hybrid_Seed_Dev_P Parameter: DAP Value: 12
  misc_feature: MA Experiment 20000492 PARAMETER Experiment Name: Zm_Hybrid_Seed_Dev_P Parameter: Organism Value: Zea mays
  misc_feature: MA Experiment 20000492 PARAMETER Experiment Name: Zm_Hybrid_Seed_Dev_P Parameter: Plant Line Value: 35A19
  misc_feature: MA Experiment 20000492 PARAMETER Experiment Name: Zm_Hybrid_Seed_Dev_P Parameter: Tissue Value: Fert Kernel vs. Unfert Floret
  misc_feature: MA Experiment ID: 20000534 Result: Down-regulated in Transcription
  misc_feature: MA Experiment 20000534 PARAMETER Experiment Name: Zm_Hybrid_Pollen_P Parameter: Age (day) Value: 8
  misc_feature: MA Experiment 20000534 PARAMETER Experiment Name: Zm_Hybrid_Pollen_P Parameter: Organism Value: Zea mays
  misc_feature: MA Experiment 20000534 PARAMETER Experiment Name: Zm_Hybrid_Pollen_P Parameter: Plant Line Value: 35A19
  misc_feature: MA Experiment 20000534 PARAMETER Experiment Name: Zm_Hybrid_Pollen_P Parameter: Tissue Value: Pollen vs. Aerial
  misc_feature: MA Experiment ID: 20000535 Result: Down-regulated in Transcription
  misc_feature: MA Experiment 20000535 PARAMETER Experiment Name: Zm_Hybrid_Seed_Dev_P Parameter: DAP Value: 30 vs. 12
  misc_feature: MA Experiment 20000535 PARAMETER Experiment Name: Zm_Hybrid_Seed_Dev_P Parameter: Organism Value: Zea mays
  misc_feature: MA Experiment 20000535 PARAMETER Experiment Name: Zm_Hybrid_Seed_Dev_P Parameter: Plant Line Value: 35A19
  misc_feature: MA Experiment 20000535 PARAMETER Experiment Name: Zm_Hybrid_Seed_Dev_P Parameter: Tissue Value: Embryo vs. Unfert Floret
  misc_feature: MA Experiment ID: 20000630 Result: Up-regulated in Transcription
  misc_feature: MA Experiment 20000630 PARAMETER Experiment Name: Zm_Herbicide-Treatments_P Parameter: Timepoint (hr) Value: 4
  misc_feature: MA Experiment 20000630 PARAMETER Experiment Name: Zm_Herbicide-Treatments_P Parameter: Tissue Value: Aerial
  misc_feature: MA Experiment 20000630 PARAMETER Experiment Name: Zm_Herbicide-Treatments_P Parameter: Treatment Value: Roundup vs. No Treatment
aagtacacagagatacaaatacagagaggcagagggcaggcggaggcaccatctccctcccttcttcatcgcccacacaagtcctctcatctcctctctgtttcgtgcaagaaacttccttggacaaagatgggagtgcagagttactacaggttattctgctgcgggtgcggcgccaatgcggcggccggcgaccgggaaggcgacgaggacgggggtttcgaggcgttcgccgacaagggggccgccgaagccgggccgcgggggctgtcgtgggcgcaggtggaggcgatgacgggcaggttcacctcggccgtcgtcggcgagggcgggttcagcaccgtgtacctcgcgcgcctctccggcggcgcgctggccgccgtcaaggtccaccgcagcagcgagcgcctccaccgcgtgttccgccaggagctcgacgcgctccgacgcgtccgccacccgcacatcgtccgcctccttgccttctgcgaccagcaagaggaaggcgtgctggtgctggagttcgcggcgaacgggaacctgcacgagcggctccacggcgggggcaaggcggcgggcacgatgccgtgggcgcggcgggtgtcggcggcgctgcaggtggcgcgggcgctcgagtacctgcacgaccgctgcgagccgcaggtggtgcacggcgacgtgaaggcctccaacgtgctcctggacgcggccatgtccgccaagctgtgcgacttcgggtcggcgcggacggggttctcggccgccgtgcgcccgcggccgtccgcgcgcaccgccatgctcggctccccggggtacgtcgacccgcactacatccgctcgggcgtcgtcaccaagaagaccgacgtgtacagcttcggcgtcctgctcctggagctcctcacggggatggaggccttctgcgcggaggagggcggccgcctcctcaccgccgccgtcgcgccgcggctcagggccggcgacccgccccgcgggatggtcgacgagaggctcggcaccgcctacgacgccgccgaggccgccgccgtggcggcgctggccgctgcctgtgtcggcgagaaccccagcctccggccgtccatggccgacgtggtgcgcaccctggagcagagcgcgcagggatccatctccgccgtggggatggcatcggacggtcactggaaggtgtgagtcaccagtggaaagtcgtcgcctccgccgacgcgctcagatctggctccccgagtcgttaacttgcggtgctcatgcgcatgcgtcgcgcacgtggcgcccatccattggttgcgaggagaacaaagcgttgttagtaggcgagcatatcaaaaagaaagaggggacaaaagcgtggtgaaaaaacgttgatttccatagctaaattaggggaagacttggggagataaaaaggcagagctaagttgtgtgctgatggggatttccatcatattatgccaaagcggcatctacttgagagagacaaaaaaaagagaggatctttgcagcgcacgattccaagattttgttgattc

SEQ ID NO: 5267 - protein, 415 aa, Zea mays subsp. mays
  peptide (1)..(415): Ceres Seq. ID no. 12566453
  misc_feature (62)..(311): Homolog of NCBI NO: 29829093 NR Description: putative translation initiation factor IF-2
VHRDTNTERQRAGGGTISLPSSSPTQVLSSPLCFVQETSLDKDGSAELLQVILLRVRRQCGGRRPGRRRGRGFRGVRRQGGRRSRAAGAVVGAGGGDDGQVHLGRRRRGRVQHRVPRAPLRRRAGRRQGPPQQRAPPPRVPPGARRAPTRPPPAHRPPPCLLRPARGRRAGAGVRGEREPARAAPRRGQGGGHDAVGAAGVGGAAGGAGARVPARPLRAAGGARRREGLQRAPGRGHVRQAVRLRVGADGVLGRRAPAAVRAHRHARLPGVRRPALHPLGRRHQEDRRVQLRRPAPGAPHGDGGLLRGGGRPPPHRRRRAAAQGRRPAPRDGRREARHRLRRRRGRRRGGAGRCLCRREPQPPAVHGRRGAHPGAERAGIHLRRGDGIGRSLEGVSHQWKVVASADALRSGSPSR

SEQ ID NO: 5268 - protein, 395 aa, Zea mays subsp. mays
  peptide (1)..(395): Ceres Seq. ID no. 12566454
  misc_feature (106)..(374): Pfam Name: Protein kinase domain Pfam Description: Protein kinase domain
  misc_feature (50)..(395): Homolog of NCBI NO: 37536060 NR Description: putative receptor protein kinase [Oryza sativa
  misc_feature (50)..(379): Homolog of NCBI NO: 27476081 NR Description: Hypothetical protein [Oryza sativa (japonica
  misc_feature (56)..(390): Homolog of NCBI NO: 38344983 NR Description: OSJNBa0011L07.13 [Oryza sativa (japonica
  misc_feature (67)..(386): Homolog of NCBI NO: 30692836 NR Description: protein kinase family [Arabidopsis thaliana]
  misc_feature (91)..(386): Homolog of NCBI NO: 15235071 NR Description: putative protein kinase; protein id: At4g10390.1, by cDNA: gi_20260591 [Arabidopsis thaliana]
  misc_feature (67)..(315): Homolog of NCBI NO: 25403176 NR Description: probable protein kinase [imported] - Arabidopsis >gi|12322574|gb|AAG51288.1|AC027035_11 protein kinase, putative
  misc_feature (201)..(386): Homolog of NCBI NO: 29367339 NR Description: putative receptor protein kinase [Oryza sativa
  misc_feature (86)..(388): Homolog of NCBI NO: 18402188 NR Description: unknown protein; protein id: At3g19300.1 thaliana] >gi|11994452|dbj|BAB02454.1| contains similarity to
  misc_feature (88)..(376): Homolog of NCBI NO: 15227018 NR Description: putative receptor-like protein kinase; protein id:
  misc_feature (70)..(374): Homolog of NCBI NO: 11358842 NR Description: serine/threonine-specific protein kinase-like
KYTEIQIQRGRGQAEAPSPSLLHRPHKSSHLLSVSCKKLPWTKMGVQSYYRLFCCGCGANAAAGDREGDEDGGFEAFADKGAAEAGPRGLSWAQVEAMTGRFTSAVVGEGGFSTVYLARLSGGALAAVKVHRSSERLHRVFRQELDALRRVRHPHIVRLLAFCDQQEEGVLVLEFAANGNLHERLHGGGKAAGTMPWARRVSAALQVARALEYLHDRCEPQVVHGDVKASNVLLDAAMSAKLCDFGSARTGFSAAVRPRPSARTAMLGSPGYVDPHYIRSGVVTKKTDVYSFGVLLLELLTGMEAFCAEEGGRLLTAAVAPRLRAGDPPRGMVDERLGTAYDAAEAAAVAALAAACVGENPSLRPSMADVVRTLEQSAQGSISAVGMASDGHWKV

SEQ ID NO: 5269 - protein, 352 aa, Zea mays subsp. mays
  peptide (1)..(352): Ceres Seq. ID no. 12566455
  misc_feature (63)..(331): Pfam Name: Protein kinase domain Pfam Description: Protein kinase domain
  misc_feature (7)..(352): Homolog of NCBI NO: 37536060 NR Description: putative receptor protein kinase [Oryza sativa
  misc_feature (7)..(336): Homolog of NCBI NO: 27476081 NR Description: Hypothetical protein [Oryza sativa (japonica
  misc_feature (13)..(347): Homolog of NCBI NO: 38344983 NR Description: OSJNBa0011L07.13 [Oryza sativa (japonica
  misc_feature (24)..(343): Homolog of NCBI NO: 30692836 NR Description: protein kinase family [Arabidopsis thaliana]
  misc_feature (48)..(343): Homolog of NCBI NO: 15235071 NR Description: putative protein kinase; protein id: At4g10390.1, by cDNA: gi_20260591 [Arabidopsis thaliana]
  misc_feature (24)..(272): Homolog of NCBI NO: 25403176 NR Description: probable protein kinase [imported] - Arabidopsis >gi|12322574|gb|AAG51288.1|AC027035_11 protein kinase, putative
  misc_feature (158)..(343): Homolog of NCBI NO: 29367339 NR Description: putative receptor protein kinase [Oryza sativa
  misc_feature (43)..(345): Homolog of NCBI NO: 18402188 NR Description: unknown protein; protein id: At3g19300.1 thaliana] >gi|11994452|dbj|BAB02454.1| contains similarity to
  misc_feature (45)..(333): Homolog of NCBI NO: 15227018 NR Description: putative receptor-like protein kinase; protein id:
  misc_feature (27)..(331): Homolog of NCBI NO: 11358842 NR Description: serine/threonine-specific protein kinase-like
MGVQSYYRLFCCGCGANAAAGDREGDEDGGFEAFADKGAAEAGPRGLSWAQVEAMTGRFTSAVVGEGGFSTVYLARLSGGALAAVKVHRSSERLHRVFRQELDALRRVRHPHIVRLLAFCDQQEEGVLVLEFAANGNLHERLHGGGKAAGTMPWARRVSAALQVARALEYLHDRCEPQVVHGDVKASNVLLDAAMSAKLCDFGSARTGFSAAVRPRPSARTAMLGSPGYVDPHYIRSGVVTKKTDVYSFGVLLLELLTGMEAFCAEEGGRLLTAAVAPRLRAGDPPRGMVDERLGTAYDAAEAAAVAALAAACVGENPSLRPSMADVVRTLEQSAQGSISAVGMASDGHWKV

SEQ ID NO: 5270 - DNA, 1415 bp, Zea mays subsp. mays
  misc_feature (1)..(1415): Ceres Seq. ID no. 12409621
  misc_feature: MA Experiment ID: 108504 Result: Down-regulated in Transcription
  misc_feature: MA Experiment 108504 PARAMETER Experiment Name: Zm_Drought_P Parameter: Age (day) Value: 8
  misc_feature: MA Experiment 108504 PARAMETER Experiment Name: Zm_Drought_P Parameter: Organism Value: Zea mays
  misc_feature: MA Experiment 108504 PARAMETER Experiment Name: Zm_Drought_P Parameter: Plant Line Value: 35A19
  misc_feature: MA Experiment 108504 PARAMETER Experiment Name: Zm_Drought_P Parameter: Timepoint (hr) Value: 12
  misc_feature: MA Experiment 108504 PARAMETER Experiment Name: Zm_Drought_P Parameter: Tissue Value: Aerial
  misc_feature: MA Experiment 108504 PARAMETER Experiment Name: Zm_Drought_P Parameter: Treatment Value: Drought vs. No Drought
  misc_feature: MA Experiment ID: 108515 Result: Down-regulated in Transcription
  misc_feature: MA Experiment 108515 PARAMETER Experiment Name: Zm_2mM_SA_P Parameter: Age (day) Value: 8
  misc_feature: MA Experiment 108515 PARAMETER Experiment Name: Zm_2mM_SA_P Parameter: Organism Value: Zea mays
  misc_feature: MA Experiment 108515 PARAMETER Experiment Name: Zm_2mM_SA_P Parameter: Plant Line Value: 35A19
  misc_feature: MA Experiment 108515 PARAMETER Experiment Name: Zm_2mM_SA_P Parameter: Timepoint (hr) Value: 12
  misc_feature: MA Experiment 108515 PARAMETER Experiment Name: Zm_2mM_SA_P Parameter: Tissue Value: Aerial
  misc_feature: MA Experiment 108515 PARAMETER Experiment Name: Zm_2mM_SA_P Parameter: Treatment Value: 2mM SA vs. No Treatment
  misc_feature: MA Experiment ID: 108523 Result: Down-regulated in Transcription
  misc_feature: MA Experiment 108523 PARAMETER Experiment Name: Zm_42deg_Heat_P Parameter: Age (day) Value: 8
  misc_feature: MA Experiment 108523 PARAMETER Experiment Name: Zm_42deg_Heat_P Parameter: Organism Value: Zea mays
  misc_feature: MA Experiment 108523 PARAMETER Experiment Name: Zm_42deg_Heat_P Parameter: Plant Line Value: 35A19
  misc_feature: MA Experiment 108523 PARAMETER Experiment Name: Zm_42deg_Heat_P Parameter: Temperature (deg C) Value: 42 vs. 22
  misc_feature: MA Experiment 108523 PARAMETER Experiment Name: Zm_42deg_Heat_P Parameter: Timepoint (hr) Value: 6
  misc_feature: MA Experiment 108523 PARAMETER Experiment Name: Zm_42deg_Heat_P Parameter: Tissue Value: Aerial
  misc_feature: MA Experiment ID: 108543 Result: Up-regulated in Transcription
  misc_feature: MA Experiment ID: 108544 Result: Down-regulated in Transcription
  misc_feature: MA Experiment ID: 108556 Result: Down-regulated in Transcription
  misc_feature: MA Experiment 108556 PARAMETER Experiment Name: Zm_Drought_P Parameter: Age (day) Value: 9
  misc_feature: MA Experiment 108556 PARAMETER Experiment Name: Zm_Drought_P Parameter: Organism Value: Zea mays
  misc_feature: MA Experiment 108556 PARAMETER Experiment Name: Zm_Drought_P Parameter: Plant Line Value: 35A19
  misc_feature: MA Experiment 108556 PARAMETER Experiment Name: Zm_Drought_P Parameter: Timepoint (hr) Value: 24
  misc_feature: MA Experiment 108556 PARAMETER Experiment Name: Zm_Drought_P Parameter: Tissue Value: Aerial
  misc_feature: MA Experiment 108556 PARAMETER Experiment Name: Zm_Drought_P Parameter: Treatment Value: Drought vs. No Drought
  misc_feature: MA Experiment ID: 108559 Result: Down-regulated in Transcription
  misc_feature: MA Experiment 108559 PARAMETER Experiment Name: Zm_5mM_NO_P Parameter: Age (day) Value: 8
  misc_feature: MA Experiment 108559 PARAMETER Experiment Name: Zm_5mM_NO_P Parameter: Organism Value: Zea mays
  misc_feature: MA Experiment 108559 PARAMETER Experiment Name: Zm_5mM_NO_P Parameter: Plant Line Value: 35A19
  misc_feature: MA Experiment 108559 PARAMETER Experiment Name: Zm_5mM_NO_P Parameter: Timepoint (hr) Value: 12
  misc_feature: MA Experiment 108559 PARAMETER Experiment Name: Zm_5mM_NO_P Parameter: Tissue Value: Aerial
  misc_feature: MA Experiment 108559 PARAMETER Experiment Name: Zm_5mM_NO_P Parameter: Treatment Value: 5mM NO vs. No Treatment
  misc_feature: MA Experiment ID: 108597 Result: Down-regulated in Transcription
  misc_feature: MA Experiment 108597 PARAMETER Experiment Name: Zm_100uM_ABA_P Parameter: Age (day) Value: 9
  misc_feature: MA Experiment 108597 PARAMETER Experiment Name: Zm_100uM_ABA_P Parameter: Organism Value: Zea mays
  misc_feature: MA Experiment 108597 PARAMETER Experiment Name: Zm_100uM_ABA_P Parameter: Plant Line Value: 35A19
  misc_feature: MA Experiment 108597 PARAMETER Experiment Name: Zm_100uM_ABA_P Parameter: Timepoint (hr) Value: 24
  misc_feature: MA Experiment 108597 PARAMETER Experiment Name: Zm_100uM_ABA_P Parameter: Tissue Value: Aerial
  misc_feature: MA Experiment 108597 PARAMETER Experiment Name: Zm_100uM_ABA_P Parameter: Treatment Value: 100uM ABA vs. No Treatment
  misc_feature: MA Experiment ID: 108687 Result: Down-regulated in Transcription
  misc_feature: MA Experiment 108687 PARAMETER Experiment Name: Zm_Embryos-Flowers__P Parameter: Tissue Value: Embryo vs. Aerial+
  misc_feature: MA Experiment ID: 20000108 Result: Down-regulated in Transcription
  misc_feature: MA Experiment 20000108 PARAMETER Experiment Name: Zm_Root-Tips_P Parameter: Age (day) Value: 12
  misc_feature: MA Experiment 20000108 PARAMETER Experiment Name: Zm_Root-Tips_P Parameter: Organism Value: Zea mays
  misc_feature: MA Experiment 20000108 PARAMETER Experiment Name: Zm_Root-Tips_P Parameter: Tissue Value: Root tips vs. Root mid region    35
  misc_feature: MA Experiment 20000108 PARAMETER Experiment Name: Zm_Root-Tips_P Parameter: Tissue Value: Root tips vs. Root mid region   Sequence Listing-Misc Features (4)
  misc_feature: MA Experiment ID: 20000477 Result: Down-regulated in Transcription
  misc_feature: MA Experiment 20000477 PARAMETER Experiment Name: Zm_5mM_SA_P Parameter: Age (day) Value: 10
  misc_feature: MA Experiment 20000477 PARAMETER Experiment Name: Zm_5mM_SA_P Parameter: Organism Value: Zea mays
  misc_feature: MA Experiment 20000477 PARAMETER Experiment Name: Zm_5mM_SA_P Parameter: Plant Line Value: 35A19
  misc_feature: MA Experiment 20000477 PARAMETER Experiment Name: Zm_5mM_SA_P Parameter: Timepoint (hr) Value: 48
  misc_feature: MA Experiment 20000477 PARAMETER Experiment Name: Zm_5mM_SA_P Parameter: Tissue Value: Aerial
  misc_feature: MA Experiment 20000477 PARAMETER Experiment Name: Zm_5mM_SA_P Parameter: Treatment Value: 5mM SA vs. No Treatment
  misc_feature: MA Experiment ID: 20000478 Result: Down-regulated in Transcription
  misc_feature: MA Experiment 20000478 PARAMETER Experiment Name: Zm_5mM_SA_P Parameter: Age (day) Value: 11
  misc_feature: MA Experiment 20000478 PARAMETER Experiment Name: Zm_5mM_SA_P Parameter: Organism Value: Zea mays
  misc_feature: MA Experiment 20000478 PARAMETER Experiment Name: Zm_5mM_SA_P Parameter: Plant Line Value: 35A19
  misc_feature: MA Experiment 20000478 PARAMETER Experiment Name: Zm_5mM_SA_P Parameter: Timepoint (hr) Value: 72
  misc_feature: MA Experiment 20000478 PARAMETER Experiment Name: Zm_5mM_SA_P Parameter: Tissue Value: Aerial
  misc_feature: MA Experiment 20000478 PARAMETER Experiment Name: Zm_5mM_SA_P Parameter: Treatment Value: 5mM SA vs. No Treatment
  misc_feature: MA Experiment ID: 20000479 Result: Down-regulated in Transcription
  misc_feature: MA Experiment 20000479 PARAMETER Experiment Name: Zm_Drought_P Parameter: Age (day) Value: 10
  misc_feature: MA Experiment 20000479 PARAMETER Experiment Name: Zm_Drought_P Parameter: Organism Value: Zea mays
  misc_feature: MA Experiment 20000479 PARAMETER Experiment Name: Zm_Drought_P Parameter: Plant Line Value: 35A19
  misc_feature: MA Experiment 20000479 PARAMETER Experiment Name: Zm_Drought_P Parameter: Timepoint (hr) Value: 48
  misc_feature: MA Experiment 20000479 PARAMETER Experiment Name: Zm_Drought_P Parameter: Tissue Value: Aerial
  misc_feature: MA Experiment 20000479 PARAMETER Experiment Name: Zm_Drought_P Parameter: Treatment Value: Drought vs. No Drought
  misc_feature: MA Experiment ID: 20000480 Result: Down-regulated in Transcription
  misc_feature: MA Experiment 20000480 PARAMETER Experiment Name: Zm_Drought_P Parameter: Age (day) Value: 11
  misc_feature: MA Experiment 20000480 PARAMETER Experiment Name: Zm_Drought_P Parameter: Organism Value: Zea mays
  misc_feature: MA Experiment 20000480 PARAMETER Experiment Name: Zm_Drought_P Parameter: Plant Line Value: 35A19
  misc_feature: MA Experiment 20000480 PARAMETER Experiment Name: Zm_Drought_P Parameter: Timepoint (hr) Value: 72
  misc_feature: MA Experiment 20000480 PARAMETER Experiment Name: Zm_Drought_P Parameter: Tissue Value: Aerial
  misc_feature: MA Experiment 20000480 PARAMETER Experiment Name: Zm_Drought_P Parameter: Treatment Value: Drought vs. No Drought
  misc_feature: MA Experiment ID: 20000492 Result: Up-regulated in Transcription
  misc_feature: MA Experiment 20000492 PARAMETER Experiment Name: Zm_Hybrid_Seed_Dev_P Parameter: DAP Value: 12
  misc_feature: MA Experiment 20000492 PARAMETER Experiment Name: Zm_Hybrid_Seed_Dev_P Parameter: Organism Value: Zea mays
  misc_feature: MA Experiment 20000492 PARAMETER Experiment Name: Zm_Hybrid_Seed_Dev_P Parameter: Plant Line Value: 35A19
  misc_feature: MA Experiment 20000492 PARAMETER Experiment Name: Zm_Hybrid_Seed_Dev_P Parameter: Tissue Value: Fert Kernel vs. Unfert Floret
  misc_feature: MA Experiment ID: 20000626 Result: Down-regulated in Transcription
  misc_feature: MA Experiment 20000626 PARAMETER Experiment Name: Zm_Herbicide-Treatments_P Parameter: Timepoint (hr) Value: 12
  misc_feature: MA Experiment 20000626 PARAMETER Experiment Name: Zm_Herbicide-Treatments_P Parameter: Tissue Value: Aerial
  misc_feature: MA Experiment 20000626 PARAMETER Experiment Name: Zm_Herbicide-Treatments_P Parameter: Treatment Value: Roundup vs. No Treatment
gtcggcgaccccaaacctctgtcgagagtttcacctccggtcgctggtttcctccaatctccgtggtagttcagcgcgagcgggcggcggggtttgagctcgatggccacttccggcgaacaatcggctggcggcgggtctgcggcgagggcgtcgaagctgcggtacccgctgcggtcggcgagcaaggggaaggcggcggtcgttcccccggcggctgatgctcctcccaccatctctgctccgcgacgggcaaaaccatcttcagatgtcagcaagagcatgtgtttagacctttctgtgaaggataattctgccaaacccccacggaggcactcaatacaaaccaagctaggagctagtccaaggccaacaccttctggaactgtgactccggtgtctggggttcggtcaaagagatcggaaagccaggggaggtttgataccccgacatcagaagtgtccatgtccatctcaaggcgcaagttcagcacgctttcttcaatctcgtactggatgacacagatcaggctggcagaggctgcttccaagcactcggtttctctgggcttctttaagcttgctcttgaatcagaatgtgagcctttggaccggatgagggaagaactcaagtcctacgtagcacggcatggcctggcgacagaattggaggacccagttaaggacattctccaggtttatgatattttggatgattttgagaagctgaagatctctgcagagccctcacagcaaccaaaaaagtctgacaaggctgctcgtactgccacaaatgcgtcaccgaatggtaacctgaagccaagatcactgaactctgatgctactgaaagcaaggatgctgtaaagaaagagggcatccagaaagtaaatcctggtgcaagggtcagaggctcctgtaacaggaatccagtcaaaaacaccaccgcaaaggaagcagttgccaagaacaccggtaaggaaaccaagaaaggggccaagggtcagcaggaagttagcgaggctccgtcagcccttccaaatcaggaatctgctgatgttgtgaaggagatgacccatgaagataaagagaacaatggcgatattgaaatggcagtggatgttgccgtagcccaagatatctagaacagccggaccaacttcagattcgatccccttttttttctatcgctgaagatgaagtgttagcgtgtggttgcttattttggttttcaattgttaatatgttattagtagagcttgtctgtgtgattgctgtctggctggaccttgaacggtcttcaagagcgtgtcataagttgatgattgctttcattcctctgtcaagtttgcggctttgcatgtgataatccgtgcaactgaatatagttgaatttatctattctcgtggttcctcc

SEQ ID NO: 5271 - protein, 346 aa, Zea mays subsp. mays
  peptide (1)..(346): Ceres Seq. ID no. 12409622
  misc_feature (1)..(329): Homolog of NCBI NO: 15241865 NR Description: unknown protein; protein id: At5g62550.1 thaliana] >gi|10178086|dbj|BAB11505.1| gene_id:K19B1.16~unknown
MATSGEQSAGGGSAARASKLRYPLRSASKGKAAVVPPAADAPPTISAPRRAKPSSDVSKSMCLDLSVKDNSAKPPRRHSIQTKLGASPRPTPSGTVTPVSGVRSKRSESQGRFDTPTSEVSMSISRRKFSTLSSISYWMTQIRLAEAASKHSVSLGFFKLALESECEPLDRMREELKSYVARHGLATELEDPVKDILQVYDILDDFEKLKISAEPSQQPKKSDKAARTATNASPNGNLKPRSLNSDATESKDAVKKEGIQKVNPGARVRGSCNRNPVKNTTAKEAVAKNTGKETKKGAKGQQEVSEAPSALPNQESADVVKEMTHEDKENNGDIEMAVDVAVAQDI

SEQ ID NO: 5272 - protein, 286 aa, Zea mays subsp. mays
  peptide (1)..(286): Ceres Seq. ID no. 12409623
  misc_feature (1)..(269): Homolog of NCBI NO: 15241865 NR Description: unknown protein; protein id: At5g62550.1 thaliana] >gi|10178086|dbj|BAB11505.1| gene_id:K19B1.16~unknown
MCLDLSVKDNSAKPPRRHSIQTKLGASPRPTPSGTVTPVSGVRSKRSESQGRFDTPTSEVSMSISRRKFSTLSSISYWMTQIRLAEAASKHSVSLGFFKLALESECEPLDRMREELKSYVARHGLATELEDPVKDILQVYDILDDFEKLKISAEPSQQPKKSDKAARTATNASPNGNLKPRSLNSDATESKDAVKKEGIQKVNPGARVRGSCNRNPVKNTTAKEAVAKNTGKETKKGAKGQQEVSEAPSALPNQESADVVKEMTHEDKENNGDIEMAVDVAVAQDI

SEQ ID NO: 5273 - protein, 225 aa, Zea mays subsp. mays
  peptide (1)..(225): Ceres Seq. ID no. 12409624
  misc_feature (1)..(208): Homolog of NCBI NO: 15241865 NR Description: unknown protein; protein id: At5g62550.1 thaliana] >gi|10178086|dbj|BAB11505.1| gene_id:K19B1.16~unknown
MSISRRKFSTLSSISYWMTQIRLAEAASKHSVSLGFFKLALESECEPLDRMREELKSYVARHGLATELEDPVKDILQVYDILDDFEKLKISAEPSQQPKKSDKAARTATNASPNGNLKPRSLNSDATESKDAVKKEGIQKVNPGARVRGSCNRNPVKNTTAKEAVAKNTGKETKKGAKGQQEVSEAPSALPNQESADVVKEMTHEDKENNGDIEMAVDVAVAQDI

SEQ ID NO: 5274 - DNA, 1097 bp, Zea mays subsp. mays; identical to SEQ ID NO: 3807
  misc_feature (1)..(1097): Ceres Seq. ID no. 13494437
  misc_feature: MA Experiment ID: 108504 Result: Up-regulated in Transcription
  misc_feature: MA Experiment 108504 PARAMETER Experiment Name: Zm_Drought_P Parameter: Age (day) Value: 8
  misc_feature: MA Experiment 108504 PARAMETER Experiment Name: Zm_Drought_P Parameter: Organism Value: Zea mays
  misc_feature: MA Experiment 108504 PARAMETER Experiment Name: Zm_Drought_P Parameter: Plant Line Value: 35A19
  misc_feature: MA Experiment 108504 PARAMETER Experiment Name: Zm_Drought_P Parameter: Timepoint (hr) Value: 12
  misc_feature: MA Experiment 108504 PARAMETER Experiment Name: Zm_Drought_P Parameter: Tissue Value: Aerial
  misc_feature: MA Experiment 108504 PARAMETER Experiment Name: Zm_Drought_P Parameter: Treatment Value: Drought vs. No Drought
  misc_feature: MA Experiment ID: 108513 Result: Up-regulated in Transcription
  misc_feature: MA Experiment 108513 PARAMETER Experiment Name: Zm_100uM_ABA_P Parameter: Age (day) Value: 8
  misc_feature: MA Experiment 108513 PARAMETER Experiment Name: Zm_100uM_ABA_P Parameter: Organism Value: Zea mays
  misc_feature: MA Experiment 108513 PARAMETER Experiment Name: Zm_100uM_ABA_P Parameter: Plant Line Value: 35A19
  misc_feature: MA Experiment 108513 PARAMETER Experiment Name: Zm_100uM_ABA_P Parameter: Timepoint (hr) Value: 6
  misc_feature: MA Experiment 108513 PARAMETER Experiment Name: Zm_100uM_ABA_P Parameter: Tissue Value: Aerial
  misc_feature: MA Experiment 108513 PARAMETER Experiment Name: Zm_100uM_ABA_P Parameter: Treatment Value: 100uM ABA vs. No Treatment
  misc_feature: MA Experiment ID: 108522 Result: Up-regulated in Transcription
  misc_feature: MA Experiment 108522 PARAMETER Experiment Name: Zm_42deg_Heat_P Parameter: Age (day) Value: 8
  misc_feature: MA Experiment 108522 PARAMETER Experiment Name: Zm_42deg_Heat_P Parameter: Organism Value: Zea mays
  misc_feature: MA Experiment 108522 PARAMETER Experiment Name: Zm_42deg_Heat_P Parameter: Plant Line Value: 35A19
  misc_feature: MA Experiment 108522 PARAMETER Experiment Name: Zm_42deg_Heat_P Parameter: Temperature (deg C) Value: 42 vs. 22
  misc_feature: MA Experiment 108522 PARAMETER Experiment Name: Zm_42deg_Heat_P Parameter: Timepoint (hr) Value: 1
  misc_feature: MA Experiment 108522 PARAMETER Experiment Name: Zm_42deg_Heat_P Parameter: Tissue Value: Aerial
  misc_feature: MA Experiment ID: 108523 Result: Up-regulated in Transcription
  misc_feature: MA Experiment 108523 PARAMETER Experiment Name: Zm_42deg_Heat_P Parameter: Age (day) Value: 8
  misc_feature: MA Experiment 108523 PARAMETER Experiment Name: Zm_42deg_Heat_P Parameter: Organism Value: Zea mays
  misc_feature: MA Experiment 108523 PARAMETER Experiment Name: Zm_42deg_Heat_P Parameter: Plant Line Value: 35A19
  misc_feature: MA Experiment 108523 PARAMETER Experiment Name: Zm_42deg_Heat_P Parameter: Temperature (deg C) Value: 42 vs. 22
  misc_feature: MA Experiment 108523 PARAMETER Experiment Name: Zm_42deg_Heat_P Parameter: Timepoint (hr) Value: 6
  misc_feature: MA Experiment 108523 PARAMETER Experiment Name: Zm_42deg_Heat_P Parameter: Tissue Value: Aerial
  misc_feature: MA Experiment ID: 108532 Result: Up-regulated in Transcription
  misc_feature: MA Experiment 108532 PARAMETER Experiment Name: Zm_20uM_KNO3_H-to-L_P Parameter: Age (day) Value: 11
  misc_feature: MA Experiment 108532 PARAMETER Experiment Name: Zm_20uM_KNO3_H-to-L_P Parameter: Organism Value: Zea mays
  misc_feature: MA Experiment 108532 PARAMETER Experiment Name: Zm_20uM_KNO3_H-to-L_P Parameter: Plant Line Value: 35A19
  misc_feature: MA Experiment 108532 PARAMETER Experiment Name: Zm_20uM_KNO3_H-to-L_P Parameter: Timepoint (hr) Value: 16
  misc_feature: MA Experiment 108532 PARAMETER Experiment Name: Zm_20uM_KNO3_H-to-L_P Parameter: Tissue Value: Roots
  misc_feature: MA Experiment 108532 PARAMETER Experiment Name: Zm_20uM_KNO3_H-to-L_P Parameter: Treatment Value: 20uM KNO3 vs. 60mM KNO3
  misc_feature: MA Experiment ID: 108534 Result: Down-regulated in Transcription
  misc_feature: MA Experiment 108534 PARAMETER Experiment Name: Zm_4deg_Cold_P Parameter: Age (hr) Value: 8
  misc_feature: MA Experiment 108534 PARAMETER Experiment Name: Zm_4deg_Cold_P Parameter: Organism Value: Zea mays
  misc_feature: MA Experiment 108534 PARAMETER Experiment Name: Zm_4deg_Cold_P Parameter: Plant Line Value: 35A19
  misc_feature: MA Experiment 108534 PARAMETER Experiment Name: Zm_4deg_Cold_P Parameter: Temperature (deg C) Value: 4 vs. 22
  misc_feature: MA Experiment 108534 PARAMETER Experiment Name: Zm_4deg_Cold_P Parameter: Timepoint (hr) Value: 6
  misc_feature: MA Experiment 108534 PARAMETER Experiment Name: Zm_4deg_Cold_P Parameter: Tissue Value: Aerial
  misc_feature: MA Experiment ID: 108540 Result: Up-regulated in Transcription
  misc_feature: MA Experiment 108540 PARAMETER Experiment Name: Zm_20percent_PEG_P Parameter: Age (day) Value: 8
  misc_feature: MA Experiment 108540 PARAMETER Experiment Name: Zm_20percent_PEG_P Parameter: Organism Value: Zea mays
  misc_feature: MA Experiment 108540 PARAMETER Experiment Name: Zm_20percent_PEG_P Parameter: Plant Line Value: 35A19
  misc_feature: MA Experiment 108540 PARAMETER Experiment Name: Zm_20percent_PEG_P Parameter: Timepoint (hr) Value: 6
  misc_feature: MA Experiment 108540 PARAMETER Experiment Name: Zm_20percent_PEG_P Parameter: Tissue Value: Aerial
  misc_feature: MA Experiment 108540 PARAMETER Experiment Name: Zm_20percent_PEG_P Parameter: Treatment Value: 20percent PEG vs. No Treatment
  misc_feature: MA Experiment ID: 108543 Result: Up-regulated in Transcription
  misc_feature: MA Experiment ID: 108544 Result: Up-regulated in Transcription
  misc_feature: MA Experiment ID: 108548 Result: Up-regulated in Transcription
  misc_feature: MA Experiment 108548 PARAMETER Experiment Name: Zm_20uM_KNO3_H-to-L_P Parameter: Age (day) Value: 11
  misc_feature: MA Experiment 108548 PARAMETER Experiment Name: Zm_20uM_KNO3_H-to-L_P Parameter: Organism Value: Zea mays
  misc_feature: MA Experiment 108548 PARAMETER Experiment Name: Zm_20uM_KNO3_H-to-L_P Parameter: Plant Line Value: 35A19
  misc_feature: MA Experiment 108548 PARAMETER Experiment Name: Zm_20uM_KNO3_H-to-L_P Parameter: Timepoint (hr) Value: 4
  misc_feature: MA Experiment 108548 PARAMETER Experiment Name: Zm_20uM_KNO3_H-to-L_P Parameter: Tissue Value: Roots
  misc_feature: MA Experiment 108548 PARAMETER Experiment Name: Zm_20uM_KNO3_H-to-L_P Parameter: Treatment Value: 20uM KNO3 vs. 60mM KNO3
  misc_feature: MA Experiment ID: 108689 Result: Up-regulated in Transcription
  misc_feature: MA Experiment 108689 PARAMETER Experiment Name: Zm_Drought_Roots_P Parameter: Age (day) Value: 9
  misc_feature: MA Experiment 108689 PARAMETER Experiment Name: Zm_Drought_Roots_P Parameter: Organism Value: Zea mays
  misc_feature: MA Experiment 108689 PARAMETER Experiment Name: Zm_Drought_Roots_P Parameter: Plant Line Value: 35A19
  misc_feature: MA Experiment 108689 PARAMETER Experiment Name: Zm_Drought_Roots_P Parameter: Timepoint (hr) Value: 24
  misc_feature: MA Experiment 108689 PARAMETER Experiment Name: Zm_Drought_Roots_P Parameter: Tissue Value: Roots
  misc_feature: MA Experiment 108689 PARAMETER Experiment Name: Zm_Drought_Roots_P Parameter: Treatment Value: Drought vs. No Drought
  misc_feature: MA Experiment ID: 20000480 Result: Up-regulated in Transcription
  misc_feature: MA Experiment 20000480 PARAMETER Experiment Name: Zm_Drought_P Parameter: Age (day) Value: 11
  misc_feature: MA Experiment 20000480 PARAMETER Experiment Name: Zm_Drought_P Parameter: Organism Value: Zea mays
  misc_feature: MA Experiment 20000480 PARAMETER Experiment Name: Zm_Drought_P Parameter: Plant Line Value: 35A19
  misc_feature: MA Experiment 20000480 PARAMETER Experiment Name: Zm_Drought_P Parameter: Timepoint (hr) Value: 72
  misc_feature: MA Experiment 20000480 PARAMETER Experiment Name: Zm_Drought_P Parameter: Tissue Value: Aerial
  misc_feature: MA Experiment 20000480 PARAMETER Experiment Name: Zm_Drought_P Parameter: Treatment Value: Drought vs. No Drought
  misc_feature: MA Experiment ID: 20000487 Result: Down-regulated in Transcription
  misc_feature: MA Experiment 20000487 PARAMETER Experiment Name: Zm_50mM_NH4NO3_L_to_H_P Parameter: Organism Value: Zea mays
  misc_feature: MA Experiment 20000487 PARAMETER Experiment Name: Zm_50mM_NH4NO3_L_to_H_P Parameter: Timepoint (hr) Value: 4
  misc_feature: MA Experiment 20000487 PARAMETER Experiment Name: Zm_50mM_NH4NO3_L_to_H_P Parameter: Tissue Value: Leaves
  misc_feature: MA Experiment 20000487 PARAMETER Experiment Name: Zm_50mM_NH4NO3_L_to_H_P Parameter: Treatment Value: 50mM NH4NO3 vs. 100mM Mannitol
  misc_feature: MA Experiment ID: 20000535 Result: Up-regulated in Transcription
  misc_feature: MA Experiment 20000535 PARAMETER Experiment Name: Zm_Hybrid_Seed_Dev_P Parameter: DAP Value: 30 vs. 12
  misc_feature: MA Experiment 20000535 PARAMETER Experiment Name: Zm_Hybrid_Seed_Dev_P Parameter: Organism Value: Zea mays
  misc_feature: MA Experiment 20000535 PARAMETER Experiment Name: Zm_Hybrid_Seed_Dev_P Parameter: Plant Line Value: 35A19
  misc_feature: MA Experiment 20000535 PARAMETER Experiment Name: Zm_Hybrid_Seed_Dev_P Parameter: Tissue Value: Embryo vs. Unfert Floret
  misc_feature: MA Experiment ID: 20000626 Result: Up-regulated in Transcription
  misc_feature: MA Experiment 20000626 PARAMETER Experiment Name: Zm_Herbicide-Treatments_P Parameter: Timepoint (hr) Value: 12
  misc_feature: MA Experiment 20000626 PARAMETER Experiment Name: Zm_Herbicide-Treatments_P Parameter: Tissue Value: Aerial
  misc_feature: MA Experiment 20000626 PARAMETER Experiment Name: Zm_Herbicide-Treatments_P Parameter: Treatment Value: Roundup vs. No Treatment
  misc_feature: MA Experiment ID: 20001606 Result: Down-regulated in Transcription
  misc_feature: MA Experiment 20001606 PARAMETER Experiment Name: Zm_50ppm_KNO3_L-to-H_P Parameter: Age (day) Value: 19
  misc_feature: MA Experiment 20001606 PARAMETER Experiment Name: Zm_50ppm_KNO3_L-to-H_P Parameter: Organism Value: Zea mays
  misc_feature: MA Experiment 20001606 PARAMETER Experiment Name: Zm_50ppm_KNO3_L-to-H_P Parameter: Plant Line Value: 35A19
  misc_feature: MA Experiment 20001606 PARAMETER Experiment Name: Zm_50ppm_KNO3_L-to-H_P Parameter: Timepoint (hr) Value: 8
  misc_feature: MA Experiment 20001606 PARAMETER Experiment Name: Zm_50ppm_KNO3_L-to-H_P Parameter: Tissue Value: Shoots
  misc_feature: MA Experiment 20001606 PARAMETER Experiment Name: Zm_50ppm_KNO3_L-to-H_P Parameter: Treatment Value: 50ppm KNO3 vs. 50ppm KCl
  misc_feature: MA Experiment ID: 20001608 Result: Down-regulated in Transcription
  misc_feature: MA Experiment 20001608 PARAMETER Experiment Name: Zm_50ppm_KNO3_L-to-H_P Parameter: Age (day) Value: 21
  misc_feature: MA Experiment 20001608 PARAMETER Experiment Name: Zm_50ppm_KNO3_L-to-H_P Parameter: Organism Value: Zea mays
  misc_feature: MA Experiment 20001608 PARAMETER Experiment Name: Zm_50ppm_KNO3_L-to-H_P Parameter: Plant Line Value: 35A19
  misc_feature: MA Experiment 20001608 PARAMETER Experiment Name: Zm_50ppm_KNO3_L-to-H_P Parameter: Timepoint (hr) Value: 48
  misc_feature: MA Experiment 20001608 PARAMETER Experiment Name: Zm_50ppm_KNO3_L-to-H_P Parameter: Tissue Value: Shoots
  misc_feature: MA Experiment 20001608 PARAMETER Experiment Name: Zm_50ppm_KNO3_L-to-H_P Parameter: Treatment Value: 50ppm KNO3 vs. 50ppm KCl

SEQ ID NO: 5275 - protein, 225 aa, Zea mays subsp. mays; identical to SEQ ID NO: 3808
  peptide (1)..(225): Ceres Seq. ID no. 13494438
  misc_feature (70)..(141): Pfam Name: linker histone H1 and H5 family Pfam Description: linker histone H1 and H5 family
  misc_feature (70)..(141): Pfam Name: linker histone H1 and H5 family Pfam Description: linker histone H1 and H5 family
  misc_feature (70)..(141): Pfam Name: linker histone H1 and H5 family Pfam Description: linker histone H1 and H5 family
  misc_feature (1)..(225): Homolog of NCBI NO: 6006363 NR Description: ESTs AU078183(C62904),C73912(E21020) correspond a region of the predicted gene.~Similar to water stress inducible
  misc_feature (26)..(220): Homolog of NCBI NO: 7439658 NR Description: histone H1, stress-inducible - tomato
  misc_feature (27)..(220): Homolog of NCBI NO: 23506611 NR Description: histone H1D [Nicotiana tabacum]
  misc_feature (22)..(220): Homolog of NCBI NO: 7595978 NR Description: histone H1 variant [Lycopersicon chilense]
  misc_feature (21)..(220): Homolog of NCBI NO: 27529850 NR Description: stress-inducible H1 histone-like protein
  misc_feature (26)..(220): Homolog of NCBI NO: 7439658 NR Description: histone H1, stress-inducible - tomato
  misc_feature (22)..(220): Homolog of NCBI NO: 7595978 NR Description: histone H1 variant [Lycopersicon chilense]
  misc_feature (27)..(220): Homolog of NCBI NO: 23506611 NR Description: histone H1D [Nicotiana tabacum]
  misc_feature (26)..(220): Homolog of NCBI NO: 7439658 NR Description: histone H1, stress-inducible - tomato
  misc_feature (1)..(225): Homolog of NCBI NO: 6006363 NR Description: ESTs AU078183(C62904),C73912(E21020) correspond a region of the predicted gene.~Similar to water stress inducible
  misc_feature (15)..(225): Homolog of NCBI NO: 13540391 NR Description: histone H1 [Pisum sativum]
  misc_feature (1)..(225): Homolog of NCBI NO: 2623960 NR Description: histone H1 [Apium graveolens]
  misc_feature (77)..(215): Homolog of NCBI NO: 7489483 NR Description: histone H1 homolog - rice
  misc_feature (27)..(220): Homolog of NCBI NO: 5726575 NR Description: histone H1C [Nicotiana tabacum]
  misc_feature (27)..(220): Homolog of NCBI NO: 729668 NR Description: Histone H1 >gi|2147479|pir||S65059 histone H1,
  misc_feature (21)..(220): Homolog of NCBI NO: 27529850 NR Description: stress-inducible H1 histone-like protein
  misc_feature (15)..(225): Homolog of NCBI NO: 13540391 NR Description: histone H1 [Pisum sativum]
  misc_feature (1)..(225): Homolog of NCBI NO: 2623960 NR Description: histone H1 [Apium graveolens]
  misc_feature (77)..(215): Homolog of NCBI NO: 7489483 NR Description: histone H1 homolog - rice
  misc_feature (27)..(220): Homolog of NCBI NO: 5726575 NR Description: histone H1C [Nicotiana tabacum]
  misc_feature (27)..(220): Homolog of NCBI NO: 729668 NR Description: Histone H1 >gi|2147479|pir||S65059 histone H1,
  misc_feature (21)..(220): Homolog of NCBI NO: 27529850 NR Description: stress-inducible H1 histone-like protein
  misc_feature (22)..(220): Homolog of NCBI NO: 7595978 NR Description: histone H1 variant [Lycopersicon chilense]
  misc_feature (27)..(220): Homolog of NCBI NO: 23506611 NR Description: histone H1D [Nicotiana tabacum]
  misc_feature (1)..(225): Homolog of NCBI NO: 6006363 NR Description: ESTs AU078183(C62904),C73912(E21020) correspond a region of the predicted gene.~Similar to water stress inducible
  misc_feature (27)..(220): Homolog of NCBI NO: 729668 NR Description: Histone H1 >gi|2147479|pir||S65059 histone H1,
  misc_feature (27)..(220): Homolog of NCBI NO: 5726575 NR Description: histone H1C [Nicotiana tabacum]
  misc_feature (77)..(215): Homolog of NCBI NO: 7489483 NR Description: histone H1 homolog - rice
  misc_feature (1)..(225): Homolog of NCBI NO: 2623960 NR Description: histone H1 [Apium graveolens]
  misc_feature (15)..(225): Homolog of NCBI NO: 13540391 NR Description: histone H1 [Pisum sativum]

SEQ ID NO: 5276 - protein, 149 aa, Zea mays subsp. mays; identical to SEQ ID NO: 3809
  peptide (1)..(149): Ceres Seq. ID no. 13494439
  misc_feature (1)..(65): Pfam Name: linker histone H1 and H5 family Pfam Description: linker histone H1 and H5 family
  misc_feature (1)..(65): Pfam Name: linker histone H1 and H5 family Pfam Description: linker histone H1 and H5 family
  misc_feature (1)..(65): Pfam Name: linker histone H1 and H5 family Pfam Description: linker histone H1 and H5 family
  misc_feature (1)..(149): Homolog of NCBI NO: 6006363 NR Description: ESTs AU078183(C62904),C73912(E21020) correspond a region of the predicted gene.~Similar to water stress inducible
  misc_feature (1)..(144): Homolog of NCBI NO: 7439658 NR Description: histone H1, stress-inducible - tomato
  misc_feature (1)..(144): Homolog of NCBI NO: 23506611 NR Description: histone H1D [Nicotiana tabacum]
  misc_feature (1)..(144): Homolog of NCBI NO: 7595978 NR Description: histone H1 variant [Lycopersicon chilense]
  misc_feature (1)..(144): Homolog of NCBI NO: 27529850 NR Description: stress-inducible H1 histone-like protein
  misc_feature (1)..(144): Homolog of NCBI NO: 7439658 NR Description: histone H1, stress-inducible - tomato
  misc_feature (1)..(144): Homolog of NCBI NO: 7595978 NR Description: histone H1 variant [Lycopersicon chilense]
  misc_feature (1)..(144): Homolog of NCBI NO: 23506611 NR Description: histone H1D [Nicotiana tabacum]
  misc_feature (1)..(144): Homolog of NCBI NO: 7439658 NR Description: histone H1, stress-inducible - tomato
  misc_feature (1)..(149): Homolog of NCBI NO: 6006363 NR Description: ESTs AU078183(C62904),C73912(E21020) correspond a region of the predicted gene.~Similar to water stress inducible
  misc_feature (1)..(149): Homolog of NCBI NO: 13540391 NR Description: histone H1 [Pisum sativum]
  misc_feature (1)..(149): Homolog of NCBI NO: 2623960 NR Description: histone H1 [Apium graveolens]
  misc_feature (1)..(139): Homolog of NCBI NO: 7489483 NR Description: histone H1 homolog - rice
  misc_feature (1)..(144): Homolog of NCBI NO: 5726575 NR Description: histone H1C [Nicotiana tabacum]
  misc_feature (1)..(144): Homolog of NCBI NO: 729668 NR Description: Histone H1 >gi|2147479|pir||S65059 histone H1,
  misc_feature (1)..(144): Homolog of NCBI NO: 27529850 NR Description: stress-inducible H1 histone-like protein
  misc_feature (1)..(149): Homolog of NCBI NO: 13540391 NR Description: histone H1 [Pisum sativum]
  misc_feature (1)..(149): Homolog of NCBI NO: 2623960 NR Description: histone H1 [Apium graveolens]
  misc_feature (1)..(139): Homolog of NCBI NO: 7489483 NR Description: histone H1 homolog - rice
  misc_feature (1)..(144): Homolog of NCBI NO: 5726575 NR Description: histone H1C [Nicotiana tabacum]
  misc_feature (1)..(144): Homolog of NCBI NO: 729668 NR Description: Histone H1 >gi|2147479|pir||S65059 histone H1,
  misc_feature (1)..(144): Homolog of NCBI NO: 27529850 NR Description: stress-inducible H1 histone-like protein
  misc_feature (1)..(144): Homolog of NCBI NO: 7595978 NR Description: histone H1 variant [Lycopersicon chilense]
  misc_feature (1)..(144): Homolog of NCBI NO: 23506611 NR Description: histone H1D [Nicotiana tabacum]
  misc_feature (1)..(149): Homolog of NCBI NO: 6006363 NR Description: ESTs AU078183(C62904),C73912(E21020) correspond a region of the predicted gene.~Similar to water stress inducible
  misc_feature (1)..(144): Homolog of NCBI NO: 729668 NR Description: Histone H1 >gi|2147479|pir||S65059 histone H1,
  misc_feature (1)..(144): Homolog of NCBI NO: 5726575 NR Description: histone H1C [Nicotiana tabacum]
  misc_feature (1)..(139): Homolog of NCBI NO: 7489483 NR Description: histone H1 homolog - rice
  misc_feature (1)..(149): Homolog of NCBI NO: 2623960 NR Description: histone H1 [Apium graveolens]
  misc_feature (1)..(149): Homolog of NCBI NO: 13540391 NR Description: histone H1 [Pisum sativum]

SEQ ID NO: 5277 - protein, 125 aa, Zea mays subsp. mays; identical to SEQ ID NO: 3810
  peptide (1)..(125): Ceres Seq. ID no. 13494440
  misc_feature (1)..(125): Homolog of NCBI NO: 6006363 NR Description: ESTs AU078183(C62904),C73912(E21020) correspond a region of the predicted gene.~Similar to water stress inducible
  misc_feature (1)..(120): Homolog of NCBI NO: 7439658 NR Description: histone H1, stress-inducible - tomato
  misc_feature (1)..(120): Homolog of NCBI NO: 23506611 NR Description: histone H1D [Nicotiana tabacum]
  misc_feature (1)..(120): Homolog of NCBI NO: 7595978 NR Description: histone H1 variant [Lycopersicon chilense]
  misc_feature (1)..(120): Homolog of NCBI NO: 27529850 NR Description: stress-inducible H1 histone-like protein
  misc_feature (1)..(120): Homolog of NCBI NO: 729668 NR Description: Histone H1 >gi|2147479|pir||S65059 histone H1,
  misc_feature (1)..(120): Homolog of NCBI NO: 5726575 NR Description: histone H1C [Nicotiana tabacum]
  misc_feature (1)..(115): Homolog of NCBI NO: 7489483 NR Description: histone H1 homolog - rice
  misc_feature (1)..(125): Homolog of NCBI NO: 2623960 NR Description: histone H1 [Apium graveolens]
  misc_feature (1)..(125): Homolog of NCBI NO: 13540391 NR Description: histone H1 [Pisum sativum]
  misc_feature (1)..(125): Homolog of NCBI NO: 6006363 NR Description: ESTs AU078183(C62904),C73912(E21020) correspond a region of the predicted gene.~Similar to water stress inducible
  misc_feature (1)..(120): Homolog of NCBI NO: 7439658 NR Description: histone H1, stress-inducible - tomato
  misc_feature (1)..(120): Homolog of NCBI NO: 23506611 NR Description: histone H1D [Nicotiana tabacum]
  misc_feature (1)..(120): Homolog of NCBI NO: 7595978 NR Description: histone H1 variant [Lycopersicon chilense]
  misc_feature (1)..(120): Homolog of NCBI NO: 27529850 NR Description: stress-inducible H1 histone-like protein
  misc_feature (1)..(120): Homolog of NCBI NO: 729668 NR Description: Histone H1 >gi|2147479|pir||S65059 histone H1,
  misc_feature (1)..(120): Homolog of NCBI NO: 5726575 NR Description: histone H1C [Nicotiana tabacum]
  misc_feature (1)..(115): Homolog of NCBI NO: 7489483 NR Description: histone H1 homolog - rice
  misc_feature (1)..(125): Homolog of NCBI NO: 2623960 NR Description: histone H1 [Apium graveolens]
  misc_feature (1)..(125): Homolog of NCBI NO: 13540391 NR Description: histone H1 [Pisum sativum]
  misc_feature (1)..(120): Homolog of NCBI NO: 23506611 NR Description: histone H1D [Nicotiana tabacum]
  misc_feature (1)..(120): Homolog of NCBI NO: 7595978 NR Description: histone H1 variant [Lycopersicon chilense]
  misc_feature (1)..(120): Homolog of NCBI NO: 27529850 NR Description: stress-inducible H1 histone-like protein
  misc_feature (1)..(120): Homolog of NCBI NO: 729668 NR Description: Histone H1 >gi|2147479|pir||S65059 histone H1,
  misc_feature (1)..(120): Homolog of NCBI NO: 5726575 NR Description: histone H1C [Nicotiana tabacum]
  misc_feature (1)..(115): Homolog of NCBI NO: 7489483 NR Description: histone H1 homolog - rice
  misc_feature (1)..(125): Homolog of NCBI NO: 2623960 NR Description: histone H1 [Apium graveolens]
  misc_feature (1)..(125): Homolog of NCBI NO: 13540391 NR Description: histone H1 [Pisum sativum]
  misc_feature (1)..(125): Homolog of NCBI NO: 6006363 NR Description: ESTs AU078183(C62904),C73912(E21020) correspond a region of the predicted gene.~Similar to water stress inducible
  misc_feature (1)..(120): Homolog of NCBI NO: 7439658 NR Description: histone H1, stress-inducible - tomato

SEQ ID NO: 5278 - DNA, 1465 bp, Zea mays subsp. mays
  misc_feature (1)..(1465): Ceres Seq. ID no. 12409617
  misc_feature: MA Experiment ID: 108528 Result: Up-regulated in Transcription
  misc_feature: MA Experiment 108528 PARAMETER Experiment Name: Zm_Imbibed_Seeds_P Parameter: Age (day) Value: 5 vs. 2
  misc_feature: MA Experiment 108528 PARAMETER Experiment Name: Zm_Imbibed_Seeds_P Parameter: Organism Value: Zea mays
  misc_feature: MA Experiment 108528 PARAMETER Experiment Name: Zm_Imbibed_Seeds_P Parameter: Plant Line Value: 35A19
  misc_feature: MA Experiment 108528 PARAMETER Experiment Name: Zm_Imbibed_Seeds_P Parameter: Tissue Value: Aerial vs. Embryo
  misc_feature: MA Experiment ID: 108529 Result: Down-regulated in Transcription
  misc_feature: MA Experiment 108529 PARAMETER Experiment Name: Zm_Imbibed_Seeds_P Parameter: Age (day) Value: 5 vs. 2
  misc_feature: MA Experiment 108529 PARAMETER Experiment Name: Zm_Imbibed_Seeds_P Parameter: Organism Value: Zea mays
  misc_feature: MA Experiment 108529 PARAMETER Experiment Name: Zm_Imbibed_Seeds_P Parameter: Plant Line Value: 35A19
  misc_feature: MA Experiment 108529 PARAMETER Experiment Name: Zm_Imbibed_Seeds_P Parameter: Tissue Value: Roots vs. Embryo
  misc_feature: MA Experiment ID: 108530 Result: Up-regulated in Transcription
  misc_feature: MA Experiment 108530 PARAMETER Experiment Name: Zm_Imbibed_Seeds_P Parameter: Age (day) Value: 6 vs. 2
  misc_feature: MA Experiment 108530 PARAMETER Experiment Name: Zm_Imbibed_Seeds_P Parameter: Organism Value: Zea mays
  misc_feature: MA Experiment 108530 PARAMETER Experiment Name: Zm_Imbibed_Seeds_P Parameter: Plant Line Value: 35A19
  misc_feature: MA Experiment 108530 PARAMETER Experiment Name: Zm_Imbibed_Seeds_P Parameter: Tissue Value: Aerial vs. Embryo
  misc_feature: MA Experiment ID: 108535 Result: Down-regulated in Transcription
  misc_feature: MA Experiment 108535 PARAMETER Experiment Name: Zm_Meristem_P Parameter: Age (day) Value: 8
  misc_feature: MA Experiment 108535 PARAMETER Experiment Name: Zm_Meristem_P Parameter: Organism Value: Zea mays
  misc_feature: MA Experiment 108535 PARAMETER Experiment Name: Zm_Meristem_P Parameter: Plant Line Value: 35A19
  misc_feature: MA Experiment 108535 PARAMETER Experiment Name: Zm_Meristem_P Parameter: Tissue Value: Root Meristem vs. Above Root Meristem
  misc_feature: MA Experiment ID: 108536 Result: Down-regulated in Transcription
  misc_feature: MA Experiment 108536 PARAMETER Experiment Name: Zm_Meristem_P Parameter: Age (day) Value: 8
  misc_feature: MA Experiment 108536 PARAMETER Experiment Name: Zm_Meristem_P Parameter: Organism Value: Zea mays
  misc_feature: MA Experiment 108536 PARAMETER Experiment Name: Zm_Meristem_P Parameter: Plant Line Value: 35A19
  misc_feature: MA Experiment 108536 PARAMETER Experiment Name: Zm_Meristem_P Parameter: Tissue Value: Shoot Meristem vs. Above Shoot Meristem
  misc_feature: MA Experiment ID: 108543 Result: Up-regulated in Transcription
  misc_feature: MA Experiment ID: 108545 Result: Up-regulated in Transcription
  misc_feature: MA Experiment 108545 PARAMETER Experiment Name: Zm_Imbibed_Seeds_P Parameter: Age (day) Value: 3 vs. 2
  misc_feature: MA Experiment 108545 PARAMETER Experiment Name: Zm_Imbibed_Seeds_P Parameter: Organism Value: Zea mays
  misc_feature: MA Experiment 108545 PARAMETER Experiment Name: Zm_Imbibed_Seeds_P Parameter: Plant Line Value: 35A19
  misc_feature: MA Experiment 108545 PARAMETER Experiment Name: Zm_Imbibed_Seeds_P Parameter: Tissue Value: Aerial vs. Embryo
  misc_feature: MA Experiment ID: 108688 Result: Down-regulated in Transcription
  misc_feature: MA Experiment 108688 PARAMETER Experiment Name: Zm_Embryos-Flowers__P Parameter: Tissue Value: Immature Flowers vs. Aerial+
  misc_feature: MA Experiment ID: 20000108 Result: Down-regulated in Transcription
  misc_feature: MA Experiment 20000108 PARAMETER Experiment Name: Zm_Root-Tips_P Parameter: Age (day) Value: 12
  misc_feature: MA Experiment 20000108 PARAMETER Experiment Name: Zm_Root-Tips_P Parameter: Organism Value: Zea mays
  misc_feature: MA Experiment 20000108 PARAMETER Experiment Name: Zm_Root-Tips_P Parameter: Tissue Value: Root tips vs. Root mid region    35
  misc_feature: MA Experiment 20000108 PARAMETER Experiment Name: Zm_Root-Tips_P Parameter: Tissue Value: Root tips vs. Root mid region   Sequence Listing-Misc Features (4)
  misc_feature: MA Experiment ID: 20000535 Result: Down-regulated in Transcription
  misc_feature: MA Experiment 20000535 PARAMETER Experiment Name: Zm_Hybrid_Seed_Dev_P Parameter: DAP Value: 30 vs. 12
  misc_feature: MA Experiment 20000535 PARAMETER Experiment Name: Zm_Hybrid_Seed_Dev_P Parameter: Organism Value: Zea mays
  misc_feature: MA Experiment 20000535 PARAMETER Experiment Name: Zm_Hybrid_Seed_Dev_P Parameter: Plant Line Value: 35A19
  misc_feature: MA Experiment 20000535 PARAMETER Experiment Name: Zm_Hybrid_Seed_Dev_P Parameter: Tissue Value: Embryo vs. Unfert Floret
agctgcagccagagccacccaccttatcgtcatcctcgctcgctcctcatcgccagcgcctcctcctcctcctccttcttccccaccgctgccgacatggctgcgcaagaagagaagaccgctgttgttgttgctgctgctgccgatgtcgcgacagaggagcctacgccggcggcggagcagcaacctcagccggctggggcggcgcgcagggcaggaccatcggcgcccggcggggctccgcccaaccccttcgacttctccaccatgatgaaccttctcaatgaccctagcatcaaggagatggcagagcagatcgccaaggacccggcgttcacggagatggcggagcagctgcagaagacggtggtgtccccgcggcagcaacagcagcagcaggcgcggcagcagcagcagcagctggacccgcagaagtacgtggcgacgatgcagcagctgatgcagaacccgcagttcgtggccatggcggagcggctaggcagcgcgctgatgcaggaccctgccatgtccgccatgctggggggcctcaccaacccggcgcacaaggagcagctggaggcccgcgtcgcgcgcatgaaagaggaccccacgctcaagcccatcctcgacgagatcgagtccggcggccccgccgccatgatgaagtactggaacgaccctgaggctctgcagaagttcggccgcgcgatgggcgtcggcgtcggcccgtccggcgaggccggcggtgcggagcacgccgaggcggaggacgacgctggggaggaaggcgagtatgaggacgagtccatcgtccaccacaccgccagtgttggcgacgtcgagggcctcaagaaagcgctggaggacggcgcggacaaggacgaggaggactcggaagggcggcgtggcctccacttcgcgtgcggctacggcgagctccagtgcgcgcaggcgctcctggaggccggcgccgcggtggacgccgtcgacaagaacaagaacaccgcgctgcactacgccgccggatacggccgcaaggactgcgtcgcgctccttctcgagagcggcgccgccgtgacgctgcagaacctggacgggaagacgcccatcgacgtggccaagctcaacaaccaggatgacgtcctcaagctgctggagaagcacgccttcgtatagacgtcccatgccgccggccggcccgtcttgctcgtctgctcctgtcgccgccgccgccgccacgtcgcttgcctctgctactgctgctgccgccaccgccattaatgctttgttaatttctctcctggtgtagacaacgcaggttccttcatcacttcactgttgagtatttgcattgggtgtgtatgtatcggattttgctttgcgtgatcacggtatcatatttatttgtcggactcctcgttcatcaggaggttttcgtaatgaataaggaagaaatttccatttc

SEQ ID NO: 5279 - protein, 391 aa, Zea mays subsp. mays
  peptide (1)..(391): Ceres Seq. ID no. 12409618
  misc_feature (332)..(364): Pfam Name: Ankyrin repeat Pfam Description: Ankyrin repeat
  misc_feature (33)..(391): Homolog of NCBI NO: 27573339 NR Description: unknown protein [Oryza sativa (japonica
  misc_feature (38)..(391): Homolog of NCBI NO: 13310811 NR Description: ankyrin-repeat protein HBP1 [Nicotiana tabacum]
  misc_feature (38)..(391): Homolog of NCBI NO: 24637568 NR Description: ankyrin domain protein [Nicotiana tabacum]
  misc_feature (38)..(391): Homolog of NCBI NO: 29826242 NR Description: TGB12K interacting protein 2 [Nicotiana tabacum]
  misc_feature (38)..(391): Homolog of NCBI NO: 29826244 NR Description: TGB12K interacting protein 3 [Nicotiana tabacum]
  misc_feature (50)..(391): Homolog of NCBI NO: 15237008 NR Description: ankyrin repeat-containing protein 2; protein id: supported by cDNA: 34698., supported by cDNA: gi_14423489, by cDNA: gi_20148296, supported by cDNA: gi_3478699, supported by
  misc_feature (50)..(391): Homolog of NCBI NO: 3478700 NR Description: AFT protein [Arabidopsis thaliana]
  misc_feature (50)..(391): Homolog of NCBI NO: 4205079 NR Description: ankyrin repeat-containing protein 2 [Arabidopsis
  misc_feature (33)..(391): Homolog of NCBI NO: 15227825 NR Description: putative glucanase; protein id: At2g17390.1
  misc_feature (83)..(391): Homolog of NCBI NO: 30690372 NR Description: ankyrin repeat-containing protein 2 [Arabidopsis
SCSQSHPPYRHPRSLLIASASSSSSFFPTAADMAAQEEKTAVVVAAAADVATEEPTPAAEQQPQPAGAARRAGPSAPGGAPPNPFDFSTMMNLLNDPSIKEMAEQIAKDPAFTEMAEQLQKTVVSPRQQQQQQARQQQQQLDPQKYVATMQQLMQNPQFVAMAERLGSALMQDPAMSAMLGGLTNPAHKEQLEARVARMKEDPTLKPILDEIESGGPAAMMKYWNDPEALQKFGRAMGVGVGPSGEAGGAEHAEAEDDAGEEGEYEDESIVHHTASVGDVEGLKKALEDGADKDEEDSEGRRGLHFACGYGELQCAQALLEAGAAVDAVDKNKNTALHYAAGYGRKDCVALLLESGAAVTLQNLDGKTPIDVAKLNNQDDVLKLLEKHAFV

SEQ ID NO: 5280 - protein, 359 aa, Zea mays subsp. mays
  peptide (1)..(359): Ceres Seq. ID no. 12409619
  misc_feature (300)..(332): Pfam Name: Ankyrin repeat Pfam Description: Ankyrin repeat
  misc_feature (1)..(359): Homolog of NCBI NO: 27573339 NR Description: unknown protein [Oryza sativa (japonica
  misc_feature (6)..(359): Homolog of NCBI NO: 13310811 NR Description: ankyrin-repeat protein HBP1 [Nicotiana tabacum]
  misc_feature (6)..(359): Homolog of NCBI NO: 24637568 NR Description: ankyrin domain protein [Nicotiana tabacum]
  misc_feature (6)..(359): Homolog of NCBI NO: 29826242 NR Description: TGB12K interacting protein 2 [Nicotiana tabacum]
  misc_feature (6)..(359): Homolog of NCBI NO: 29826244 NR Description: TGB12K interacting protein 3 [Nicotiana tabacum]
  misc_feature (18)..(359): Homolog of NCBI NO: 15237008 NR Description: ankyrin repeat-containing protein 2; protein id: supported by cDNA: 34698., supported by cDNA: gi_14423489, by cDNA: gi_20148296, supported by cDNA: gi_3478699, supported by
  misc_feature (18)..(359): Homolog of NCBI NO: 3478700 NR Description: AFT protein [Arabidopsis thaliana]
  misc_feature (18)..(359): Homolog of NCBI NO: 4205079 NR Description: ankyrin repeat-containing protein 2 [Arabidopsis
  misc_feature (1)..(359): Homolog of NCBI NO: 15227825 NR Description: putative glucanase; protein id: At2g17390.1
  misc_feature (51)..(359): Homolog of NCBI NO: 30690372 NR Description: ankyrin repeat-containing protein 2 [Arabidopsis
MAAQEEKTAVVVAAAADVATEEPTPAAEQQPQPAGAARRAGPSAPGGAPPNPFDFSTMMNLLNDPSIKEMAEQIAKDPAFTEMAEQLQKTVVSPRQQQQQQARQQQQQLDPQKYVATMQQLMQNPQFVAMAERLGSALMQDPAMSAMLGGLTNPAHKEQLEARVARMKEDPTLKPILDEIESGGPAAMMKYWNDPEALQKFGRAMGVGVGPSGEAGGAEHAEAEDDAGEEGEYEDESIVHHTASVGDVEGLKKALEDGADKDEEDSEGRRGLHFACGYGELQCAQALLEAGAAVDAVDKNKNTALHYAAGYGRKDCVALLLESGAAVTLQNLDGKTPIDVAKLNNQDDVLKLLEKHAFV

SEQ ID NO: 5281 - protein, 302 aa, Zea mays subsp. mays
  peptide (1)..(302): Ceres Seq. ID no. 12409620
  misc_feature (243)..(275): Pfam Name: Ankyrin repeat Pfam Description: Ankyrin repeat
  misc_feature (1)..(302): Homolog of NCBI NO: 27573339 NR Description: unknown protein [Oryza sativa (japonica
  misc_feature (1)..(302): Homolog of NCBI NO: 13310811 NR Description: ankyrin-repeat protein HBP1 [Nicotiana tabacum]
  misc_feature (1)..(302): Homolog of NCBI NO: 24637568 NR Description: ankyrin domain protein [Nicotiana tabacum]
  misc_feature (1)..(302): Homolog of NCBI NO: 29826242 NR Description: TGB12K interacting protein 2 [Nicotiana tabacum]
  misc_feature (1)..(302): Homolog of NCBI NO: 29826244 NR Description: TGB12K interacting protein 3 [Nicotiana tabacum]
  misc_feature (1)..(302): Homolog of NCBI NO: 15237008 NR Description: ankyrin repeat-containing protein 2; protein id: supported by cDNA: 34698., supported by cDNA: gi_14423489, by cDNA: gi_20148296, supported by cDNA: gi_3478699, supported by
  misc_feature (1)..(302): Homolog of NCBI NO: 3478700 NR Description: AFT protein [Arabidopsis thaliana]
  misc_feature (1)..(302): Homolog of NCBI NO: 4205079 NR Description: ankyrin repeat-containing protein 2 [Arabidopsis
  misc_feature (1)..(302): Homolog of NCBI NO: 15227825 NR Description: putative glucanase; protein id: At2g17390.1
  misc_feature (1)..(302): Homolog of NCBI NO: 30690372 NR Description: ankyrin repeat-containing protein 2 [Arabidopsis
MMNLLNDPSIKEMAEQIAKDPAFTEMAEQLQKTVVSPRQQQQQQARQQQQQLDPQKYVATMQQLMQNPQFVAMAERLGSALMQDPAMSAMLGGLTNPAHKEQLEARVARMKEDPTLKPILDEIESGGPAAMMKYWNDPEALQKFGRAMGVGVGPSGEAGGAEHAEAEDDAGEEGEYEDESIVHHTASVGDVEGLKKALEDGADKDEEDSEGRRGLHFACGYGELQCAQALLEAGAAVDAVDKNKNTALHYAAGYGRKDCVALLLESGAAVTLQNLDGKTPIDVAKLNNQDDVLKLLEKHAFV

SEQ ID NO: 5282 - DNA, 1486 bp, Zea mays subsp. mays
  misc_feature (1)..(1486): Ceres Seq. ID no. 12356243
  misc_feature: MA Experiment ID: 108504 Result: Up-regulated in Transcription
  misc_feature: MA Experiment 108504 PARAMETER Experiment Name: Zm_Drought_P Parameter: Age (day) Value: 8
  misc_feature: MA Experiment 108504 PARAMETER Experiment Name: Zm_Drought_P Parameter: Organism Value: Zea mays
  misc_feature: MA Experiment 108504 PARAMETER Experiment Name: Zm_Drought_P Parameter: Plant Line Value: 35A19
  misc_feature: MA Experiment 108504 PARAMETER Experiment Name: Zm_Drought_P Parameter: Timepoint (hr) Value: 12
  misc_feature: MA Experiment 108504 PARAMETER Experiment Name: Zm_Drought_P Parameter: Tissue Value: Aerial
  misc_feature: MA Experiment 108504 PARAMETER Experiment Name: Zm_Drought_P Parameter: Treatment Value: Drought vs. No Drought
  misc_feature: MA Experiment ID: 108522 Result: Up-regulated in Transcription
  misc_feature: MA Experiment 108522 PARAMETER Experiment Name: Zm_42deg_Heat_P Parameter: Age (day) Value: 8
  misc_feature: MA Experiment 108522 PARAMETER Experiment Name: Zm_42deg_Heat_P Parameter: Organism Value: Zea mays
  misc_feature: MA Experiment 108522 PARAMETER Experiment Name: Zm_42deg_Heat_P Parameter: Plant Line Value: 35A19
  misc_feature: MA Experiment 108522 PARAMETER Experiment Name: Zm_42deg_Heat_P Parameter: Temperature (deg C) Value: 42 vs. 22
  misc_feature: MA Experiment 108522 PARAMETER Experiment Name: Zm_42deg_Heat_P Parameter: Timepoint (hr) Value: 1
  misc_feature: MA Experiment 108522 PARAMETER Experiment Name: Zm_42deg_Heat_P Parameter: Tissue Value: Aerial
  misc_feature: MA Experiment ID: 108523 Result: Up-regulated in Transcription
  misc_feature: MA Experiment 108523 PARAMETER Experiment Name: Zm_42deg_Heat_P Parameter: Age (day) Value: 8
  misc_feature: MA Experiment 108523 PARAMETER Experiment Name: Zm_42deg_Heat_P Parameter: Organism Value: Zea mays
  misc_feature: MA Experiment 108523 PARAMETER Experiment Name: Zm_42deg_Heat_P Parameter: Plant Line Value: 35A19
  misc_feature: MA Experiment 108523 PARAMETER Experiment Name: Zm_42deg_Heat_P Parameter: Temperature (deg C) Value: 42 vs. 22
  misc_feature: MA Experiment 108523 PARAMETER Experiment Name: Zm_42deg_Heat_P Parameter: Timepoint (hr) Value: 6
  misc_feature: MA Experiment 108523 PARAMETER Experiment Name: Zm_42deg_Heat_P Parameter: Tissue Value: Aerial
  misc_feature: MA Experiment ID: 108527 Result: Up-regulated in Transcription
  misc_feature: MA Experiment 108527 PARAMETER Experiment Name: Zm_5mM_NO_P Parameter: Age (day) Value: 8
  misc_feature: MA Experiment 108527 PARAMETER Experiment Name: Zm_5mM_NO_P Parameter: Organism Value: Zea mays
  misc_feature: MA Experiment 108527 PARAMETER Experiment Name: Zm_5mM_NO_P Parameter: Plant Line Value: 35A19
  misc_feature: MA Experiment 108527 PARAMETER Experiment Name: Zm_5mM_NO_P Parameter: Timepoint (hr) Value: 6
  misc_feature: MA Experiment 108527 PARAMETER Experiment Name: Zm_5mM_NO_P Parameter: Tissue Value: Aerial
  misc_feature: MA Experiment 108527 PARAMETER Experiment Name: Zm_5mM_NO_P Parameter: Treatment Value: 5mM NO vs. No Treatment
  misc_feature: MA Experiment ID: 108528 Result: Up-regulated in Transcription
  misc_feature: MA Experiment 108528 PARAMETER Experiment Name: Zm_Imbibed_Seeds_P Parameter: Age (day) Value: 5 vs. 2
  misc_feature: MA Experiment 108528 PARAMETER Experiment Name: Zm_Imbibed_Seeds_P Parameter: Organism Value: Zea mays
  misc_feature: MA Experiment 108528 PARAMETER Experiment Name: Zm_Imbibed_Seeds_P Parameter: Plant Line Value: 35A19
  misc_feature: MA Experiment 108528 PARAMETER Experiment Name: Zm_Imbibed_Seeds_P Parameter: Tissue Value: Aerial vs. Embryo
  misc_feature: MA Experiment ID: 108529 Result: Up-regulated in Transcription
  misc_feature: MA Experiment 108529 PARAMETER Experiment Name: Zm_Imbibed_Seeds_P Parameter: Age (day) Value: 5 vs. 2
  misc_feature: MA Experiment 108529 PARAMETER Experiment Name: Zm_Imbibed_Seeds_P Parameter: Organism Value: Zea mays
  misc_feature: MA Experiment 108529 PARAMETER Experiment Name: Zm_Imbibed_Seeds_P Parameter: Plant Line Value: 35A19
  misc_feature: MA Experiment 108529 PARAMETER Experiment Name: Zm_Imbibed_Seeds_P Parameter: Tissue Value: Roots vs. Embryo
  misc_feature: MA Experiment ID: 108530 Result: Up-regulated in Transcription
  misc_feature: MA Experiment 108530 PARAMETER Experiment Name: Zm_Imbibed_Seeds_P Parameter: Age (day) Value: 6 vs. 2
  misc_feature: MA Experiment 108530 PARAMETER Experiment Name: Zm_Imbibed_Seeds_P Parameter: Organism Value: Zea mays
  misc_feature: MA Experiment 108530 PARAMETER Experiment Name: Zm_Imbibed_Seeds_P Parameter: Plant Line Value: 35A19
  misc_feature: MA Experiment 108530 PARAMETER Experiment Name: Zm_Imbibed_Seeds_P Parameter: Tissue Value: Aerial vs. Embryo
  misc_feature: MA Experiment ID: 108534 Result: Down-regulated in Transcription
  misc_feature: MA Experiment 108534 PARAMETER Experiment Name: Zm_4deg_Cold_P Parameter: Age (hr) Value: 8
  misc_feature: MA Experiment 108534 PARAMETER Experiment Name: Zm_4deg_Cold_P Parameter: Organism Value: Zea mays
  misc_feature: MA Experiment 108534 PARAMETER Experiment Name: Zm_4deg_Cold_P Parameter: Plant Line Value: 35A19
  misc_feature: MA Experiment 108534 PARAMETER Experiment Name: Zm_4deg_Cold_P Parameter: Temperature (deg C) Value: 4 vs. 22
  misc_feature: MA Experiment 108534 PARAMETER Experiment Name: Zm_4deg_Cold_P Parameter: Timepoint (hr) Value: 6
  misc_feature: MA Experiment 108534 PARAMETER Experiment Name: Zm_4deg_Cold_P Parameter: Tissue Value: Aerial
  misc_feature: MA Experiment ID: 108543 Result: Down-regulated in Transcription
  misc_feature: MA Experiment ID: 108556 Result: Up-regulated in Transcription
  misc_feature: MA Experiment 108556 PARAMETER Experiment Name: Zm_Drought_P Parameter: Age (day) Value: 9
  misc_feature: MA Experiment 108556 PARAMETER Experiment Name: Zm_Drought_P Parameter: Organism Value: Zea mays
  misc_feature: MA Experiment 108556 PARAMETER Experiment Name: Zm_Drought_P Parameter: Plant Line Value: 35A19
  misc_feature: MA Experiment 108556 PARAMETER Experiment Name: Zm_Drought_P Parameter: Timepoint (hr) Value: 24
  misc_feature: MA Experiment 108556 PARAMETER Experiment Name: Zm_Drought_P Parameter: Tissue Value: Aerial
  misc_feature: MA Experiment 108556 PARAMETER Experiment Name: Zm_Drought_P Parameter: Treatment Value: Drought vs. No Drought
  misc_feature: MA Experiment ID: 108559 Result: Up-regulated in Transcription
  misc_feature: MA Experiment 108559 PARAMETER Experiment Name: Zm_5mM_NO_P Parameter: Age (day) Value: 8
  misc_feature: MA Experiment 108559 PARAMETER Experiment Name: Zm_5mM_NO_P Parameter: Organism Value: Zea mays
  misc_feature: MA Experiment 108559 PARAMETER Experiment Name: Zm_5mM_NO_P Parameter: Plant Line Value: 35A19
  misc_feature: MA Experiment 108559 PARAMETER Experiment Name: Zm_5mM_NO_P Parameter: Timepoint (hr) Value: 12
  misc_feature: MA Experiment 108559 PARAMETER Experiment Name: Zm_5mM_NO_P Parameter: Tissue Value: Aerial
  misc_feature: MA Experiment 108559 PARAMETER Experiment Name: Zm_5mM_NO_P Parameter: Treatment Value: 5mM NO vs. No Treatment
  misc_feature: MA Experiment ID: 108597 Result: Up-regulated in Transcription
  misc_feature: MA Experiment 108597 PARAMETER Experiment Name: Zm_100uM_ABA_P Parameter: Age (day) Value: 9
  misc_feature: MA Experiment 108597 PARAMETER Experiment Name: Zm_100uM_ABA_P Parameter: Organism Value: Zea mays
  misc_feature: MA Experiment 108597 PARAMETER Experiment Name: Zm_100uM_ABA_P Parameter: Plant Line Value: 35A19
  misc_feature: MA Experiment 108597 PARAMETER Experiment Name: Zm_100uM_ABA_P Parameter: Timepoint (hr) Value: 24
  misc_feature: MA Experiment 108597 PARAMETER Experiment Name: Zm_100uM_ABA_P Parameter: Tissue Value: Aerial
  misc_feature: MA Experiment 108597 PARAMETER Experiment Name: Zm_100uM_ABA_P Parameter: Treatment Value: 100uM ABA vs. No Treatment
  misc_feature: MA Experiment ID: 20000478 Result: Up-regulated in Transcription
  misc_feature: MA Experiment 20000478 PARAMETER Experiment Name: Zm_5mM_SA_P Parameter: Age (day) Value: 11
  misc_feature: MA Experiment 20000478 PARAMETER Experiment Name: Zm_5mM_SA_P Parameter: Organism Value: Zea mays
  misc_feature: MA Experiment 20000478 PARAMETER Experiment Name: Zm_5mM_SA_P Parameter: Plant Line Value: 35A19
  misc_feature: MA Experiment 20000478 PARAMETER Experiment Name: Zm_5mM_SA_P Parameter: Timepoint (hr) Value: 72
  misc_feature: MA Experiment 20000478 PARAMETER Experiment Name: Zm_5mM_SA_P Parameter: Tissue Value: Aerial
  misc_feature: MA Experiment 20000478 PARAMETER Experiment Name: Zm_5mM_SA_P Parameter: Treatment Value: 5mM SA vs. No Treatment
  misc_feature: MA Experiment ID: 20000479 Result: Up-regulated in Transcription
  misc_feature: MA Experiment 20000479 PARAMETER Experiment Name: Zm_Drought_P Parameter: Age (day) Value: 10
  misc_feature: MA Experiment 20000479 PARAMETER Experiment Name: Zm_Drought_P Parameter: Organism Value: Zea mays
  misc_feature: MA Experiment 20000479 PARAMETER Experiment Name: Zm_Drought_P Parameter: Plant Line Value: 35A19
  misc_feature: MA Experiment 20000479 PARAMETER Experiment Name: Zm_Drought_P Parameter: Timepoint (hr) Value: 48
  misc_feature: MA Experiment 20000479 PARAMETER Experiment Name: Zm_Drought_P Parameter: Tissue Value: Aerial
  misc_feature: MA Experiment 20000479 PARAMETER Experiment Name: Zm_Drought_P Parameter: Treatment Value: Drought vs. No Drought
  misc_feature: MA Experiment ID: 20000535 Result: Down-regulated in Transcription
  misc_feature: MA Experiment 20000535 PARAMETER Experiment Name: Zm_Hybrid_Seed_Dev_P Parameter: DAP Value: 30 vs. 12
  misc_feature: MA Experiment 20000535 PARAMETER Experiment Name: Zm_Hybrid_Seed_Dev_P Parameter: Organism Value: Zea mays
  misc_feature: MA Experiment 20000535 PARAMETER Experiment Name: Zm_Hybrid_Seed_Dev_P Parameter: Plant Line Value: 35A19
  misc_feature: MA Experiment 20000535 PARAMETER Experiment Name: Zm_Hybrid_Seed_Dev_P Parameter: Tissue Value: Embryo vs. Unfert Floret
  misc_feature: MA Experiment ID: 20000630 Result: Up-regulated in Transcription
  misc_feature: MA Experiment 20000630 PARAMETER Experiment Name: Zm_Herbicide-Treatments_P Parameter: Timepoint (hr) Value: 4
  misc_feature: MA Experiment 20000630 PARAMETER Experiment Name: Zm_Herbicide-Treatments_P Parameter: Tissue Value: Aerial
  misc_feature: MA Experiment 20000630 PARAMETER Experiment Name: Zm_Herbicide-Treatments_P Parameter: Treatment Value: Roundup vs. No Treatment
acgggaccggtaacttctagaacccaccaccttccatccttccttcctttcctctctctctctctctcctcgcgcccacggtgcccgccagccagatccgcgcgttcaccggcgccatggccgccgagcatgccaccgccgcggtgggtgagccgcctcccgccacgtcgcagccggcggagggcgtgacggcggcggcgggccagaggtccgtgcccacgccgttcctcagcaagacgtaccagctggtggacgacccggcggtggacgacatcatctcgtggaacgacgacgggtctgccttcatcgtgtggcgcccggcggagttcgcgcgcgatctgttgcccaagtacttcaagcacaacaacttctccagcttcgtgcgccagctcaacacctacgggttcaggaagatcgtgccggacaggtgggagttcgcgaacgactgcttccgccgaggggagaagcggctgctctgcgacatacaccgccggaaggtgtcgccggccacgggggcggtcacggtggccgccgccgccgctgcggccatcccgatggcgctgcccgtgggctctccggtgtactccggcgaggagcaggtgctgtcaagctcgtccccggagcccccgtcgctgcagcagcacccgccggcgccgtccgggtcgggctccggcggggtggtctcgggcgacgtgggcgaggagaacgagcggttgcggcgggagaacgcgcggctggcgcgcgagctcggacagatgaagaagctctgcaacaacatcctcctcctcatgtccaagtacgccgccactcagcagccggacgccgccaaggaggcggccgccgggaactgcaccggcgagtcgtcggatgccgccgcggcgcctccgctcccttcgatcctggagctcctaccctcgtgccgcgccgaccccgcgcccgctgnagccggaacggatcacgaggatgacgaaaaggcgggcgctaggctgttcggcgtctccatcgggcggaaacgaatgcgggacgagagcgaccaccacgccggcgtctgcgcagcggaggtgaaagccgagccggtggacgcgcgtcccgaccagcagcggcagcgcaacgccacggagccgcagtcgtggcccatttaccggcccaggcctgtgtaccacccgctccgggcctgcaacggctcgggcagcgctgggagcgaccacgacgggtccaacgactcgaggtgacgggagcaatcgtcgatctgccctcagtaaattagtattacacttactaatggtactaggtaactatattacaggttaaactaggatgtgagctctaaatctctaattatgtggggatttactgaccgatcctatgtaaaaatctccagtgtttatgtagttgatctcatattactgcaagtaccgagtatcctttctgtaccataaaactagaggttaacttatgcacagtagactaatattttctttaagtc

SEQ ID NO: 5283 - protein, 371 aa, Zea mays subsp. mays
  peptide (1)..(371): Ceres Seq. ID no. 12356244
  misc_feature (35)..(237): Pfam Name: HSF-type DNA-binding Pfam Description: HSF-type DNA-binding
  misc_feature (6)..(365): Homolog of NCBI NO: 33591098 NR Description: heat shock factor RHSF2 [Oryza sativa (japonica
  misc_feature (30)..(339): Homolog of NCBI NO: 6624618 NR Description: heat shock factor 7 [Arabidopsis thaliana]
  misc_feature (30)..(339): Homolog of NCBI NO: 15234264 NR Description: heat shock transcription factor - like protein; id: At4g11660.1, supported by cDNA: gi_20260613 [Arabidopsis >gi|12643858|sp|Q9T0D3|HSF7_ARATH Heat shock factor protein 7
  misc_feature (18)..(235): Homolog of NCBI NO: 30697614 NR Description: heat shock transcription factor 6 (HSF6) thaliana] >gi|11386851|sp|Q9SCW4|HSF6_ARATH Heat shock factor
  misc_feature (272)..(304): Homolog of NCBI NO: 30697614 NR Description: heat shock transcription factor 6 (HSF6) thaliana] >gi|11386851|sp|Q9SCW4|HSF6_ARATH Heat shock factor
  misc_feature (36)..(228): Homolog of NCBI NO: 38344369 NR Description: OSJNBb0032E06.3 [Oryza sativa (japonica
  misc_feature (20)..(310): Homolog of NCBI NO: 33146640 NR Description: putative heat shock transcription factor HSF5
  misc_feature (30)..(317): Homolog of NCBI NO: 123684 NR Description: HEAT SHOCK FACTOR PROTEIN HSF24 (HEAT SHOCK FACTOR 24) (HSTF 24) (HEAT STRESS TRANSCRIPTION FACTOR)
  misc_feature (44)..(228): Homolog of NCBI NO: 33591096 NR Description: heat shock factor RHSF1 [Oryza sativa (japonica
  misc_feature (29)..(234): Homolog of NCBI NO: 15220101 NR Description: heat shock transcription factor, putative; id: At1g46264.1 [Arabidopsis thaliana] >gi|25296103|pir||C96511
  misc_feature (276)..(276): Xaa is any aa, unknown or other
MAAEHATAAVGEPPPATSQPAEGVTAAAGQRSVPTPFLSKTYQLVDDPAVDDIISWNDDGSAFIVWRPAEFARDLLPKYFKHNNFSSFVRQLNTYGFRKIVPDRWEFANDCFRRGEKRLLCDIHRRKVSPATGAVTVAAAAAAAIPMALPVGSPVYSGEEQVLSSSSPEPPSLQQHPPAPSGSGSGGVVSGDVGEENERLRRENARLARELGQMKKLCNNILLLMSKYAATQQPDAAKEAAAGNCTGESSDAAAAPPLPSILELLPSCRADPAPAXAGTDHEDDEKAGARLFGVSIGRKRMRDESDHHAGVCAAEVKAEPVDARPDQQRQRNATEPQSWPIYRPRPVYHPLRACNGSGSAGSDHDGSNDSR

SEQ ID NO: 5284 - protein, 225 aa, Zea mays subsp. mays
  peptide (1)..(225): Ceres Seq. ID no. 12356245
  misc_feature (1)..(91): Pfam Name: HSF-type DNA-binding Pfam Description: HSF-type DNA-binding
  misc_feature (1)..(219): Homolog of NCBI NO: 33591098 NR Description: heat shock factor RHSF2 [Oryza sativa (japonica
  misc_feature (1)..(193): Homolog of NCBI NO: 6624618 NR Description: heat shock factor 7 [Arabidopsis thaliana]
  misc_feature (1)..(193): Homolog of NCBI NO: 15234264 NR Description: heat shock transcription factor - like protein; id: At4g11660.1, supported by cDNA: gi_20260613 [Arabidopsis >gi|12643858|sp|Q9T0D3|HSF7_ARATH Heat shock factor protein 7
  misc_feature (1)..(89): Homolog of NCBI NO: 30697614 NR Description: heat shock transcription factor 6 (HSF6) thaliana] >gi|11386851|sp|Q9SCW4|HSF6_ARATH Heat shock factor
  misc_feature (126)..(158): Homolog of NCBI NO: 30697614 NR Description: heat shock transcription factor 6 (HSF6) thaliana] >gi|11386851|sp|Q9SCW4|HSF6_ARATH Heat shock factor
  misc_feature (1)..(82): Homolog of NCBI NO: 38344369 NR Description: OSJNBb0032E06.3 [Oryza sativa (japonica
  misc_feature (1)..(164): Homolog of NCBI NO: 33146640 NR Description: putative heat shock transcription factor HSF5
  misc_feature (1)..(171): Homolog of NCBI NO: 123684 NR Description: HEAT SHOCK FACTOR PROTEIN HSF24 (HEAT SHOCK FACTOR 24) (HSTF 24) (HEAT STRESS TRANSCRIPTION FACTOR)
  misc_feature (1)..(82): Homolog of NCBI NO: 33591096 NR Description: heat shock factor RHSF1 [Oryza sativa (japonica
  misc_feature (1)..(88): Homolog of NCBI NO: 15220101 NR Description: heat shock transcription factor, putative; id: At1g46264.1 [Arabidopsis thaliana] >gi|25296103|pir||C96511
  misc_feature (130)..(130): Xaa is any aa, unknown or other
MALPVGSPVYSGEEQVLSSSSPEPPSLQQHPPAPSGSGSGGVVSGDVGEENERLRRENARLARELGQMKKLCNNILLLMSKYAATQQPDAAKEAAAGNCTGESSDAAAAPPLPSILELLPSCRADPAPAXAGTDHEDDEKAGARLFGVSIGRKRMRDESDHHAGVCAAEVKAEPVDARPDQQRQRNATEPQSWPIYRPRPVYHPLRACNGSGSAGSDHDGSNDSR

SEQ ID NO: 5285 - DNA, 1513 bp, Zea mays subsp. mays
  misc_feature (1)..(1513): Ceres Seq. ID no. 12409609
  misc_feature: MA Experiment ID: 108522 Result: Up-regulated in Transcription
  misc_feature: MA Experiment 108522 PARAMETER Experiment Name: Zm_42deg_Heat_P Parameter: Age (day) Value: 8
  misc_feature: MA Experiment 108522 PARAMETER Experiment Name: Zm_42deg_Heat_P Parameter: Organism Value: Zea mays
  misc_feature: MA Experiment 108522 PARAMETER Experiment Name: Zm_42deg_Heat_P Parameter: Plant Line Value: 35A19
  misc_feature: MA Experiment 108522 PARAMETER Experiment Name: Zm_42deg_Heat_P Parameter: Temperature (deg C) Value: 42 vs. 22
  misc_feature: MA Experiment 108522 PARAMETER Experiment Name: Zm_42deg_Heat_P Parameter: Timepoint (hr) Value: 1
  misc_feature: MA Experiment 108522 PARAMETER Experiment Name: Zm_42deg_Heat_P Parameter: Tissue Value: Aerial
  misc_feature: MA Experiment ID: 108528 Result: Up-regulated in Transcription
  misc_feature: MA Experiment 108528 PARAMETER Experiment Name: Zm_Imbibed_Seeds_P Parameter: Age (day) Value: 5 vs. 2
  misc_feature: MA Experiment 108528 PARAMETER Experiment Name: Zm_Imbibed_Seeds_P Parameter: Organism Value: Zea mays
  misc_feature: MA Experiment 108528 PARAMETER Experiment Name: Zm_Imbibed_Seeds_P Parameter: Plant Line Value: 35A19
  misc_feature: MA Experiment 108528 PARAMETER Experiment Name: Zm_Imbibed_Seeds_P Parameter: Tissue Value: Aerial vs. Embryo
  misc_feature: MA Experiment ID: 108530 Result: Up-regulated in Transcription
  misc_feature: MA Experiment 108530 PARAMETER Experiment Name: Zm_Imbibed_Seeds_P Parameter: Age (day) Value: 6 vs. 2
  misc_feature: MA Experiment 108530 PARAMETER Experiment Name: Zm_Imbibed_Seeds_P Parameter: Organism Value: Zea mays
  misc_feature: MA Experiment 108530 PARAMETER Experiment Name: Zm_Imbibed_Seeds_P Parameter: Plant Line Value: 35A19
  misc_feature: MA Experiment 108530 PARAMETER Experiment Name: Zm_Imbibed_Seeds_P Parameter: Tissue Value: Aerial vs. Embryo
  misc_feature: MA Experiment ID: 108536 Result: Down-regulated in Transcription
  misc_feature: MA Experiment 108536 PARAMETER Experiment Name: Zm_Meristem_P Parameter: Age (day) Value: 8
  misc_feature: MA Experiment 108536 PARAMETER Experiment Name: Zm_Meristem_P Parameter: Organism Value: Zea mays
  misc_feature: MA Experiment 108536 PARAMETER Experiment Name: Zm_Meristem_P Parameter: Plant Line Value: 35A19
  misc_feature: MA Experiment 108536 PARAMETER Experiment Name: Zm_Meristem_P Parameter: Tissue Value: Shoot Meristem vs. Above Shoot Meristem
  misc_feature: MA Experiment ID: 108543 Result: Up-regulated in Transcription
  misc_feature: MA Experiment ID: 108545 Result: Up-regulated in Transcription
  misc_feature: MA Experiment 108545 PARAMETER Experiment Name: Zm_Imbibed_Seeds_P Parameter: Age (day) Value: 3 vs. 2
  misc_feature: MA Experiment 108545 PARAMETER Experiment Name: Zm_Imbibed_Seeds_P Parameter: Organism Value: Zea mays
  misc_feature: MA Experiment 108545 PARAMETER Experiment Name: Zm_Imbibed_Seeds_P Parameter: Plant Line Value: 35A19
  misc_feature: MA Experiment 108545 PARAMETER Experiment Name: Zm_Imbibed_Seeds_P Parameter: Tissue Value: Aerial vs. Embryo
  misc_feature: MA Experiment ID: 108547 Result: Up-regulated in Transcription
  misc_feature: MA Experiment 108547 PARAMETER Experiment Name: Zm_Imbibed_Seeds_P Parameter: Age (day) Value: 4 vs. 2
  misc_feature: MA Experiment 108547 PARAMETER Experiment Name: Zm_Imbibed_Seeds_P Parameter: Organism Value: Zea mays
  misc_feature: MA Experiment 108547 PARAMETER Experiment Name: Zm_Imbibed_Seeds_P Parameter: Plant Line Value: 35A19
  misc_feature: MA Experiment 108547 PARAMETER Experiment Name: Zm_Imbibed_Seeds_P Parameter: Tissue Value: Aerial vs. Embryo
  misc_feature: MA Experiment ID: 108687 Result: Up-regulated in Transcription
  misc_feature: MA Experiment 108687 PARAMETER Experiment Name: Zm_Embryos-Flowers__P Parameter: Tissue Value: Embryo vs. Aerial+
  misc_feature: MA Experiment ID: 108688 Result: Down-regulated in Transcription
  misc_feature: MA Experiment 108688 PARAMETER Experiment Name: Zm_Embryos-Flowers__P Parameter: Tissue Value: Immature Flowers vs. Aerial+
  misc_feature: MA Experiment ID: 20000488 Result: Up-regulated in Transcription
  misc_feature: MA Experiment 20000488 PARAMETER Experiment Name: Zm_50mM_NH4NO3_L_to_H_P Parameter: Organism Value: Zea mays
  misc_feature: MA Experiment 20000488 PARAMETER Experiment Name: Zm_50mM_NH4NO3_L_to_H_P Parameter: Timepoint (hr) Value: 8
  misc_feature: MA Experiment 20000488 PARAMETER Experiment Name: Zm_50mM_NH4NO3_L_to_H_P Parameter: Tissue Value: Leaves
  misc_feature: MA Experiment 20000488 PARAMETER Experiment Name: Zm_50mM_NH4NO3_L_to_H_P Parameter: Treatment Value: 50mM NH4NO3 vs. 100mM Mannitol
  misc_feature: MA Experiment ID: 20000626 Result: Down-regulated in Transcription
  misc_feature: MA Experiment 20000626 PARAMETER Experiment Name: Zm_Herbicide-Treatments_P Parameter: Timepoint (hr) Value: 12
  misc_feature: MA Experiment 20000626 PARAMETER Experiment Name: Zm_Herbicide-Treatments_P Parameter: Tissue Value: Aerial
  misc_feature: MA Experiment 20000626 PARAMETER Experiment Name: Zm_Herbicide-Treatments_P Parameter: Treatment Value: Roundup vs. No Treatment
  misc_feature: MA Experiment ID: 20001606 Result: Up-regulated in Transcription
  misc_feature: MA Experiment 20001606 PARAMETER Experiment Name: Zm_50ppm_KNO3_L-to-H_P Parameter: Age (day) Value: 19
  misc_feature: MA Experiment 20001606 PARAMETER Experiment Name: Zm_50ppm_KNO3_L-to-H_P Parameter: Organism Value: Zea mays
  misc_feature: MA Experiment 20001606 PARAMETER Experiment Name: Zm_50ppm_KNO3_L-to-H_P Parameter: Plant Line Value: 35A19
  misc_feature: MA Experiment 20001606 PARAMETER Experiment Name: Zm_50ppm_KNO3_L-to-H_P Parameter: Timepoint (hr) Value: 8
  misc_feature: MA Experiment 20001606 PARAMETER Experiment Name: Zm_50ppm_KNO3_L-to-H_P Parameter: Tissue Value: Shoots
  misc_feature: MA Experiment 20001606 PARAMETER Experiment Name: Zm_50ppm_KNO3_L-to-H_P Parameter: Treatment Value: 50ppm KNO3 vs. 50ppm KCl
  misc_feature: MA Experiment ID: 20001608 Result: Up-regulated in Transcription
  misc_feature: MA Experiment 20001608 PARAMETER Experiment Name: Zm_50ppm_KNO3_L-to-H_P Parameter: Age (day) Value: 21
  misc_feature: MA Experiment 20001608 PARAMETER Experiment Name: Zm_50ppm_KNO3_L-to-H_P Parameter: Organism Value: Zea mays
  misc_feature: MA Experiment 20001608 PARAMETER Experiment Name: Zm_50ppm_KNO3_L-to-H_P Parameter: Plant Line Value: 35A19
  misc_feature: MA Experiment 20001608 PARAMETER Experiment Name: Zm_50ppm_KNO3_L-to-H_P Parameter: Timepoint (hr) Value: 48
  misc_feature: MA Experiment 20001608 PARAMETER Experiment Name: Zm_50ppm_KNO3_L-to-H_P Parameter: Tissue Value: Shoots
  misc_feature: MA Experiment 20001608 PARAMETER Experiment Name: Zm_50ppm_KNO3_L-to-H_P Parameter: Treatment Value: 50ppm KNO3 vs. 50ppm KCl
accccacccccacgcgaagaggaagaggaagaacccagccaaatcctcagtcctcaggctgctcacagttcgtgctatccgctcgcgctcccggtagtctgcctgctcggcaattcggcatggcgctccaggccgcgacgtccttcctcccctcggccctctcggcgcgcaaggaggggtcgtcggtgaaggactcggcgttcttgggtgtccatctcgcggacgatggcctcaagctggagaccgctgctctgggcctacgcaccaagagggtgatcacgtcggtggccatccgcgcgcaggcggcagcggtgtcctcaccatcagtaacccccgcgtcgccgtccggcaagaagacgctccgcaagggcacggcgatcataaccggcgcgtcgtccggtctcggcctggccacggcgaaggccctggcggagaccggcaagtggcacgtcatcatggcctgccgcgattttctcaaggcgtcgcgcgcggccaaagcggccggcatggacaaggacagcttcaccgtcgtgcacctggacctcgcctccctcgacagcgtccgccagttcgtcaagaacgtgcgccagctggagatgcccgtcgacgtggtggtctgcaacgccgccgtgtaccagcccaccgccaaggagccgtcctacaccgccgacggcttcgagatgagcgtcggcgtcaaccacctcggccacttcctcctcgcccgcgagctcctcagcgacctccagtcctccgactatccctccaagcgcctcatcatcgtcggctccatcaccgggaacacgaacacgctggcggggaacgtgccgccgaaggcgaacctgggtgacctgcgcggcctcgccggcggcctcaacggcattggcggctccgcgatgatcgacggcggggagttcgacggggccaaggcatacaaggacagcaaggtgtgcaacatgctgacgatgcaggagttccaccgccggtaccacgaggagacgggcgtgaccttcgcgtcgctctaccccggctgcatcgccaccacgggcctgttccgcgagcacatcccgctgttccgcctgctcttcccgccattccagaagtacatcaccaaggggtacgtctccgaggaggaggccgggaagcggctgtcgcaggtcgtgagcgaccccagcctgaccaagtccggcgtgtactggagctggaacaagaactcggcgtccttcgagaaccagctctctgaggaggccagcgacgccgacaaggccaagaagctctgggagatcagcgagaagctcgtcggcttggcgtgacgacctgatgcccaccgtggccggcgccggcagccggtgacagttttttcctaggacatgttcgttacttgatctcagtcgacgcgtggtgcactcgtgtcagagtgacaggagaggaagtgtgtacactgtacacgtgtaggcatgtttggttgacttttttgttacgaggttttctgataatatagctgtggagagaatct

SEQ ID NO: 5286 - protein, 435 aa, Zea mays subsp. mays
  peptide (1)..(435): Ceres Seq. ID no. 12409610
  misc_feature (40)..(435): Homolog of NCBI NO: 10720236 NR Description: Protochlorophyllide reductase B, chloroplast
  misc_feature (40)..(435): Homolog of NCBI NO: 10720233 NR Description: Protochlorophyllide reductase, chloroplast
  misc_feature (40)..(435): Homolog of NCBI NO: 10720220 NR Description: Protochlorophyllide reductase, chloroplast
  misc_feature (40)..(435): Homolog of NCBI NO: 266742 NR Description: Protochlorophyllide reductase, chloroplast
  misc_feature (40)..(435): Homolog of NCBI NO: 81946 NR Description: protochlorophyllide reductase (EC 1.3.1.33)
  misc_feature (40)..(435): Homolog of NCBI NO: 15234129 NR Description: protochlorophyllide reductase precursor; protein At4g27440.1, supported by cDNA: 36741., supported by cDNA: supported by cDNA: gi_15809877, supported by cDNA: gi_20148272,
  misc_feature (40)..(435): Homolog of NCBI NO: 21068893 NR Description: NADPH:protochlorophyllide oxidoreductase
  misc_feature (40)..(435): Homolog of NCBI NO: 15239574 NR Description: NADPH:protochlorophyllide oxidoreductase A protein id: At5g54190.1, supported by cDNA: gi_968974 thaliana] >gi|26454645|sp|Q42536|PORA_ARATH Protochlorophyllide
  misc_feature (40)..(435): Homolog of NCBI NO: 968975 NR Description: NADPH:protochlorophyllide oxidoreductase A
  misc_feature (39)..(434): Homolog of NCBI NO: 10720231 NR Description: Protochlorophyllide reductase, chloroplast
PTPTRRGRGRTQPNPQSSGCSQFVLSARAPGSLPARQFGMALQAATSFLPSALSARKEGSSVKDSAFLGVHLADDGLKLETAALGLRTKRVITSVAIRAQAAAVSSPSVTPASPSGKKTLRKGTAIITGASSGLGLATAKALAETGKWHVIMACRDFLKASRAAKAAGMDKDSFTVVHLDLASLDSVRQFVKNVRQLEMPVDVVVCNAAVYQPTAKEPSYTADGFEMSVGVNHLGHFLLARELLSDLQSSDYPSKRLIIVGSITGNTNTLAGNVPPKANLGDLRGLAGGLNGIGGSAMIDGGEFDGAKAYKDSKVCNMLTMQEFHRRYHEETGVTFASLYPGCIATTGLFREHIPLFRLLFPPFQKYITKGYVSEEEAGKRLSQVVSDPSLTKSGVYWSWNKNSASFENQLSEEASDADKAKKLWEISEKLVGLA

SEQ ID NO: 5287 - protein, 396 aa, Zea mays subsp. mays
  peptide (1)..(396): Ceres Seq. ID no. 12409611
  misc_feature (1)..(396): Homolog of NCBI NO: 10720236 NR Description: Protochlorophyllide reductase B, chloroplast
  misc_feature (1)..(396): Homolog of NCBI NO: 10720233 NR Description: Protochlorophyllide reductase, chloroplast
  misc_feature (1)..(396): Homolog of NCBI NO: 10720220 NR Description: Protochlorophyllide reductase, chloroplast
  misc_feature (1)..(396): Homolog of NCBI NO: 266742 NR Description: Protochlorophyllide reductase, chloroplast
  misc_feature (1)..(396): Homolog of NCBI NO: 81946 NR Description: protochlorophyllide reductase (EC 1.3.1.33)
  misc_feature (1)..(396): Homolog of NCBI NO: 15234129 NR Description: protochlorophyllide reductase precursor; protein At4g27440.1, supported by cDNA: 36741., supported by cDNA: supported by cDNA: gi_15809877, supported by cDNA: gi_20148272,
  misc_feature (1)..(396): Homolog of NCBI NO: 21068893 NR Description: NADPH:protochlorophyllide oxidoreductase
  misc_feature (1)..(396): Homolog of NCBI NO: 15239574 NR Description: NADPH:protochlorophyllide oxidoreductase A protein id: At5g54190.1, supported by cDNA: gi_968974 thaliana] >gi|26454645|sp|Q42536|PORA_ARATH Protochlorophyllide
  misc_feature (1)..(396): Homolog of NCBI NO: 968975 NR Description: NADPH:protochlorophyllide oxidoreductase A
  misc_feature (1)..(395): Homolog of NCBI NO: 10720231 NR Description: Protochlorophyllide reductase, chloroplast
MALQAATSFLPSALSARKEGSSVKDSAFLGVHLADDGLKLETAALGLRTKRVITSVAIRAQAAAVSSPSVTPASPSGKKTLRKGTAIITGASSGLGLATAKALAETGKWHVIMACRDFLKASRAAKAAGMDKDSFTVVHLDLASLDSVRQFVKNVRQLEMPVDVVVCNAAVYQPTAKEPSYTADGFEMSVGVNHLGHFLLARELLSDLQSSDYPSKRLIIVGSITGNTNTLAGNVPPKANLGDLRGLAGGLNGIGGSAMIDGGEFDGAKAYKDSKVCNMLTMQEFHRRYHEETGVTFASLYPGCIATTGLFREHIPLFRLLFPPFQKYITKGYVSEEEAGKRLSQVVSDPSLTKSGVYWSWNKNSASFENQLSEEASDADKAKKLWEISEKLVGLA

SEQ ID NO: 5288 - protein, 284 aa, Zea mays subsp. mays
  peptide (1)..(284): Ceres Seq. ID no. 12409612
  misc_feature (1)..(284): Homolog of NCBI NO: 10720236 NR Description: Protochlorophyllide reductase B, chloroplast
  misc_feature (1)..(284): Homolog of NCBI NO: 10720233 NR Description: Protochlorophyllide reductase, chloroplast
  misc_feature (1)..(284): Homolog of NCBI NO: 10720220 NR Description: Protochlorophyllide reductase, chloroplast
  misc_feature (1)..(284): Homolog of NCBI NO: 266742 NR Description: Protochlorophyllide reductase, chloroplast
  misc_feature (1)..(284): Homolog of NCBI NO: 81946 NR Description: protochlorophyllide reductase (EC 1.3.1.33)
  misc_feature (1)..(284): Homolog of NCBI NO: 15234129 NR Description: protochlorophyllide reductase precursor; protein At4g27440.1, supported by cDNA: 36741., supported by cDNA: supported by cDNA: gi_15809877, supported by cDNA: gi_20148272,
  misc_feature (1)..(284): Homolog of NCBI NO: 21068893 NR Description: NADPH:protochlorophyllide oxidoreductase
  misc_feature (1)..(284): Homolog of NCBI NO: 15239574 NR Description: NADPH:protochlorophyllide oxidoreductase A protein id: At5g54190.1, supported by cDNA: gi_968974 thaliana] >gi|26454645|sp|Q42536|PORA_ARATH Protochlorophyllide
  misc_feature (1)..(284): Homolog of NCBI NO: 968975 NR Description: NADPH:protochlorophyllide oxidoreductase A
  misc_feature (1)..(283): Homolog of NCBI NO: 10720231 NR Description: Protochlorophyllide reductase, chloroplast
MACRDFLKASRAAKAAGMDKDSFTVVHLDLASLDSVRQFVKNVRQLEMPVDVVVCNAAVYQPTAKEPSYTADGFEMSVGVNHLGHFLLARELLSDLQSSDYPSKRLIIVGSITGNTNTLAGNVPPKANLGDLRGLAGGLNGIGGSAMIDGGEFDGAKAYKDSKVCNMLTMQEFHRRYHEETGVTFASLYPGCIATTGLFREHIPLFRLLFPPFQKYITKGYVSEEEAGKRLSQVVSDPSLTKSGVYWSWNKNSASFENQLSEEASDADKAKKLWEISEKLVGLA

SEQ ID NO: 5289 - DNA, 848 bp, Zea mays subsp. mays
  misc_feature (1)..(848): Ceres Seq. ID no. 13498757
  misc_feature: MA Experiment ID: 108504 Result: Up-regulated in Transcription
  misc_feature: MA Experiment 108504 PARAMETER Experiment Name: Zm_Drought_P Parameter: Age (day) Value: 8
  misc_feature: MA Experiment 108504 PARAMETER Experiment Name: Zm_Drought_P Parameter: Organism Value: Zea mays
  misc_feature: MA Experiment 108504 PARAMETER Experiment Name: Zm_Drought_P Parameter: Plant Line Value: 35A19
  misc_feature: MA Experiment 108504 PARAMETER Experiment Name: Zm_Drought_P Parameter: Timepoint (hr) Value: 12
  misc_feature: MA Experiment 108504 PARAMETER Experiment Name: Zm_Drought_P Parameter: Tissue Value: Aerial
  misc_feature: MA Experiment 108504 PARAMETER Experiment Name: Zm_Drought_P Parameter: Treatment Value: Drought vs. No Drought
  misc_feature: MA Experiment ID: 108689 Result: Up-regulated in Transcription
  misc_feature: MA Experiment 108689 PARAMETER Experiment Name: Zm_Drought_Roots_P Parameter: Age (day) Value: 9
  misc_feature: MA Experiment 108689 PARAMETER Experiment Name: Zm_Drought_Roots_P Parameter: Organism Value: Zea mays
  misc_feature: MA Experiment 108689 PARAMETER Experiment Name: Zm_Drought_Roots_P Parameter: Plant Line Value: 35A19
  misc_feature: MA Experiment 108689 PARAMETER Experiment Name: Zm_Drought_Roots_P Parameter: Timepoint (hr) Value: 24
  misc_feature: MA Experiment 108689 PARAMETER Experiment Name: Zm_Drought_Roots_P Parameter: Tissue Value: Roots
  misc_feature: MA Experiment 108689 PARAMETER Experiment Name: Zm_Drought_Roots_P Parameter: Treatment Value: Drought vs. No Drought
  misc_feature: MA Experiment ID: 20000492 Result: Down-regulated in Transcription
  misc_feature: MA Experiment 20000492 PARAMETER Experiment Name: Zm_Hybrid_Seed_Dev_P Parameter: DAP Value: 12
  misc_feature: MA Experiment 20000492 PARAMETER Experiment Name: Zm_Hybrid_Seed_Dev_P Parameter: Organism Value: Zea mays
  misc_feature: MA Experiment 20000492 PARAMETER Experiment Name: Zm_Hybrid_Seed_Dev_P Parameter: Plant Line Value: 35A19
  misc_feature: MA Experiment 20000492 PARAMETER Experiment Name: Zm_Hybrid_Seed_Dev_P Parameter: Tissue Value: Fert Kernel vs. Unfert Floret
  misc_feature: MA Experiment ID: 20000534 Result: Down-regulated in Transcription
  misc_feature: MA Experiment 20000534 PARAMETER Experiment Name: Zm_Hybrid_Pollen_P Parameter: Age (day) Value: 8
  misc_feature: MA Experiment 20000534 PARAMETER Experiment Name: Zm_Hybrid_Pollen_P Parameter: Organism Value: Zea mays
  misc_feature: MA Experiment 20000534 PARAMETER Experiment Name: Zm_Hybrid_Pollen_P Parameter: Plant Line Value: 35A19
  misc_feature: MA Experiment 20000534 PARAMETER Experiment Name: Zm_Hybrid_Pollen_P Parameter: Tissue Value: Pollen vs. Aerial
  misc_feature: MA Experiment ID: 20000535 Result: Down-regulated in Transcription
  misc_feature: MA Experiment 20000535 PARAMETER Experiment Name: Zm_Hybrid_Seed_Dev_P Parameter: DAP Value: 30 vs. 12
  misc_feature: MA Experiment 20000535 PARAMETER Experiment Name: Zm_Hybrid_Seed_Dev_P Parameter: Organism Value: Zea mays
  misc_feature: MA Experiment 20000535 PARAMETER Experiment Name: Zm_Hybrid_Seed_Dev_P Parameter: Plant Line Value: 35A19
  misc_feature: MA Experiment 20000535 PARAMETER Experiment Name: Zm_Hybrid_Seed_Dev_P Parameter: Tissue Value: Embryo vs. Unfert Floret
acacaccccagtttcttccttccttcctcggtctaaagaagcaagcagccatggacggcgacgtcgcgaccggcggcgtgcgggggcaccagcatccacatcacggcgctggacggcatcgtgaacgtgaattcgctcttcaccctggccgccttcctgggcctggcgtggcggccctcctccgacgggccggggctcgccgacggcgccgaccgcacgggcaacccctgcgccgcgggggaccgcgccgagtcggacctcgtctccttccacgtgctcgccttcgcctgcttcctcttctccagcctcgtcgcgctctgcctcaagcagctcgtccgcacctaccccgcgccccaccgccgccgcgccgcctccgcctccgcctccgccgccggcggcccgcaccgcgcggatcaaccgcgcggcgctccgcgtcgggatcctcgcgtccgccgtggggtccgtcgccggatgcggcttcctgatgatggccctcgtcaacgtggtgcaggtgaagctcgggcgactcgggtgcggcgccggcggggccgccgcctgggccgccgtcgtgccgctcgtcaccctcgtcccttccgccatgctcatctacatcggcaccgtcttctacgccttcacacgctagtcggtggcggatcaaggaacactctgaccaaagcacccgtttttcgatcagatctttatctgtgtgatccctcctcagtctttcttgtgtgtgattggtggtgatggcgtgagagaacttccaggggggaacaatgcagctgacttttgtagatttaagatatgtaaaatccatgcgatattatgattgtgttttggagttttgg

SEQ ID NO: 5290 - protein, 160 aa, Zea mays subsp. mays
  peptide (1)..(160): Ceres Seq. ID no. 13498758
  misc_feature (134)..(160): Homolog of NCBI NO: 11359723 NR Description: proteophosphoglycan, membrane-associated - Leishmania major (fragment) >gi|5420389|emb|CAB46680.1|
  misc_feature (134)..(160): Homolog of NCBI NO: 13592175 NR Description: ppg3 [Leishmania major]
  misc_feature (134)..(160): Homolog of NCBI NO: 13592175 NR Description: ppg3 [Leishmania major]
  misc_feature (134)..(160): Homolog of NCBI NO: 13592175 NR Description: ppg3 [Leishmania major]
  misc_feature (134)..(160): Homolog of NCBI NO: 13592175 NR Description: ppg3 [Leishmania major]
  misc_feature (134)..(160): Homolog of NCBI NO: 11359723 NR Description: proteophosphoglycan, membrane-associated - Leishmania major (fragment) >gi|5420389|emb|CAB46680.1|
  misc_feature (134)..(160): Homolog of NCBI NO: 13592175 NR Description: ppg3 [Leishmania major]
  misc_feature (134)..(160): Homolog of NCBI NO: 13592175 NR Description: ppg3 [Leishmania major]
  misc_feature (134)..(160): Homolog of NCBI NO: 13592175 NR Description: ppg3 [Leishmania major]
  misc_feature (134)..(160): Homolog of NCBI NO: 13592175 NR Description: ppg3 [Leishmania major]
TPQFLPSFLGLKKQAAMDGDVATGGVRGHQHPHHGAGRHREREFALHPGRLPGPGVAALLRRAGARRRRRPHGQPLRRGGPRRVGPRLLPRARLRLLPLLQPRRALPQAARPHLPRAPPPPRRLRLRLRRRRPAPRGSTARRSASGSSRPPWGPSPDAAS

SEQ ID NO: 5291 - protein, 144 aa, Zea mays subsp. mays
  peptide (1)..(144): Ceres Seq. ID no. 13498759
  misc_feature (118)..(144): Homolog of NCBI NO: 11359723 NR Description: proteophosphoglycan, membrane-associated - Leishmania major (fragment) >gi|5420389|emb|CAB46680.1|
  misc_feature (118)..(144): Homolog of NCBI NO: 13592175 NR Description: ppg3 [Leishmania major]
  misc_feature (118)..(144): Homolog of NCBI NO: 13592175 NR Description: ppg3 [Leishmania major]
  misc_feature (118)..(144): Homolog of NCBI NO: 13592175 NR Description: ppg3 [Leishmania major]
  misc_feature (118)..(144): Homolog of NCBI NO: 13592175 NR Description: ppg3 [Leishmania major]
  misc_feature (118)..(144): Homolog of NCBI NO: 11359723 NR Description: proteophosphoglycan, membrane-associated - Leishmania major (fragment) >gi|5420389|emb|CAB46680.1|
  misc_feature (118)..(144): Homolog of NCBI NO: 13592175 NR Description: ppg3 [Leishmania major]
  misc_feature (118)..(144): Homolog of NCBI NO: 13592175 NR Description: ppg3 [Leishmania major]
  misc_feature (118)..(144): Homolog of NCBI NO: 13592175 NR Description: ppg3 [Leishmania major]
  misc_feature (118)..(144): Homolog of NCBI NO: 13592175 NR Description: ppg3 [Leishmania major]
MDGDVATGGVRGHQHPHHGAGRHREREFALHPGRLPGPGVAALLRRAGARRRRRPHGQPLRRGGPRRVGPRLLPRARLRLLPLLQPRRALPQAARPHLPRAPPPPRRLRLRLRRRRPAPRGSTARRSASGSSRPPWGPSPDAAS

SEQ ID NO: 5292 - protein, 91 aa, Zea mays subsp. mays
  peptide (1)..(91): Ceres Seq. ID no. 13498760
MRLPDDGPRQRGAGEARATRVRRRRGRRLGRRRAARHPRPFRHAHLHRHRLLRLHTLVGGGSRNTLTKAPVFRSDLYLCDPSSVFLVCDWW

SEQ ID NO: 5293 - DNA, 1629 bp, Zea mays subsp. mays
  misc_feature (1)..(1629): Ceres Seq. ID no. 12409598
  misc_feature: MA Experiment ID: 108535 Result: Up-regulated in Transcription
  misc_feature: MA Experiment 108535 PARAMETER Experiment Name: Zm_Meristem_P Parameter: Age (day) Value: 8
  misc_feature: MA Experiment 108535 PARAMETER Experiment Name: Zm_Meristem_P Parameter: Organism Value: Zea mays
  misc_feature: MA Experiment 108535 PARAMETER Experiment Name: Zm_Meristem_P Parameter: Plant Line Value: 35A19
  misc_feature: MA Experiment 108535 PARAMETER Experiment Name: Zm_Meristem_P Parameter: Tissue Value: Root Meristem vs. Above Root Meristem
  misc_feature: MA Experiment ID: 20000108 Result: Up-regulated in Transcription
  misc_feature: MA Experiment 20000108 PARAMETER Experiment Name: Zm_Root-Tips_P Parameter: Age (day) Value: 12
  misc_feature: MA Experiment 20000108 PARAMETER Experiment Name: Zm_Root-Tips_P Parameter: Organism Value: Zea mays
  misc_feature: MA Experiment 20000108 PARAMETER Experiment Name: Zm_Root-Tips_P Parameter: Tissue Value: Root tips vs. Root mid region    35
  misc_feature: MA Experiment 20000108 PARAMETER Experiment Name: Zm_Root-Tips_P Parameter: Tissue Value: Root tips vs. Root mid region   Sequence Listing-Misc Features (4)
  misc_feature: MA Experiment ID: 20000479 Result: Down-regulated in Transcription
  misc_feature: MA Experiment 20000479 PARAMETER Experiment Name: Zm_Drought_P Parameter: Age (day) Value: 10
  misc_feature: MA Experiment 20000479 PARAMETER Experiment Name: Zm_Drought_P Parameter: Organism Value: Zea mays
  misc_feature: MA Experiment 20000479 PARAMETER Experiment Name: Zm_Drought_P Parameter: Plant Line Value: 35A19
  misc_feature: MA Experiment 20000479 PARAMETER Experiment Name: Zm_Drought_P Parameter: Timepoint (hr) Value: 48
  misc_feature: MA Experiment 20000479 PARAMETER Experiment Name: Zm_Drought_P Parameter: Tissue Value: Aerial
  misc_feature: MA Experiment 20000479 PARAMETER Experiment Name: Zm_Drought_P Parameter: Treatment Value: Drought vs. No Drought
  misc_feature: MA Experiment ID: 20000535 Result: Up-regulated in Transcription
  misc_feature: MA Experiment 20000535 PARAMETER Experiment Name: Zm_Hybrid_Seed_Dev_P Parameter: DAP Value: 30 vs. 12
  misc_feature: MA Experiment 20000535 PARAMETER Experiment Name: Zm_Hybrid_Seed_Dev_P Parameter: Organism Value: Zea mays
  misc_feature: MA Experiment 20000535 PARAMETER Experiment Name: Zm_Hybrid_Seed_Dev_P Parameter: Plant Line Value: 35A19
  misc_feature: MA Experiment 20000535 PARAMETER Experiment Name: Zm_Hybrid_Seed_Dev_P Parameter: Tissue Value: Embryo vs. Unfert Floret
actaccgtcctgctccacgctcctcggttcccgtgctcgtgtcatcgaccgccggggcccactcaccagtctcccaacacgcagcgagcggcagctcctcctcgtctctcaaagtcgagccgccactcgattaagcgattccaaggcggagcggtgaggtggctatggagtacaggagggtgaaggatcagatttatgatgatttatctcagaaggatgtggaaagcctgagtgggaggacactatctagtgccaatactacagctattggtcccgcttctgcaggaggcgcaaaagccaactctagttggaagctaaagtctgttgttactcttgcattgacattgctaacaagttctcaggcaatattaattgtgtggtcaaaaagagctggaaaatatgaatatagtgtcacaacagctaatttttcggtggaggctttaaaatgccttctatcactagctgctctttttaggacgtggaactgccatggtgtcactgatgataatagattaaccacatcttttgatgaagttggtgtatatccgattcctgctgttctttacatggtaaagaacttattgcagtactatatctttgtctacgtggatgcaccagcttatcaaatcttgaagaacctaaatatcatcagcacaggtgttttgtaccgcatcattttgaagaaaaagctaagtgaaattcagtgggcagcatttgttcttctatgtgctggttgcacaacagctcaacttaatccttcgtctgaccatgtgcttcaaactcctattcaaggttggatgatggcaattgtgatggctcttttgagtggttttgctggggtgtatacagaagctatcattaaaaaacggccatcaagaaacatcaacgtgcagaacttttggctatacatatttggggtgatcttcaatctagttgcaatttgtgttcaggattatgatgcagtcatgaataaaggctttttccatgggtattcattcatcacagttttgatgattctgaaccacgcactgagtggaattgctgtttcaatggtgatgaaatatgctgataacatagtcaaggtctattcaacttcagttgcaatgcttctgacagcagttgtatctgtcttcttgttcaacttccatttatccctcgcattcttccttggatccacagttgtttccgtctcagtgtacctgcactcaattggaaaacttcaaccacagaaataaggattggtgaagatggaatatgggattcattatcggtgtttggtgctttgaggctataagaaaagcttcagtggagatgagatttgattgcatagttgtgaaagttagtaggtggtcaaagtaagaaccagaaatgtatttttggaggggttctagctattatccggtctagtttttgttctattctatcaagtcgagttcgttgatcgctaaccgcatccgtgcctagtttttgatatatcaaacgcacatttattgtaatgctagtattttgaaatactaggtagtacccaattgttgtatggagctagttgtcttttcattctaatgtatagaattaccattctttttaccaccgagcgtgtggaccgatgttgaggccctttttactccc

SEQ ID NO: 5294 - protein, 356 aa, Zea mays subsp. mays
  peptide (1)..(356): Ceres Seq. ID no. 12409599
  misc_feature (115)..(336): Pfam Name: Nucleotide-sugar transporter Pfam Description: Nucleotide-sugar transporter
  misc_feature (1)..(356): Homolog of NCBI NO: 34393556 NR Description: putative CMP-sialic acid transporter [Oryza
  misc_feature (1)..(289): Homolog of NCBI NO: 30690310 NR Description: hypothetical protein [Arabidopsis thaliana]
  misc_feature (55)..(347): Homolog of NCBI NO: 18422134 NR Description: CMP-sialic acid transporter-like protein; protein
  misc_feature (66)..(347): Homolog of NCBI NO: 10177360 NR Description: CMP-sialic acid transporter-like protein
  misc_feature (254)..(353): Homolog of NCBI NO: 7488414 NR Description: UDP-galactose transport protein homolog
  misc_feature (38)..(141): Homolog of NCBI NO: 7486015 NR Description: hypothetical protein F23E12.110 - Arabidopsis >gi|3080417|emb|CAA18736.1| putative protein [Arabidopsis >gi|7270485|emb|CAB80250.1| putative protein [Arabidopsis
  misc_feature (43)..(349): Homolog of NCBI NO: 6755558 NR Description: solute carrier family 35 (CMP-sialic acid
  misc_feature (59)..(349): Homolog of NCBI NO: 5453621 NR Description: solute carrier family 35 (CMP-sialic acid
  misc_feature (18)..(348): Homolog of NCBI NO: 39579880 NR Description: Hypothetical protein CBG24372 [Caenorhabditis
  misc_feature (43)..(349): Homolog of NCBI NO: 2499225 NR Description: CMP-sialic acid transporter (CMP-Sia-Tr)
MEYRRVKDQIYDDLSQKDVESLSGRTLSSANTTAIGPASAGGAKANSSWKLKSVVTLALTLLTSSQAILIVWSKRAGKYEYSVTTANFSVEALKCLLSLAALFRTWNCHGVTDDNRLTTSFDEVGVYPIPAVLYMVKNLLQYYIFVYVDAPAYQILKNLNIISTGVLYRIILKKKLSEIQWAAFVLLCAGCTTAQLNPSSDHVLQTPIQGWMMAIVMALLSGFAGVYTEAIIKKRPSRNINVQNFWLYIFGVIFNLVAICVQDYDAVMNKGFFHGYSFITVLMILNHALSGIAVSMVMKYADNIVKVYSTSVAMLLTAVVSVFLFNFHLSLAFFLGSTVVSVSVYLHSIGKLQPQK

SEQ ID NO: 5295 - protein, 222 aa, Zea mays subsp. mays
  peptide (1)..(222): Ceres Seq. ID no. 12409600
  misc_feature (1)..(202): Pfam Name: Nucleotide-sugar transporter Pfam Description: Nucleotide-sugar transporter
  misc_feature (1)..(222): Homolog of NCBI NO: 34393556 NR Description: putative CMP-sialic acid transporter [Oryza
  misc_feature (1)..(155): Homolog of NCBI NO: 30690310 NR Description: hypothetical protein [Arabidopsis thaliana]
  misc_feature (1)..(213): Homolog of NCBI NO: 18422134 NR Description: CMP-sialic acid transporter-like protein; protein
  misc_feature (1)..(213): Homolog of NCBI NO: 10177360 NR Description: CMP-sialic acid transporter-like protein
  misc_feature (120)..(219): Homolog of NCBI NO: 7488414 NR Description: UDP-galactose transport protein homolog
  misc_feature (1)..(215): Homolog of NCBI NO: 6755558 NR Description: solute carrier family 35 (CMP-sialic acid
  misc_feature (1)..(215): Homolog of NCBI NO: 5453621 NR Description: solute carrier family 35 (CMP-sialic acid
  misc_feature (1)..(214): Homolog of NCBI NO: 39579880 NR Description: Hypothetical protein CBG24372 [Caenorhabditis
  misc_feature (1)..(215): Homolog of NCBI NO: 2499225 NR Description: CMP-sialic acid transporter (CMP-Sia-Tr)
  misc_feature (1)..(215): Homolog of NCBI NO: 18252814 NR Description: CMP-sialic acid transporter [Canis familiaris]
MVKNLLQYYIFVYVDAPAYQILKNLNIISTGVLYRIILKKKLSEIQWAAFVLLCAGCTTAQLNPSSDHVLQTPIQGWMMAIVMALLSGFAGVYTEAIIKKRPSRNINVQNFWLYIFGVIFNLVAICVQDYDAVMNKGFFHGYSFITVLMILNHALSGIAVSMVMKYADNIVKVYSTSVAMLLTAVVSVFLFNFHLSLAFFLGSTVVSVSVYLHSIGKLQPQK

SEQ ID NO: 5296 - DNA, 1710 bp, Zea mays subsp. mays
  misc_feature (1)..(1710): Ceres Seq. ID no. 12366888
  misc_feature: MA Experiment ID: 108504 Result: Down-regulated in Transcription
  misc_feature: MA Experiment 108504 PARAMETER Experiment Name: Zm_Drought_P Parameter: Age (day) Value: 8
  misc_feature: MA Experiment 108504 PARAMETER Experiment Name: Zm_Drought_P Parameter: Organism Value: Zea mays
  misc_feature: MA Experiment 108504 PARAMETER Experiment Name: Zm_Drought_P Parameter: Plant Line Value: 35A19
  misc_feature: MA Experiment 108504 PARAMETER Experiment Name: Zm_Drought_P Parameter: Timepoint (hr) Value: 12
  misc_feature: MA Experiment 108504 PARAMETER Experiment Name: Zm_Drought_P Parameter: Tissue Value: Aerial
  misc_feature: MA Experiment 108504 PARAMETER Experiment Name: Zm_Drought_P Parameter: Treatment Value: Drought vs. No Drought
  misc_feature: MA Experiment ID: 108515 Result: Down-regulated in Transcription
  misc_feature: MA Experiment 108515 PARAMETER Experiment Name: Zm_2mM_SA_P Parameter: Age (day) Value: 8
  misc_feature: MA Experiment 108515 PARAMETER Experiment Name: Zm_2mM_SA_P Parameter: Organism Value: Zea mays
  misc_feature: MA Experiment 108515 PARAMETER Experiment Name: Zm_2mM_SA_P Parameter: Plant Line Value: 35A19
  misc_feature: MA Experiment 108515 PARAMETER Experiment Name: Zm_2mM_SA_P Parameter: Timepoint (hr) Value: 12
  misc_feature: MA Experiment 108515 PARAMETER Experiment Name: Zm_2mM_SA_P Parameter: Tissue Value: Aerial
  misc_feature: MA Experiment 108515 PARAMETER Experiment Name: Zm_2mM_SA_P Parameter: Treatment Value: 2mM SA vs. No Treatment
  misc_feature: MA Experiment ID: 108527 Result: Down-regulated in Transcription
  misc_feature: MA Experiment 108527 PARAMETER Experiment Name: Zm_5mM_NO_P Parameter: Age (day) Value: 8
  misc_feature: MA Experiment 108527 PARAMETER Experiment Name: Zm_5mM_NO_P Parameter: Organism Value: Zea mays
  misc_feature: MA Experiment 108527 PARAMETER Experiment Name: Zm_5mM_NO_P Parameter: Plant Line Value: 35A19
  misc_feature: MA Experiment 108527 PARAMETER Experiment Name: Zm_5mM_NO_P Parameter: Timepoint (hr) Value: 6
  misc_feature: MA Experiment 108527 PARAMETER Experiment Name: Zm_5mM_NO_P Parameter: Tissue Value: Aerial
  misc_feature: MA Experiment 108527 PARAMETER Experiment Name: Zm_5mM_NO_P Parameter: Treatment Value: 5mM NO vs. No Treatment
  misc_feature: MA Experiment ID: 108528 Result: Up-regulated in Transcription
  misc_feature: MA Experiment 108528 PARAMETER Experiment Name: Zm_Imbibed_Seeds_P Parameter: Age (day) Value: 5 vs. 2
  misc_feature: MA Experiment 108528 PARAMETER Experiment Name: Zm_Imbibed_Seeds_P Parameter: Organism Value: Zea mays
  misc_feature: MA Experiment 108528 PARAMETER Experiment Name: Zm_Imbibed_Seeds_P Parameter: Plant Line Value: 35A19
  misc_feature: MA Experiment 108528 PARAMETER Experiment Name: Zm_Imbibed_Seeds_P Parameter: Tissue Value: Aerial vs. Embryo
  misc_feature: MA Experiment ID: 108530 Result: Up-regulated in Transcription
  misc_feature: MA Experiment 108530 PARAMETER Experiment Name: Zm_Imbibed_Seeds_P Parameter: Age (day) Value: 6 vs. 2
  misc_feature: MA Experiment 108530 PARAMETER Experiment Name: Zm_Imbibed_Seeds_P Parameter: Organism Value: Zea mays
  misc_feature: MA Experiment 108530 PARAMETER Experiment Name: Zm_Imbibed_Seeds_P Parameter: Plant Line Value: 35A19
  misc_feature: MA Experiment 108530 PARAMETER Experiment Name: Zm_Imbibed_Seeds_P Parameter: Tissue Value: Aerial vs. Embryo
  misc_feature: MA Experiment ID: 108534 Result: Up-regulated in Transcription
  misc_feature: MA Experiment 108534 PARAMETER Experiment Name: Zm_4deg_Cold_P Parameter: Age (hr) Value: 8
  misc_feature: MA Experiment 108534 PARAMETER Experiment Name: Zm_4deg_Cold_P Parameter: Organism Value: Zea mays
  misc_feature: MA Experiment 108534 PARAMETER Experiment Name: Zm_4deg_Cold_P Parameter: Plant Line Value: 35A19
  misc_feature: MA Experiment 108534 PARAMETER Experiment Name: Zm_4deg_Cold_P Parameter: Temperature (deg C) Value: 4 vs. 22
  misc_feature: MA Experiment 108534 PARAMETER Experiment Name: Zm_4deg_Cold_P Parameter: Timepoint (hr) Value: 6
  misc_feature: MA Experiment 108534 PARAMETER Experiment Name: Zm_4deg_Cold_P Parameter: Tissue Value: Aerial
  misc_feature: MA Experiment ID: 108542 Result: Down-regulated in Transcription
  misc_feature: MA Experiment 108542 PARAMETER Experiment Name: Zm_150mM_NaCl_P Parameter: Age (day) Value: 8
  misc_feature: MA Experiment 108542 PARAMETER Experiment Name: Zm_150mM_NaCl_P Parameter: Organism Value: Zea mays
  misc_feature: MA Experiment 108542 PARAMETER Experiment Name: Zm_150mM_NaCl_P Parameter: Plant Line Value: 35A19
  misc_feature: MA Experiment 108542 PARAMETER Experiment Name: Zm_150mM_NaCl_P Parameter: Timepoint (hr) Value: 6
  misc_feature: MA Experiment 108542 PARAMETER Experiment Name: Zm_150mM_NaCl_P Parameter: Tissue Value: Aerial
  misc_feature: MA Experiment 108542 PARAMETER Experiment Name: Zm_150mM_NaCl_P Parameter: Treatment Value: 150mM NaCl vs. No Treatment
  misc_feature: MA Experiment ID: 20000477 Result: Down-regulated in Transcription
  misc_feature: MA Experiment 20000477 PARAMETER Experiment Name: Zm_5mM_SA_P Parameter: Age (day) Value: 10
  misc_feature: MA Experiment 20000477 PARAMETER Experiment Name: Zm_5mM_SA_P Parameter: Organism Value: Zea mays
  misc_feature: MA Experiment 20000477 PARAMETER Experiment Name: Zm_5mM_SA_P Parameter: Plant Line Value: 35A19
  misc_feature: MA Experiment 20000477 PARAMETER Experiment Name: Zm_5mM_SA_P Parameter: Timepoint (hr) Value: 48
  misc_feature: MA Experiment 20000477 PARAMETER Experiment Name: Zm_5mM_SA_P Parameter: Tissue Value: Aerial
  misc_feature: MA Experiment 20000477 PARAMETER Experiment Name: Zm_5mM_SA_P Parameter: Treatment Value: 5mM SA vs. No Treatment
  misc_feature: MA Experiment ID: 20000478 Result: Down-regulated in Transcription
  misc_feature: MA Experiment 20000478 PARAMETER Experiment Name: Zm_5mM_SA_P Parameter: Age (day) Value: 11
  misc_feature: MA Experiment 20000478 PARAMETER Experiment Name: Zm_5mM_SA_P Parameter: Organism Value: Zea mays
  misc_feature: MA Experiment 20000478 PARAMETER Experiment Name: Zm_5mM_SA_P Parameter: Plant Line Value: 35A19
  misc_feature: MA Experiment 20000478 PARAMETER Experiment Name: Zm_5mM_SA_P Parameter: Timepoint (hr) Value: 72
  misc_feature: MA Experiment 20000478 PARAMETER Experiment Name: Zm_5mM_SA_P Parameter: Tissue Value: Aerial
  misc_feature: MA Experiment 20000478 PARAMETER Experiment Name: Zm_5mM_SA_P Parameter: Treatment Value: 5mM SA vs. No Treatment
  misc_feature: MA Experiment ID: 20000533 Result: Down-regulated in Transcription
  misc_feature: MA Experiment 20000533 PARAMETER Experiment Name: Zm_0.001percent_MeJA_P Parameter: Age (day) Value: 11
  misc_feature: MA Experiment 20000533 PARAMETER Experiment Name: Zm_0.001percent_MeJA_P Parameter: Organism Value: Zea mays
  misc_feature: MA Experiment 20000533 PARAMETER Experiment Name: Zm_0.001percent_MeJA_P Parameter: Plant Line Value: 35A19
  misc_feature: MA Experiment 20000533 PARAMETER Experiment Name: Zm_0.001percent_MeJA_P Parameter: Timepoint (hr) Value: 72
  misc_feature: MA Experiment 20000533 PARAMETER Experiment Name: Zm_0.001percent_MeJA_P Parameter: Tissue Value: Aerial
  misc_feature: MA Experiment 20000533 PARAMETER Experiment Name: Zm_0.001percent_MeJA_P Parameter: Treatment Value: 0.001percent MeJA vs. No Treatment
  misc_feature: MA Experiment ID: 20000535 Result: Down-regulated in Transcription
  misc_feature: MA Experiment 20000535 PARAMETER Experiment Name: Zm_Hybrid_Seed_Dev_P Parameter: DAP Value: 30 vs. 12
  misc_feature: MA Experiment 20000535 PARAMETER Experiment Name: Zm_Hybrid_Seed_Dev_P Parameter: Organism Value: Zea mays
  misc_feature: MA Experiment 20000535 PARAMETER Experiment Name: Zm_Hybrid_Seed_Dev_P Parameter: Plant Line Value: 35A19
  misc_feature: MA Experiment 20000535 PARAMETER Experiment Name: Zm_Hybrid_Seed_Dev_P Parameter: Tissue Value: Embryo vs. Unfert Floret
gcacgagaccattacctagaacatcctaatcgaaaaattgcgattaatcctcccatcatccatgtccattatatactatactccctagctagctcctagcaggcagagcagtgagctagctgtgtaagaagaagaggaggactggaggaggaagaagactatcgatcgatcgatccatccatccatccatccatcgaattaatggcggcgacaacaccgtacaagcccaagaggatcctgatcacgggcgccgcggggttcatcgcgtcccacgtggcgatccgcatcgtgaacaggtaccctgagtacaaggtggtggtgctggacaagcttgactactgctccaacctcaagaacctcctccccgtcatgggctccggcggcaacaacaacttcaagttcgtcaagggcgacatcgccagcgccgacctcgtcagcttcatcctggccaccgagggcatcgacaccgtgatgcacttcgcggcgcagacccacgtggacaactccttcggcaactccttggagttcaccaagaacaacatctacggcacccacgtcctcctcgagtcctgccgcaccgccgccgcccagatccgccgcttcatccacgtcagcaccgacgaggtgtacggcgagactgacggcgacgccgtggtgggcaaccacgaggcgtcgcagctgctgccccaccaacccgtacgcggccaccaaggcccggggcccgagatgctggtgatggcgtacggccggagctacggcctccccgtcatcaccacgcgcgggaacaacgtgtacgggcccaaccagttcccggagaagctcatccccaagttcatgctgctggccatgaggggccagcgcctgcccatccacggcgacggctccaacgtccgcagctacctctactgcgacgacgtggccgaggcgttcgaggtcgtcctccaccgcggcgaggtgggccacgtctacaacatcggcaccaagaaggagcgcacggtgatggacgtggccagggacatcagcggcctcttcggcgtgcgcccggaggaggccatccagttcgtcgacaacaggcccttcaacgaccagaggtacttcctcgacgacgagaagctcaaggggctcggctggcgcgagaggacgcgctgggaggatggcctcaggaagaccatggagtggtacgtggccaaccccgactactggggggacgtgtccggggcgctgctgccgcatcccaaggcgggcggcgtcagcgtcatgaccaccacgacggaccacggcgcccggagatcgtcgtcggagatgctcgacgatcgtttcatttccatcccctcttctccgggagcggcgacggttgcaggaaacgacgatgacggcgcaccagctgcaatgccgtacagcaatggcggcgccaccaatggaaccaccaccgtgcattgattgcatgcctgcctgggtcgtcgtttcgtcatatcacatcacatccacacctgaacaattataattgttttttcaagctattatttgtattatttgctactactactagatcgagtattattgttatgtagtatgttgtttgagtccgcacgtgccgttgtattccgctgttttgttggatccatcacctcccgttggattaaagtgagtatttaaactgtaaggacaaatttattattttaaaatggatatatatgaaatttgttgttg

SEQ ID NO: 5297 - protein, 412 aa, Zea mays subsp. mays
  peptide (1)..(412): Ceres Seq. ID no. 12366889
  misc_feature (12)..(331): Pfam Name: NAD dependent epimerase/dehydratase family Pfam Description: NAD dependent epimerase/dehydratase family
  misc_feature (5)..(346): Homolog of NCBI NO: 25405640 NR Description: hypothetical protein F22G10.13 [imported] -
  misc_feature (7)..(346): Homolog of NCBI NO: 15218420 NR Description: dTDP-glucose 4,6-dehydratase, putative; protein At1g78570.1, supported by cDNA: gi_14596090, supported by cDNA: [Arabidopsis thaliana] >gi|25406555|pir||C96814 hypothetical
  misc_feature (7)..(346): Homolog of NCBI NO: 15231926 NR Description: dTDP-glucose 4,6-dehydratase, putative; protein At3g14790.1, supported by cDNA: gi_19310442 [Arabidopsis
  misc_feature (176)..(346): Homolog of NCBI NO: 18404494 NR Description: dTDP-D-glucose 4,6-dehydratase, putative; protein At1g53500.1, supported by cDNA: gi_15081768 [Arabidopsis
  misc_feature (176)..(346): Homolog of NCBI NO: 15081769 NR Description: At1g53500/F22G10_13 [Arabidopsis thaliana]
  misc_feature (10)..(345): Homolog of NCBI NO: 7657641 NR Description: dTDP-D-glucose 4,6-dehydratase [Homo sapiens]
  misc_feature (10)..(345): Homolog of NCBI NO: 30173340 NR Description: dTDP-D-glucose 4,6-dehydratase
  misc_feature (102)..(345): Homolog of NCBI NO: 34875984 NR Description: similar to 2610025M23Rik protein [Rattus
  misc_feature (10)..(69): Homolog of NCBI NO: 34875984 NR Description: similar to 2610025M23Rik protein [Rattus
  misc_feature (65)..(121): Homolog of NCBI NO: 34875984 NR Description: similar to 2610025M23Rik protein [Rattus
MAATTPYKPKRILITGAAGFIASHVAIRIVNRYPEYKVVVLDKLDYCSNLKNLLPVMGSGGNNNFKFVKGDIASADLVSFILATEGIDTVMHFAAQTHVDNSFGNSLEFTKNNIYGTHVLLESCRTAAAQIRRFIHVSTDEVYGETDGDAVVGNHEASQLLPHQPVRGHQGPGPEMLVMAYGRSYGLPVITTRGNNVYGPNQFPEKLIPKFMLLAMRGQRLPIHGDGSNVRSYLYCDDVAEAFEVVLHRGEVGHVYNIGTKKERTVMDVARDISGLFGVRPEEAIQFVDNRPFNDQRYFLDDEKLKGLGWRERTRWEDGLRKTMEWYVANPDYWGDVSGALLPHPKAGGVSVMTTTTDHGARRSSSEMLDDRFISIPSSPGAATVAGNDDDGAPAAMPYSNGGATNGTTTVH

SEQ ID NO: 5298 - protein, 356 aa, Zea mays subsp. mays
  peptide (1)..(356): Ceres Seq. ID no. 12366890
  misc_feature (1)..(275): Pfam Name: NAD dependent epimerase/dehydratase family Pfam Description: NAD dependent epimerase/dehydratase family
  misc_feature (1)..(290): Homolog of NCBI NO: 25405640 NR Description: hypothetical protein F22G10.13 [imported] -
  misc_feature (1)..(290): Homolog of NCBI NO: 15218420 NR Description: dTDP-glucose 4,6-dehydratase, putative; protein At1g78570.1, supported by cDNA: gi_14596090, supported by cDNA: [Arabidopsis thaliana] >gi|25406555|pir||C96814 hypothetical
  misc_feature (1)..(290): Homolog of NCBI NO: 15231926 NR Description: dTDP-glucose 4,6-dehydratase, putative; protein At3g14790.1, supported by cDNA: gi_19310442 [Arabidopsis
  misc_feature (120)..(290): Homolog of NCBI NO: 18404494 NR Description: dTDP-D-glucose 4,6-dehydratase, putative; protein At1g53500.1, supported by cDNA: gi_15081768 [Arabidopsis
  misc_feature (120)..(290): Homolog of NCBI NO: 15081769 NR Description: At1g53500/F22G10_13 [Arabidopsis thaliana]
  misc_feature (1)..(289): Homolog of NCBI NO: 7657641 NR Description: dTDP-D-glucose 4,6-dehydratase [Homo sapiens]
  misc_feature (1)..(289): Homolog of NCBI NO: 30173340 NR Description: dTDP-D-glucose 4,6-dehydratase
  misc_feature (46)..(289): Homolog of NCBI NO: 34875984 NR Description: similar to 2610025M23Rik protein [Rattus
  misc_feature (1)..(13): Homolog of NCBI NO: 34875984 NR Description: similar to 2610025M23Rik protein [Rattus
  misc_feature (9)..(65): Homolog of NCBI NO: 34875984 NR Description: similar to 2610025M23Rik protein [Rattus
MGSGGNNNFKFVKGDIASADLVSFILATEGIDTVMHFAAQTHVDNSFGNSLEFTKNNIYGTHVLLESCRTAAAQIRRFIHVSTDEVYGETDGDAVVGNHEASQLLPHQPVRGHQGPGPEMLVMAYGRSYGLPVITTRGNNVYGPNQFPEKLIPKFMLLAMRGQRLPIHGDGSNVRSYLYCDDVAEAFEVVLHRGEVGHVYNIGTKKERTVMDVARDISGLFGVRPEEAIQFVDNRPFNDQRYFLDDEKLKGLGWRERTRWEDGLRKTMEWYVANPDYWGDVSGALLPHPKAGGVSVMTTTTDHGARRSSSEMLDDRFISIPSSPGAATVAGNDDDGAPAAMPYSNGGATNGTTTVH

SEQ ID NO: 5299 - protein, 322 aa, Zea mays subsp. mays
  peptide (1)..(322): Ceres Seq. ID no. 12366891
  misc_feature (1)..(241): Pfam Name: NAD dependent epimerase/dehydratase family Pfam Description: NAD dependent epimerase/dehydratase family
  misc_feature (1)..(256): Homolog of NCBI NO: 25405640 NR Description: hypothetical protein F22G10.13 [imported] -
  misc_feature (1)..(256): Homolog of NCBI NO: 15218420 NR Description: dTDP-glucose 4,6-dehydratase, putative; protein At1g78570.1, supported by cDNA: gi_14596090, supported by cDNA: [Arabidopsis thaliana] >gi|25406555|pir||C96814 hypothetical
  misc_feature (1)..(256): Homolog of NCBI NO: 15231926 NR Description: dTDP-glucose 4,6-dehydratase, putative; protein At3g14790.1, supported by cDNA: gi_19310442 [Arabidopsis
  misc_feature (86)..(256): Homolog of NCBI NO: 18404494 NR Description: dTDP-D-glucose 4,6-dehydratase, putative; protein At1g53500.1, supported by cDNA: gi_15081768 [Arabidopsis
  misc_feature (86)..(256): Homolog of NCBI NO: 15081769 NR Description: At1g53500/F22G10_13 [Arabidopsis thaliana]
  misc_feature (1)..(255): Homolog of NCBI NO: 7657641 NR Description: dTDP-D-glucose 4,6-dehydratase [Homo sapiens]
  misc_feature (1)..(255): Homolog of NCBI NO: 30173340 NR Description: dTDP-D-glucose 4,6-dehydratase
  misc_feature (12)..(255): Homolog of NCBI NO: 34875984 NR Description: similar to 2610025M23Rik protein [Rattus
  misc_feature (1)..(31): Homolog of NCBI NO: 34875984 NR Description: similar to 2610025M23Rik protein [Rattus
  misc_feature (1)..(233): Homolog of NCBI NO: 21313168 NR Description: RIKEN cDNA 2610025M23 [Mus musculus]
MHFAAQTHVDNSFGNSLEFTKNNIYGTHVLLESCRTAAAQIRRFIHVSTDEVYGETDGDAVVGNHEASQLLPHQPVRGHQGPGPEMLVMAYGRSYGLPVITTRGNNVYGPNQFPEKLIPKFMLLAMRGQRLPIHGDGSNVRSYLYCDDVAEAFEVVLHRGEVGHVYNIGTKKERTVMDVARDISGLFGVRPEEAIQFVDNRPFNDQRYFLDDEKLKGLGWRERTRWEDGLRKTMEWYVANPDYWGDVSGALLPHPKAGGVSVMTTTTDHGARRSSSEMLDDRFISIPSSPGAATVAGNDDDGAPAAMPYSNGGATNGTTTVH

SEQ ID NO: 5300 - DNA, 1318 bp, Zea mays subsp. mays
  misc_feature (1)..(1318): Ceres Seq. ID no. 12365440
  misc_feature: MA Experiment ID: 108504 Result: Up-regulated in Transcription
  misc_feature: MA Experiment 108504 PARAMETER Experiment Name: Zm_Drought_P Parameter: Age (day) Value: 8
  misc_feature: MA Experiment 108504 PARAMETER Experiment Name: Zm_Drought_P Parameter: Organism Value: Zea mays
  misc_feature: MA Experiment 108504 PARAMETER Experiment Name: Zm_Drought_P Parameter: Plant Line Value: 35A19
  misc_feature: MA Experiment 108504 PARAMETER Experiment Name: Zm_Drought_P Parameter: Timepoint (hr) Value: 12
  misc_feature: MA Experiment 108504 PARAMETER Experiment Name: Zm_Drought_P Parameter: Tissue Value: Aerial
  misc_feature: MA Experiment 108504 PARAMETER Experiment Name: Zm_Drought_P Parameter: Treatment Value: Drought vs. No Drought
  misc_feature: MA Experiment ID: 108529 Result: Down-regulated in Transcription
  misc_feature: MA Experiment 108529 PARAMETER Experiment Name: Zm_Imbibed_Seeds_P Parameter: Age (day) Value: 5 vs. 2
  misc_feature: MA Experiment 108529 PARAMETER Experiment Name: Zm_Imbibed_Seeds_P Parameter: Organism Value: Zea mays
  misc_feature: MA Experiment 108529 PARAMETER Experiment Name: Zm_Imbibed_Seeds_P Parameter: Plant Line Value: 35A19
  misc_feature: MA Experiment 108529 PARAMETER Experiment Name: Zm_Imbibed_Seeds_P Parameter: Tissue Value: Roots vs. Embryo
  misc_feature: MA Experiment ID: 108559 Result: Up-regulated in Transcription
  misc_feature: MA Experiment 108559 PARAMETER Experiment Name: Zm_5mM_NO_P Parameter: Age (day) Value: 8
  misc_feature: MA Experiment 108559 PARAMETER Experiment Name: Zm_5mM_NO_P Parameter: Organism Value: Zea mays
  misc_feature: MA Experiment 108559 PARAMETER Experiment Name: Zm_5mM_NO_P Parameter: Plant Line Value: 35A19
  misc_feature: MA Experiment 108559 PARAMETER Experiment Name: Zm_5mM_NO_P Parameter: Timepoint (hr) Value: 12
  misc_feature: MA Experiment 108559 PARAMETER Experiment Name: Zm_5mM_NO_P Parameter: Tissue Value: Aerial
  misc_feature: MA Experiment 108559 PARAMETER Experiment Name: Zm_5mM_NO_P Parameter: Treatment Value: 5mM NO vs. No Treatment
  misc_feature: MA Experiment ID: 20000478 Result: Down-regulated in Transcription
  misc_feature: MA Experiment 20000478 PARAMETER Experiment Name: Zm_5mM_SA_P Parameter: Age (day) Value: 11
  misc_feature: MA Experiment 20000478 PARAMETER Experiment Name: Zm_5mM_SA_P Parameter: Organism Value: Zea mays
  misc_feature: MA Experiment 20000478 PARAMETER Experiment Name: Zm_5mM_SA_P Parameter: Plant Line Value: 35A19
  misc_feature: MA Experiment 20000478 PARAMETER Experiment Name: Zm_5mM_SA_P Parameter: Timepoint (hr) Value: 72
  misc_feature: MA Experiment 20000478 PARAMETER Experiment Name: Zm_5mM_SA_P Parameter: Tissue Value: Aerial
  misc_feature: MA Experiment 20000478 PARAMETER Experiment Name: Zm_5mM_SA_P Parameter: Treatment Value: 5mM SA vs. No Treatment
  misc_feature: MA Experiment ID: 20000535 Result: Up-regulated in Transcription
  misc_feature: MA Experiment 20000535 PARAMETER Experiment Name: Zm_Hybrid_Seed_Dev_P Parameter: DAP Value: 30 vs. 12
  misc_feature: MA Experiment 20000535 PARAMETER Experiment Name: Zm_Hybrid_Seed_Dev_P Parameter: Organism Value: Zea mays
  misc_feature: MA Experiment 20000535 PARAMETER Experiment Name: Zm_Hybrid_Seed_Dev_P Parameter: Plant Line Value: 35A19
  misc_feature: MA Experiment 20000535 PARAMETER Experiment Name: Zm_Hybrid_Seed_Dev_P Parameter: Tissue Value: Embryo vs. Unfert Floret
  misc_feature: MA Experiment ID: 20000632 Result: Down-regulated in Transcription
  misc_feature: MA Experiment 20000632 PARAMETER Experiment Name: Zm_Herbicide-Treatments_P Parameter: Timepoint (hr) Value: 4
  misc_feature: MA Experiment 20000632 PARAMETER Experiment Name: Zm_Herbicide-Treatments_P Parameter: Tissue Value: Aerial
  misc_feature: MA Experiment 20000632 PARAMETER Experiment Name: Zm_Herbicide-Treatments_P Parameter: Treatment Value: Glean vs. No Treatment
gctcactcgcccctcctcttctcctcgctcgcagcaagccgggaacgtacgaacagcacgagcaggggggaggggaagaagaggaggagacctaccataccatagattcagagccagatacccaatcagtatcctgctgtaccattaccaccaggcacgcaccagcaggttaccaaaatctcgtgtggagggaaatggcgcccagcagctacgaggtggcggcttccatcctcctctgcgccgaggacagcagcagcatcctggacctcgaagcggaggccgaggaggaagcgctactggcgcggagcggggagccccgcggcggcgcggagttccccgtgccgtccgaggaatgcgtcgccggtttcctggagactgaggcggcgcacatgccgcgggaggactacgccgagaggctgcgcggcgcggggatggatctccgcgtccggacggacgccatcgactggatttggaaggttcacacgtgctacggtttcggccctctcactgcctgcttggccgtcaactacctggaccgcttcctctcgctctaccagcttccggaaggcaaggcttggatgacacagctgctgtccgtggcgtgcttgtccctggccgccaagatggaggagacctacgtcccttcgtccctggacctgcaggccggggacgcgcggtacgtgttcgaggcgaagacgatccagaggatggagctcctggtcctcagcacgctcaagtggaggatgcaagcggtcacccccttgtcgtacgtcgactacttcctccaccggctccgaggcggcgccgcgccgagcagacgcgccgtcctccgatccgcggagctcatcctgtgcatcgccagagggacgcactgcttggatttcaggccctcggagatcgccttggccgtcgccgccaccgtggccggcgaagagcgcgccgtggacatcgacagggccttcacccaccgtgtacataaggagagggtgtcgcgatgcctcgaagcgatccagcaggccaccgccaccatggccctgccgcagccgctgaaaagtgaaggcccgagcagcagcggccgcagggcctcgtcttcctcggccaccgtgccgcggagccccaccggggtgctggacgctggctgcctgagctacaggagagccgccgccgccgccgcctcgcacgcgagctccagctggcgcgacgaggacgacgacgactgccccccggctgtctgcagcaagaggaggaagattagcagatgattaaagccaatgatggacggatgaaaaagtcaagcggtttttgatcgcactgactg

SEQ ID NO: 5301 - protein, 419 aa, Zea mays subsp. mays
  peptide (1)..(419): Ceres Seq. ID no. 12365441
  misc_feature (117)..(249): Pfam Name: Cyclin, N-terminal domain Pfam Description: Cyclin, N-terminal domain
  misc_feature (73)..(415): Homolog of NCBI NO: 18916916 NR Description: cyclin [Oryza sativa (japonica cultivar-group)]
  misc_feature (65)..(418): Homolog of NCBI NO: 19070615 NR Description: D-type cyclin [Zea mays]
  misc_feature (65)..(231): Homolog of NCBI NO: 19070617 NR Description: D-type cyclin [Zea mays]
  misc_feature (66)..(384): Homolog of NCBI NO: 4160298 NR Description: cyclin D2.1 protein [Nicotiana tabacum]
  misc_feature (81)..(394): Homolog of NCBI NO: 19070611 NR Description: D-type cyclin [Zea mays]
  misc_feature (73)..(418): Homolog of NCBI NO: 34906810 NR Description: D-type cyclin-like protein [Oryza sativa
  misc_feature (111)..(419): Homolog of NCBI NO: 7484663 NR Description: cyclin D-like protein - red goosefoot
  misc_feature (77)..(419): Homolog of NCBI NO: 22091622 NR Description: cyclin D2 [Daucus carota]
  misc_feature (58)..(405): Homolog of NCBI NO: 1076312 NR Description: cyclin delta-2 - Arabidopsis thaliana
  misc_feature (105)..(416): Homolog of NCBI NO: 15227224 NR Description: Cyclin D2;1; protein id: At2g22490.1 [Arabidopsis
SLAPPLLLARSKPGTYEQHEQGGGEEEEETYHTIDSEPDTQSVSCCTITTRHAPAGYQNLVWREMAPSSYEVAASILLCAEDSSSILDLEAEAEEEALLARSGEPRGGAEFPVPSEECVAGFLETEAAHMPREDYAERLRGAGMDLRVRTDAIDWIWKVHTCYGFGPLTACLAVNYLDRFLSLYQLPEGKAWMTQLLSVACLSLAAKMEETYVPSSLDLQAGDARYVFEAKTIQRMELLVLSTLKWRMQAVTPLSYVDYFLHRLRGGAAPSRRAVLRSAELILCIARGTHCLDFRPSEIALAVAATVAGEERAVDIDRAFTHRVHKERVSRCLEAIQQATATMALPQPLKSEGPSSSGRRASSSSATVPRSPTGVLDAGCLSYRRAAAAAASHASSSWRDEDDDDCPPAVCSKRRKISR

SEQ ID NO: 5302 - protein, 355 aa, Zea mays subsp. mays
  peptide (1)..(355): Ceres Seq. ID no. 12365442
  misc_feature (53)..(185): Pfam Name: Cyclin, N-terminal domain Pfam Description: Cyclin, N-terminal domain
  misc_feature (9)..(351): Homolog of NCBI NO: 18916916 NR Description: cyclin [Oryza sativa (japonica cultivar-group)]
  misc_feature (1)..(354): Homolog of NCBI NO: 19070615 NR Description: D-type cyclin [Zea mays]
  misc_feature (1)..(167): Homolog of NCBI NO: 19070617 NR Description: D-type cyclin [Zea mays]
  misc_feature (2)..(320): Homolog of NCBI NO: 4160298 NR Description: cyclin D2.1 protein [Nicotiana tabacum]
  misc_feature (17)..(330): Homolog of NCBI NO: 19070611 NR Description: D-type cyclin [Zea mays]
  misc_feature (9)..(354): Homolog of NCBI NO: 34906810 NR Description: D-type cyclin-like protein [Oryza sativa
  misc_feature (47)..(355): Homolog of NCBI NO: 7484663 NR Description: cyclin D-like protein - red goosefoot
  misc_feature (13)..(355): Homolog of NCBI NO: 22091622 NR Description: cyclin D2 [Daucus carota]
  misc_feature (1)..(341): Homolog of NCBI NO: 1076312 NR Description: cyclin delta-2 - Arabidopsis thaliana
  misc_feature (41)..(352): Homolog of NCBI NO: 15227224 NR Description: Cyclin D2;1; protein id: At2g22490.1 [Arabidopsis
MAPSSYEVAASILLCAEDSSSILDLEAEAEEEALLARSGEPRGGAEFPVPSEECVAGFLETEAAHMPREDYAERLRGAGMDLRVRTDAIDWIWKVHTCYGFGPLTACLAVNYLDRFLSLYQLPEGKAWMTQLLSVACLSLAAKMEETYVPSSLDLQAGDARYVFEAKTIQRMELLVLSTLKWRMQAVTPLSYVDYFLHRLRGGAAPSRRAVLRSAELILCIARGTHCLDFRPSEIALAVAATVAGEERAVDIDRAFTHRVHKERVSRCLEAIQQATATMALPQPLKSEGPSSSGRRASSSSATVPRSPTGVLDAGCLSYRRAAAAAASHASSSWRDEDDDDCPPAVCSKRRKISR

SEQ ID NO: 5303 - protein, 290 aa, Zea mays subsp. mays
  peptide (1)..(290): Ceres Seq. ID no. 12365443
  misc_feature (1)..(120): Pfam Name: Cyclin, N-terminal domain Pfam Description: Cyclin, N-terminal domain
  misc_feature (1)..(286): Homolog of NCBI NO: 18916916 NR Description: cyclin [Oryza sativa (japonica cultivar-group)]
  misc_feature (1)..(289): Homolog of NCBI NO: 19070615 NR Description: D-type cyclin [Zea mays]
  misc_feature (1)..(102): Homolog of NCBI NO: 19070617 NR Description: D-type cyclin [Zea mays]
  misc_feature (1)..(255): Homolog of NCBI NO: 4160298 NR Description: cyclin D2.1 protein [Nicotiana tabacum]
  misc_feature (1)..(265): Homolog of NCBI NO: 19070611 NR Description: D-type cyclin [Zea mays]
  misc_feature (1)..(289): Homolog of NCBI NO: 34906810 NR Description: D-type cyclin-like protein [Oryza sativa
  misc_feature (1)..(290): Homolog of NCBI NO: 7484663 NR Description: cyclin D-like protein - red goosefoot
  misc_feature (1)..(290): Homolog of NCBI NO: 22091622 NR Description: cyclin D2 [Daucus carota]
  misc_feature (1)..(276): Homolog of NCBI NO: 1076312 NR Description: cyclin delta-2 - Arabidopsis thaliana
  misc_feature (1)..(287): Homolog of NCBI NO: 15227224 NR Description: Cyclin D2;1; protein id: At2g22490.1 [Arabidopsis
MPREDYAERLRGAGMDLRVRTDAIDWIWKVHTCYGFGPLTACLAVNYLDRFLSLYQLPEGKAWMTQLLSVACLSLAAKMEETYVPSSLDLQAGDARYVFEAKTIQRMELLVLSTLKWRMQAVTPLSYVDYFLHRLRGGAAPSRRAVLRSAELILCIARGTHCLDFRPSEIALAVAATVAGEERAVDIDRAFTHRVHKERVSRCLEAIQQATATMALPQPLKSEGPSSSGRRASSSSATVPRSPTGVLDAGCLSYRRAAAAAASHASSSWRDEDDDDCPPAVCSKRRKISR

SEQ ID NO: 5304 - DNA, 1855 bp, Zea mays subsp. mays
  misc_feature (1)..(1855): Ceres Seq. ID no. 12409594
  misc_feature: MA Experiment ID: 108523 Result: Up-regulated in Transcription
  misc_feature: MA Experiment 108523 PARAMETER Experiment Name: Zm_42deg_Heat_P Parameter: Age (day) Value: 8
  misc_feature: MA Experiment 108523 PARAMETER Experiment Name: Zm_42deg_Heat_P Parameter: Organism Value: Zea mays
  misc_feature: MA Experiment 108523 PARAMETER Experiment Name: Zm_42deg_Heat_P Parameter: Plant Line Value: 35A19
  misc_feature: MA Experiment 108523 PARAMETER Experiment Name: Zm_42deg_Heat_P Parameter: Temperature (deg C) Value: 42 vs. 22
  misc_feature: MA Experiment 108523 PARAMETER Experiment Name: Zm_42deg_Heat_P Parameter: Timepoint (hr) Value: 6
  misc_feature: MA Experiment 108523 PARAMETER Experiment Name: Zm_42deg_Heat_P Parameter: Tissue Value: Aerial
  misc_feature: MA Experiment ID: 108689 Result: Down-regulated in Transcription
  misc_feature: MA Experiment 108689 PARAMETER Experiment Name: Zm_Drought_Roots_P Parameter: Age (day) Value: 9
  misc_feature: MA Experiment 108689 PARAMETER Experiment Name: Zm_Drought_Roots_P Parameter: Organism Value: Zea mays
  misc_feature: MA Experiment 108689 PARAMETER Experiment Name: Zm_Drought_Roots_P Parameter: Plant Line Value: 35A19
  misc_feature: MA Experiment 108689 PARAMETER Experiment Name: Zm_Drought_Roots_P Parameter: Timepoint (hr) Value: 24
  misc_feature: MA Experiment 108689 PARAMETER Experiment Name: Zm_Drought_Roots_P Parameter: Tissue Value: Roots
  misc_feature: MA Experiment 108689 PARAMETER Experiment Name: Zm_Drought_Roots_P Parameter: Treatment Value: Drought vs. No Drought
agccccgccctgtgcctctcgcggtcgcggcacggacggcaccctcgggcctcaggtcccaccctcgcctccgcccgcgccccgggcggtaccctcaccgccgggtccacctcgcctccgcccgcacaaacagccgaccgcccccctggccgcgacccgcgcccagaccacacgagcgcagtgcacgcaggcagaggagggccgcgcgagctctgcgcggtggcctgtggtggggcgagggaagcgaggcgaggcggcccggcagccgcctcctgactcagtcggtgggagctggaggtgcgagctgacggtccgggtcaccgaccggcagcacggcggccacagcggaggcaaccggcgggggcggcgaccccggggccgcggcgaggcagcgctgggacctgccggccggaaacattgcaatggggaaagaagttgttgatatgtctactgatgaagaatcagattgcgtagttatgtgtccacctaacagaaatgctgatcatgaggaagctgtgagtggcagccatgatgaagattcttcaggaaggcaagagaacccttatgctgtgaactcacatatgaacacccgtggccaggaagatgtgtctgtaaacccagacctgctcaagctgattcatcagcaggagtcttctgtcagcaattcaccatcaaaacctgcaggagctagacagcaagggtctagccatactgtccctgagtcatgcactattgcacctgaaagaaggtcatctggagcaggaacttgtgctccaatttcttatcccaccagcagcggggaaaaactttcagatataagtagctcctcaccaagaagcatgacaaagagtccatcagtcacatgcaggaagcctctccaatctgacaatacttctcacagtcaagaagaggactcatattctgtcacttcttcaactgtaacttcagcgagagctggaaaaactaagaagacaacggttgctgttgcacctacatttgtctgtgataatcgtgctgagaagagaggagagttttacacaaaattagaagaaaagcgcaaggctttggaagaggagaaactccaagcagaggccagaaagcaggaagaggaagaagaagctctaagacaactgaggaagaacttggtcgtccgagcgaaacccgtgccgagcttctaccaagaacccccaccaaaggttgaacttaagaaggtgcctccaactcgtgccaagtcaccaaagctgacgcggaggaagagctgcagcganacccntnacacaccagagggaggaaacggcggcggcggcgcagtgtgctgccggctgcaccgccacagcatcgggaactccaaagacgtcggcagcaaggcacaatgctctccaaagactggaccagctgctaagtccagggcgcccccaaatccagggaagacccgagggcttccatgaagaaagcgggacagcagccaagcgccgccgctgtacaaacctgacccgtgaagcatccattgcaatgccgtttttcatcttaatccatataccctcacatcacccggaaagatggcctcatgccccggcagcagacagtgtgcctggtgctggattgttttcttttttggggcgttgcccttgtaagaacctggctgcctgccagagaccgtgcgctgtgtccgtatctgtaaatttgctgcaagttttgtatggggtgaccgagtcggtcctgtgtgagaaccaaacggccgggcatattgtcattgcgtgggggcagcattcgctgatactatgtaatgtgacctgagtgagctgttgtaacctgttgtgggcacatattggcaaagcgattctgattgctgttg

SEQ ID NO: 5305 - protein, 341 aa, Zea mays subsp. mays
  peptide (1)..(341): Ceres Seq. ID no. 12409595
  misc_feature (1)..(330): Homolog of NCBI NO: 34897180 NR Description: unknown protein [Oryza sativa (japonica
  misc_feature (141)..(341): Homolog of NCBI NO: 34393229 NR Description: putative seed specific protein [Oryza sativa
  misc_feature (55)..(341): Homolog of NCBI NO: 21553401 NR Description: unknown [Arabidopsis thaliana]
  misc_feature (55)..(341): Homolog of NCBI NO: 18404945 NR Description: expressed protein; protein id: At1g54460.1, by cDNA: 142094., supported by cDNA: gi_13605600, supported by gi_15777864 [Arabidopsis thaliana]
  misc_feature (6)..(296): Homolog of NCBI NO: 9294199 NR Description: gb|AAF04893.1~gene_id:MXC7.13~similar to unknown
  misc_feature (6)..(296): Homolog of NCBI NO: 15228950 NR Description: unknown protein; protein id: At3g23090.1 thaliana] >gi|27765054|gb|AAO23648.1| At3g23090 [Arabidopsis
  misc_feature (1)..(271): Homolog of NCBI NO: 34393229 NR Description: putative seed specific protein [Oryza sativa
  misc_feature (84)..(279): Homolog of NCBI NO: 32395575 NR Description: seed specific protein Bn15D14A [Brassica napus]
  misc_feature (139)..(281): Homolog of NCBI NO: 30679219 NR Description: expressed protein [Arabidopsis thaliana]
  misc_feature (143)..(281): Homolog of NCBI NO: 6175167 NR Description: unknown protein [Arabidopsis thaliana]
  misc_feature (282)..(282): Xaa is any aa, unknown or other
  misc_feature (284)..(284): Xaa is any aa, unknown or other
  misc_feature (285)..(285): Xaa is any aa, unknown or other
MGKEVVDMSTDEESDCVVMCPPNRNADHEEAVSGSHDEDSSGRQENPYAVNSHMNTRGQEDVSVNPDLLKLIHQQESSVSNSPSKPAGARQQGSSHTVPESCTIAPERRSSGAGTCAPISYPTSSGEKLSDISSSSPRSMTKSPSVTCRKPLQSDNTSHSQEEDSYSVTSSTVTSARAGKTKKTTVAVAPTFVCDNRAEKRGEFYTKLEEKRKALEEEKLQAEARKQEEEEEALRQLRKNLVVRAKPVPSFYQEPPPKVELKKVPPTRAKSPKLTRRKSCSXTXXTPEGGNGGGGAVCCRLHRHSIGNSKDVGSKAQCSPKTGPAAKSRAPPNPGKTRGLP

SEQ ID NO: 5306 - protein, 334 aa, Zea mays subsp. mays
  peptide (1)..(334): Ceres Seq. ID no. 12409596
  misc_feature (1)..(323): Homolog of NCBI NO: 34897180 NR Description: unknown protein [Oryza sativa (japonica
  misc_feature (134)..(334): Homolog of NCBI NO: 34393229 NR Description: putative seed specific protein [Oryza sativa
  misc_feature (48)..(334): Homolog of NCBI NO: 21553401 NR Description: unknown [Arabidopsis thaliana]
  misc_feature (48)..(334): Homolog of NCBI NO: 18404945 NR Description: expressed protein; protein id: At1g54460.1, by cDNA: 142094., supported by cDNA: gi_13605600, supported by gi_15777864 [Arabidopsis thaliana]
  misc_feature (1)..(289): Homolog of NCBI NO: 9294199 NR Description: gb|AAF04893.1~gene_id:MXC7.13~similar to unknown
  misc_feature (1)..(289): Homolog of NCBI NO: 15228950 NR Description: unknown protein; protein id: At3g23090.1 thaliana] >gi|27765054|gb|AAO23648.1| At3g23090 [Arabidopsis
  misc_feature (1)..(264): Homolog of NCBI NO: 34393229 NR Description: putative seed specific protein [Oryza sativa
  misc_feature (77)..(272): Homolog of NCBI NO: 32395575 NR Description: seed specific protein Bn15D14A [Brassica napus]
  misc_feature (132)..(274): Homolog of NCBI NO: 30679219 NR Description: expressed protein [Arabidopsis thaliana]
  misc_feature (136)..(274): Homolog of NCBI NO: 6175167 NR Description: unknown protein [Arabidopsis thaliana]
  misc_feature (275)..(275): Xaa is any aa, unknown or other
  misc_feature (277)..(277): Xaa is any aa, unknown or other
  misc_feature (278)..(278): Xaa is any aa, unknown or other
MSTDEESDCVVMCPPNRNADHEEAVSGSHDEDSSGRQENPYAVNSHMNTRGQEDVSVNPDLLKLIHQQESSVSNSPSKPAGARQQGSSHTVPESCTIAPERRSSGAGTCAPISYPTSSGEKLSDISSSSPRSMTKSPSVTCRKPLQSDNTSHSQEEDSYSVTSSTVTSARAGKTKKTTVAVAPTFVCDNRAEKRGEFYTKLEEKRKALEEEKLQAEARKQEEEEEALRQLRKNLVVRAKPVPSFYQEPPPKVELKKVPPTRAKSPKLTRRKSCSXTXXTPEGGNGGGGAVCCRLHRHSIGNSKDVGSKAQCSPKTGPAAKSRAPPNPGKTRGLP

SEQ ID NO: 5307 - protein, 323 aa, Zea mays subsp. mays
  peptide (1)..(323): Ceres Seq. ID no. 12409597
  misc_feature (1)..(312): Homolog of NCBI NO: 34897180 NR Description: unknown protein [Oryza sativa (japonica
  misc_feature (123)..(323): Homolog of NCBI NO: 34393229 NR Description: putative seed specific protein [Oryza sativa
  misc_feature (37)..(323): Homolog of NCBI NO: 21553401 NR Description: unknown [Arabidopsis thaliana]
  misc_feature (37)..(323): Homolog of NCBI NO: 18404945 NR Description: expressed protein; protein id: At1g54460.1, by cDNA: 142094., supported by cDNA: gi_13605600, supported by gi_15777864 [Arabidopsis thaliana]
  misc_feature (1)..(278): Homolog of NCBI NO: 9294199 NR Description: gb|AAF04893.1~gene_id:MXC7.13~similar to unknown
  misc_feature (1)..(278): Homolog of NCBI NO: 15228950 NR Description: unknown protein; protein id: At3g23090.1 thaliana] >gi|27765054|gb|AAO23648.1| At3g23090 [Arabidopsis
  misc_feature (1)..(253): Homolog of NCBI NO: 34393229 NR Description: putative seed specific protein [Oryza sativa
  misc_feature (66)..(261): Homolog of NCBI NO: 32395575 NR Description: seed specific protein Bn15D14A [Brassica napus]
  misc_feature (121)..(263): Homolog of NCBI NO: 30679219 NR Description: expressed protein [Arabidopsis thaliana]
  misc_feature (125)..(263): Homolog of NCBI NO: 6175167 NR Description: unknown protein [Arabidopsis thaliana]
  misc_feature (264)..(264): Xaa is any aa, unknown or other
  misc_feature (266)..(266): Xaa is any aa, unknown or other
  misc_feature (267)..(267): Xaa is any aa, unknown or other
MCPPNRNADHEEAVSGSHDEDSSGRQENPYAVNSHMNTRGQEDVSVNPDLLKLIHQQESSVSNSPSKPAGARQQGSSHTVPESCTIAPERRSSGAGTCAPISYPTSSGEKLSDISSSSPRSMTKSPSVTCRKPLQSDNTSHSQEEDSYSVTSSTVTSARAGKTKKTTVAVAPTFVCDNRAEKRGEFYTKLEEKRKALEEEKLQAEARKQEEEEEALRQLRKNLVVRAKPVPSFYQEPPPKVELKKVPPTRAKSPKLTRRKSCSXTXXTPEGGNGGGGAVCCRLHRHSIGNSKDVGSKAQCSPKTGPAAKSRAPPNPGKTRGLP

SEQ ID NO: 5308 - DNA, 1227 bp, Zea mays subsp. mays
  misc_feature (1)..(1227): Ceres Seq. ID no. 12414078
  misc_feature: MA Experiment ID: 108523 Result: Up-regulated in Transcription
  misc_feature: MA Experiment 108523 PARAMETER Experiment Name: Zm_42deg_Heat_P Parameter: Age (day) Value: 8
  misc_feature: MA Experiment 108523 PARAMETER Experiment Name: Zm_42deg_Heat_P Parameter: Organism Value: Zea mays
  misc_feature: MA Experiment 108523 PARAMETER Experiment Name: Zm_42deg_Heat_P Parameter: Plant Line Value: 35A19
  misc_feature: MA Experiment 108523 PARAMETER Experiment Name: Zm_42deg_Heat_P Parameter: Temperature (deg C) Value: 42 vs. 22
  misc_feature: MA Experiment 108523 PARAMETER Experiment Name: Zm_42deg_Heat_P Parameter: Timepoint (hr) Value: 6
  misc_feature: MA Experiment 108523 PARAMETER Experiment Name: Zm_42deg_Heat_P Parameter: Tissue Value: Aerial
  misc_feature: MA Experiment ID: 108535 Result: Up-regulated in Transcription
  misc_feature: MA Experiment 108535 PARAMETER Experiment Name: Zm_Meristem_P Parameter: Age (day) Value: 8
  misc_feature: MA Experiment 108535 PARAMETER Experiment Name: Zm_Meristem_P Parameter: Organism Value: Zea mays
  misc_feature: MA Experiment 108535 PARAMETER Experiment Name: Zm_Meristem_P Parameter: Plant Line Value: 35A19
  misc_feature: MA Experiment 108535 PARAMETER Experiment Name: Zm_Meristem_P Parameter: Tissue Value: Root Meristem vs. Above Root Meristem
  misc_feature: MA Experiment ID: 20000480 Result: Up-regulated in Transcription
  misc_feature: MA Experiment 20000480 PARAMETER Experiment Name: Zm_Drought_P Parameter: Age (day) Value: 11
  misc_feature: MA Experiment 20000480 PARAMETER Experiment Name: Zm_Drought_P Parameter: Organism Value: Zea mays
  misc_feature: MA Experiment 20000480 PARAMETER Experiment Name: Zm_Drought_P Parameter: Plant Line Value: 35A19
  misc_feature: MA Experiment 20000480 PARAMETER Experiment Name: Zm_Drought_P Parameter: Timepoint (hr) Value: 72
  misc_feature: MA Experiment 20000480 PARAMETER Experiment Name: Zm_Drought_P Parameter: Tissue Value: Aerial
  misc_feature: MA Experiment 20000480 PARAMETER Experiment Name: Zm_Drought_P Parameter: Treatment Value: Drought vs. No Drought
ctttccgcccaaaacacttcccagccctccacgcaccccgctgccgcggctcgaacataaaccctagagccgccggcccggtcgcgctagcgacacaaatctcaaatcacccggagagaactcgctcgcgaaggctgaactcatggctcgcgtcttcgttgggaacctggatccgcgtgtcacggcgcgggagattgaggacgagttccgcacgtttggggttctgaagagtgtatgggttgctaggaaaccaccagggtttgccttcattgacttcgatgaccgcagggatgcacaagatgccattcgcgatttggatggtaagaatggttggagggttgagctgtcaaccaaagatggtggtggccgtggccgagaccgtaatggttctgatatgaagtgctatgagtgtggtgaagttggccactttgcacgtgaatgtcgcttacggattggttcgggagggctgggtagtggaaggcgtcgcagccgaagtcctagatatcgcagccggagccgaagtcgcagccggagcccaagacatcgaaggagcccaagctatggcagaaggagctacagcccacgagatcgttctcctaggaggcgaagttacagcaggtcgccgccactgccaccaccgcctcctagaaataacagcatgtcaccacggggagcccgagaaatgagcagatcgtcaccaccacctcccaaaaataacagcagttcaccacgggaagcccgagaaatgagcagatcgccaccaccacctgccaaaaataaccgcagttcaccacgggaagcccgagaaatgagcagatcgccgccgccaccacctcccagaaataacagcaggtcaccaccgggagctcgagatgtgagcaggtcgccgccaccacctcctgatgccagaagaagctatagcagatccccagaacagcagccccagcacgagtccccatatgccaatgacgcctgagaatatttagctgctcaaagatgctggaaaatgctaaggggcccagcatgttttgcccatgcgcgtcggtacaacttataggatccagtctgagattttgctcgtgttttgggtttcccttggacacaccgctgctgataccattgtagagggaggagcataacgtttccgtttcgagttgactttgggcacttatagctgtcaagacatgacctggttcttgttagatttatatcactagattgcttttg

SEQ ID NO: 5309 - protein, 277 aa, Zea mays subsp. mays
  peptide (1)..(277): Ceres Seq. ID no. 12414079
  misc_feature (4)..(61): Pfam Name: RNA recognition motif. (a.k.a. RRM, RBD, or RNP domain) Pfam Description: RNA recognition motif. (a.k.a. RRM, RBD, or RNP
  misc_feature (1)..(196): Homolog of NCBI NO: 15224171 NR Description: putative RSZp22 splicing factor; protein id: [Arabidopsis thaliana] >gi|25294320|pir||E84638 probable RSZp22
  misc_feature (1)..(189): Homolog of NCBI NO: 15236000 NR Description: splicing factor SRZ_22; protein id: At4g31580.1, by cDNA: 25581., supported by cDNA: gi_17529203, supported by gi_3435093 [Arabidopsis thaliana] >gi|7439992|pir||T05112
  misc_feature (1)..(189): Homolog of NCBI NO: 25294318 NR Description: splicing factor RSZp22 [validated] - Arabidopsis
  misc_feature (1)..(179): Homolog of NCBI NO: 25294317 NR Description: protein T23E23.2 [imported] - Arabidopsis >gi|9369411|gb|AAF87159.1|AC002423_24 T23E23.2 [Arabidopsis
  misc_feature (1)..(179): Homolog of NCBI NO: 18395314 NR Description: splicing factor SRZ_21; protein id: At1g23860.1, by cDNA: gi_3435095 [Arabidopsis thaliana]
  misc_feature (1)..(179): Homolog of NCBI NO: 25294319 NR Description: splicing factor RSZp21 [imported] - Arabidopsis
  misc_feature (3)..(225): Homolog of NCBI NO: 3929380 NR Description: Splicing factor, arginine/serine-rich 7 (Splicing
  misc_feature (3)..(225): Homolog of NCBI NO: 30584739 NR Description: Homo sapiens splicing factor,
  misc_feature (3)..(227): Homolog of NCBI NO: 34862002 NR Description: similar to 9430065L19Rik protein [Rattus >gi|26350021|dbj|BAC38650.1| unnamed protein product [Mus
  misc_feature (3)..(227): Homolog of NCBI NO: 22122585 NR Description: RIKEN cDNA 9430065L19; hypothetical protein [Mus musculus] >gi|19343869|gb|AAH25529.1| Similar to splicing
MARVFVGNLDPRVTAREIEDEFRTFGVLKSVWVARKPPGFAFIDFDDRRDAQDAIRDLDGKNGWRVELSTKDGGGRGRDRNGSDMKCYECGEVGHFARECRLRIGSGGLGSGRRRSRSPRYRSRSRSRSRSPRHRRSPSYGRRSYSPRDRSPRRRSYSRSPPLPPPPPRNNSMSPRGAREMSRSSPPPPKNNSSSPREAREMSRSPPPPAKNNRSSPREAREMSRSPPPPPPRNNSRSPPGARDVSRSPPPPPDARRSYSRSPEQQPQHESPYANDA

SEQ ID NO: 5310 - protein, 193 aa, Zea mays subsp. mays
  peptide (1)..(193): Ceres Seq. ID no. 12414080
  misc_feature (35)..(188): Pfam Name: Formin Homology 2 Domain Pfam Description: Formin Homology 2 Domain
  misc_feature (1)..(143): Homolog of NCBI NO: 34862002 NR Description: similar to 9430065L19Rik protein [Rattus >gi|26350021|dbj|BAC38650.1| unnamed protein product [Mus
  misc_feature (1)..(112): Homolog of NCBI NO: 15224171 NR Description: putative RSZp22 splicing factor; protein id: [Arabidopsis thaliana] >gi|25294320|pir||E84638 probable RSZp22
  misc_feature (1)..(105): Homolog of NCBI NO: 25294318 NR Description: splicing factor RSZp22 [validated] - Arabidopsis
  misc_feature (1)..(95): Homolog of NCBI NO: 18395314 NR Description: splicing factor SRZ_21; protein id: At1g23860.1, by cDNA: gi_3435095 [Arabidopsis thaliana]
  misc_feature (1)..(141): Homolog of NCBI NO: 3929380 NR Description: Splicing factor, arginine/serine-rich 7 (Splicing
  misc_feature (1)..(141): Homolog of NCBI NO: 30584739 NR Description: Homo sapiens splicing factor,
  misc_feature (1)..(95): Homolog of NCBI NO: 25294319 NR Description: splicing factor RSZp21 [imported] - Arabidopsis
  misc_feature (1)..(95): Homolog of NCBI NO: 25294317 NR Description: protein T23E23.2 [imported] - Arabidopsis >gi|9369411|gb|AAF87159.1|AC002423_24 T23E23.2 [Arabidopsis
  misc_feature (1)..(105): Homolog of NCBI NO: 15236000 NR Description: splicing factor SRZ_22; protein id: At4g31580.1, by cDNA: 25581., supported by cDNA: gi_17529203, supported by gi_3435093 [Arabidopsis thaliana] >gi|7439992|pir||T05112
  misc_feature (1)..(143): Homolog of NCBI NO: 22122585 NR Description: RIKEN cDNA 9430065L19; hypothetical protein [Mus musculus] >gi|19343869|gb|AAH25529.1| Similar to splicing
MKCYECGEVGHFARECRLRIGSGGLGSGRRRSRSPRYRSRSRSRSRSPRHRRSPSYGRRSYSPRDRSPRRRSYSRSPPLPPPPPRNNSMSPRGAREMSRSSPPPPKNNSSSPREAREMSRSPPPPAKNNRSSPREAREMSRSPPPPPPRNNSRSPPGARDVSRSPPPPPDARRSYSRSPEQQPQHESPYANDA

SEQ ID NO: 5311 - DNA, 647 bp, Zea mays subsp. mays
  misc_feature (1)..(647): Ceres Seq. ID no. 12357877
  misc_feature: MA Experiment ID: 108535 Result: Up-regulated in Transcription
  misc_feature: MA Experiment 108535 PARAMETER Experiment Name: Zm_Meristem_P Parameter: Age (day) Value: 8
  misc_feature: MA Experiment 108535 PARAMETER Experiment Name: Zm_Meristem_P Parameter: Organism Value: Zea mays
  misc_feature: MA Experiment 108535 PARAMETER Experiment Name: Zm_Meristem_P Parameter: Plant Line Value: 35A19
  misc_feature: MA Experiment 108535 PARAMETER Experiment Name: Zm_Meristem_P Parameter: Tissue Value: Root Meristem vs. Above Root Meristem
  misc_feature: MA Experiment ID: 108544 Result: Down-regulated in Transcription
  misc_feature: MA Experiment ID: 20000478 Result: Down-regulated in Transcription
  misc_feature: MA Experiment 20000478 PARAMETER Experiment Name: Zm_5mM_SA_P Parameter: Age (day) Value: 11
  misc_feature: MA Experiment 20000478 PARAMETER Experiment Name: Zm_5mM_SA_P Parameter: Organism Value: Zea mays
  misc_feature: MA Experiment 20000478 PARAMETER Experiment Name: Zm_5mM_SA_P Parameter: Plant Line Value: 35A19
  misc_feature: MA Experiment 20000478 PARAMETER Experiment Name: Zm_5mM_SA_P Parameter: Timepoint (hr) Value: 72
  misc_feature: MA Experiment 20000478 PARAMETER Experiment Name: Zm_5mM_SA_P Parameter: Tissue Value: Aerial
  misc_feature: MA Experiment 20000478 PARAMETER Experiment Name: Zm_5mM_SA_P Parameter: Treatment Value: 5mM SA vs. No Treatment
  misc_feature: MA Experiment ID: 20000488 Result: Up-regulated in Transcription
  misc_feature: MA Experiment 20000488 PARAMETER Experiment Name: Zm_50mM_NH4NO3_L_to_H_P Parameter: Organism Value: Zea mays
  misc_feature: MA Experiment 20000488 PARAMETER Experiment Name: Zm_50mM_NH4NO3_L_to_H_P Parameter: Timepoint (hr) Value: 8
  misc_feature: MA Experiment 20000488 PARAMETER Experiment Name: Zm_50mM_NH4NO3_L_to_H_P Parameter: Tissue Value: Leaves
  misc_feature: MA Experiment 20000488 PARAMETER Experiment Name: Zm_50mM_NH4NO3_L_to_H_P Parameter: Treatment Value: 50mM NH4NO3 vs. 100mM Mannitol
  misc_feature: MA Experiment ID: 20000492 Result: Up-regulated in Transcription
  misc_feature: MA Experiment 20000492 PARAMETER Experiment Name: Zm_Hybrid_Seed_Dev_P Parameter: DAP Value: 12
  misc_feature: MA Experiment 20000492 PARAMETER Experiment Name: Zm_Hybrid_Seed_Dev_P Parameter: Organism Value: Zea mays
  misc_feature: MA Experiment 20000492 PARAMETER Experiment Name: Zm_Hybrid_Seed_Dev_P Parameter: Plant Line Value: 35A19
  misc_feature: MA Experiment 20000492 PARAMETER Experiment Name: Zm_Hybrid_Seed_Dev_P Parameter: Tissue Value: Fert Kernel vs. Unfert Floret
  misc_feature: MA Experiment ID: 20000535 Result: Up-regulated in Transcription
  misc_feature: MA Experiment 20000535 PARAMETER Experiment Name: Zm_Hybrid_Seed_Dev_P Parameter: DAP Value: 30 vs. 12
  misc_feature: MA Experiment 20000535 PARAMETER Experiment Name: Zm_Hybrid_Seed_Dev_P Parameter: Organism Value: Zea mays
  misc_feature: MA Experiment 20000535 PARAMETER Experiment Name: Zm_Hybrid_Seed_Dev_P Parameter: Plant Line Value: 35A19
  misc_feature: MA Experiment 20000535 PARAMETER Experiment Name: Zm_Hybrid_Seed_Dev_P Parameter: Tissue Value: Embryo vs. Unfert Floret
ctagccgcctgcctctcctcctccagagctcgtcgccaccggccaccgccaccctcgatcacgccgtccgtcgaggtaaggtcagcatggtgagggtcagtgtgctcaacgatgcgctcaagtccatgtacaacgctgagaagattggcaagaggcaggtcatgatcaggccgtcatccaaggtcatcatcaagttcctgacggtcatgcagcgccatggctacattggagagttcgagtacgttgatgaccaccgatcgggcaagattgtggtcgaactcaacgggaggctgaacaagtgcggcgtcatcagccctcgctttgatattggcgtgaaagacatcgagggatggactgcaaggctgctcccgtccaggcagttcggatacatcgtcctcacgacttcggcaggcatcatggaccacgaggaggcccgccggaagagcgtcggaggcaaggttctaggtttcttctattgaagaagctgagaatctttgttatggcctgcctgcctgtcttactctctcagactagagtacctgttattttactttaatatgtctctctcagactagagagccttcttttacttgaatattggttactgcattggtctttcactttaaaatcggtgactgcattgatcg

SEQ ID NO: 5312 - protein, 158 aa, Zea mays subsp. mays
  peptide (1)..(158): Ceres Seq. ID no. 12357878
  misc_feature (33)..(158): Pfam Name: Ribosomal protein S8 Pfam Description: Ribosomal protein S8
  misc_feature (29)..(158): Homolog of NCBI NO: 15223001 NR Description: ribosomal protein S15; protein id: At1g07770.1, by cDNA: 5724., supported by cDNA: gi_12083301, supported by gi_13430743, supported by cDNA: gi_14423369, supported by cDNA:
  misc_feature (29)..(158): Homolog of NCBI NO: 133793 NR Description: 40S RIBOSOMAL PROTEIN S15A (PPCB8)
  misc_feature (29)..(158): Homolog of NCBI NO: 6683481 NR Description: wrp15a [Citrullus lanatus]
  misc_feature (29)..(158): Homolog of NCBI NO: 15231316 NR Description: cytoplasmic ribosomal protein S15a -like; protein At3g46040.1, supported by cDNA: gi_15027960, supported by cDNA: [Arabidopsis thaliana] >gi|11276560|pir||T49245 cytoplasmic
  misc_feature (29)..(158): Homolog of NCBI NO: 13560779 NR Description: cytoplasmic ribosomal protein S15a [Daucus carota]
  misc_feature (29)..(158): Homolog of NCBI NO: 28411802 NR Description: ribosomal protein S15 [Oryza sativa (japonica
  misc_feature (29)..(158): Homolog of NCBI NO: 2130985 NR Description: r-protein BnS15a [Brassica napus]
  misc_feature (29)..(158): Homolog of NCBI NO: 15225502 NR Description: 40S ribosomal protein S15A; protein id: [Arabidopsis thaliana] >gi|7440262|pir||T00569 ribosomal protein
  misc_feature (29)..(158): Homolog of NCBI NO: 6322271 NR Description: Homology to rat S15a; Rps22ap [Saccharomyces >gi|133884|sp|P04648|RS22_YEAST 40S RIBOSOMAL PROTEIN S22 (S24)
  misc_feature (29)..(158): Homolog of NCBI NO: 14326103 NR Description: ribosomal protein S22 [Candida albicans]
SRLPLLLQSSSPPATATLDHAVRRGKVSMVRVSVLNDALKSMYNAEKIGKRQVMIRPSSKVIIKFLTVMQRHGYIGEFEYVDDHRSGKIVVELNGRLNKCGVISPRFDIGVKDIEGWTARLLPSRQFGYIVLTTSAGIMDHEEARRKSVGGKVLGFFY

SEQ ID NO: 5313 - protein, 130 aa, Zea mays subsp. mays; identical to SEQ ID NO: 3127
  peptide (1)..(130): Ceres Seq. ID no. 12357879
  misc_feature (5)..(130): Pfam Name: Ribosomal protein S8 Pfam Description: Ribosomal protein S8
  misc_feature (1)..(130): Homolog of NCBI NO: 15223001 NR Description: ribosomal protein S15; protein id: At1g07770.1, by cDNA: 5724., supported by cDNA: gi_12083301, supported by gi_13430743, supported by cDNA: gi_14423369, supported by cDNA:
  misc_feature (1)..(130): Homolog of NCBI NO: 133793 NR Description: 40S RIBOSOMAL PROTEIN S15A (PPCB8)
  misc_feature (1)..(130): Homolog of NCBI NO: 6683481 NR Description: wrp15a [Citrullus lanatus]
  misc_feature (1)..(130): Homolog of NCBI NO: 15231316 NR Description: cytoplasmic ribosomal protein S15a -like; protein At3g46040.1, supported by cDNA: gi_15027960, supported by cDNA: [Arabidopsis thaliana] >gi|11276560|pir||T49245 cytoplasmic
  misc_feature (1)..(130): Homolog of NCBI NO: 13560779 NR Description: cytoplasmic ribosomal protein S15a [Daucus carota]
  misc_feature (1)..(130): Homolog of NCBI NO: 28411802 NR Description: ribosomal protein S15 [Oryza sativa (japonica
  misc_feature (1)..(130): Homolog of NCBI NO: 2130985 NR Description: r-protein BnS15a [Brassica napus]
  misc_feature (1)..(130): Homolog of NCBI NO: 15225502 NR Description: 40S ribosomal protein S15A; protein id: [Arabidopsis thaliana] >gi|7440262|pir||T00569 ribosomal protein
  misc_feature (1)..(130): Homolog of NCBI NO: 6322271 NR Description: Homology to rat S15a; Rps22ap [Saccharomyces >gi|133884|sp|P04648|RS22_YEAST 40S RIBOSOMAL PROTEIN S22 (S24)
  misc_feature (1)..(130): Homolog of NCBI NO: 14326103 NR Description: ribosomal protein S22 [Candida albicans]

SEQ ID NO: 5314 - protein, 117 aa, Zea mays subsp. mays; identical to SEQ ID NO: 3129
  peptide (1)..(117): Ceres Seq. ID no. 12357880
  misc_feature (1)..(117): Pfam Name: Ribosomal protein S8 Pfam Description: Ribosomal protein S8
  misc_feature (1)..(117): Homolog of NCBI NO: 15223001 NR Description: ribosomal protein S15; protein id: At1g07770.1, by cDNA: 5724., supported by cDNA: gi_12083301, supported by gi_13430743, supported by cDNA: gi_14423369, supported by cDNA:
  misc_feature (1)..(117): Homolog of NCBI NO: 133793 NR Description: 40S RIBOSOMAL PROTEIN S15A (PPCB8)
  misc_feature (1)..(117): Homolog of NCBI NO: 6683481 NR Description: wrp15a [Citrullus lanatus]
  misc_feature (1)..(117): Homolog of NCBI NO: 15231316 NR Description: cytoplasmic ribosomal protein S15a -like; protein At3g46040.1, supported by cDNA: gi_15027960, supported by cDNA: [Arabidopsis thaliana] >gi|11276560|pir||T49245 cytoplasmic
  misc_feature (1)..(117): Homolog of NCBI NO: 13560779 NR Description: cytoplasmic ribosomal protein S15a [Daucus carota]
  misc_feature (1)..(117): Homolog of NCBI NO: 28411802 NR Description: ribosomal protein S15 [Oryza sativa (japonica
  misc_feature (1)..(117): Homolog of NCBI NO: 2130985 NR Description: r-protein BnS15a [Brassica napus]
  misc_feature (1)..(117): Homolog of NCBI NO: 15225502 NR Description: 40S ribosomal protein S15A; protein id: [Arabidopsis thaliana] >gi|7440262|pir||T00569 ribosomal protein
  misc_feature (1)..(117): Homolog of NCBI NO: 6322271 NR Description: Homology to rat S15a; Rps22ap [Saccharomyces >gi|133884|sp|P04648|RS22_YEAST 40S RIBOSOMAL PROTEIN S22 (S24)
  misc_feature (1)..(117): Homolog of NCBI NO: 14326103 NR Description: ribosomal protein S22 [Candida albicans]

SEQ ID NO: 5315 - DNA, 1531 bp, Zea mays subsp. mays
  misc_feature (1)..(1531): Ceres Seq. ID no. 12435048
  misc_feature: MA Experiment ID: 108529 Result: Up-regulated in Transcription
  misc_feature: MA Experiment 108529 PARAMETER Experiment Name: Zm_Imbibed_Seeds_P Parameter: Age (day) Value: 5 vs. 2
  misc_feature: MA Experiment 108529 PARAMETER Experiment Name: Zm_Imbibed_Seeds_P Parameter: Organism Value: Zea mays
  misc_feature: MA Experiment 108529 PARAMETER Experiment Name: Zm_Imbibed_Seeds_P Parameter: Plant Line Value: 35A19
  misc_feature: MA Experiment 108529 PARAMETER Experiment Name: Zm_Imbibed_Seeds_P Parameter: Tissue Value: Roots vs. Embryo
  misc_feature: MA Experiment ID: 108535 Result: Down-regulated in Transcription
  misc_feature: MA Experiment 108535 PARAMETER Experiment Name: Zm_Meristem_P Parameter: Age (day) Value: 8
  misc_feature: MA Experiment 108535 PARAMETER Experiment Name: Zm_Meristem_P Parameter: Organism Value: Zea mays
  misc_feature: MA Experiment 108535 PARAMETER Experiment Name: Zm_Meristem_P Parameter: Plant Line Value: 35A19
  misc_feature: MA Experiment 108535 PARAMETER Experiment Name: Zm_Meristem_P Parameter: Tissue Value: Root Meristem vs. Above Root Meristem
  misc_feature: MA Experiment ID: 108543 Result: Up-regulated in Transcription
  misc_feature: MA Experiment ID: 108546 Result: Up-regulated in Transcription
  misc_feature: MA Experiment 108546 PARAMETER Experiment Name: Zm_Imbibed_Seeds_P Parameter: Age (day) Value: 3 vs. 2
  misc_feature: MA Experiment 108546 PARAMETER Experiment Name: Zm_Imbibed_Seeds_P Parameter: Organism Value: Zea mays
  misc_feature: MA Experiment 108546 PARAMETER Experiment Name: Zm_Imbibed_Seeds_P Parameter: Plant Line Value: 35A19
  misc_feature: MA Experiment 108546 PARAMETER Experiment Name: Zm_Imbibed_Seeds_P Parameter: Tissue Value: Roots vs. Embryo
  misc_feature: MA Experiment ID: 20000108 Result: Down-regulated in Transcription
  misc_feature: MA Experiment 20000108 PARAMETER Experiment Name: Zm_Root-Tips_P Parameter: Age (day) Value: 12
  misc_feature: MA Experiment 20000108 PARAMETER Experiment Name: Zm_Root-Tips_P Parameter: Organism Value: Zea mays
  misc_feature: MA Experiment 20000108 PARAMETER Experiment Name: Zm_Root-Tips_P Parameter: Tissue Value: Root tips vs. Root mid region    35
  misc_feature: MA Experiment 20000108 PARAMETER Experiment Name: Zm_Root-Tips_P Parameter: Tissue Value: Root tips vs. Root mid region   Sequence Listing-Misc Features (4)
  misc_feature: MA Experiment ID: 20000477 Result: Down-regulated in Transcription
  misc_feature: MA Experiment 20000477 PARAMETER Experiment Name: Zm_5mM_SA_P Parameter: Age (day) Value: 10
  misc_feature: MA Experiment 20000477 PARAMETER Experiment Name: Zm_5mM_SA_P Parameter: Organism Value: Zea mays
  misc_feature: MA Experiment 20000477 PARAMETER Experiment Name: Zm_5mM_SA_P Parameter: Plant Line Value: 35A19
  misc_feature: MA Experiment 20000477 PARAMETER Experiment Name: Zm_5mM_SA_P Parameter: Timepoint (hr) Value: 48
  misc_feature: MA Experiment 20000477 PARAMETER Experiment Name: Zm_5mM_SA_P Parameter: Tissue Value: Aerial
  misc_feature: MA Experiment 20000477 PARAMETER Experiment Name: Zm_5mM_SA_P Parameter: Treatment Value: 5mM SA vs. No Treatment
  misc_feature: MA Experiment ID: 20000478 Result: Down-regulated in Transcription
  misc_feature: MA Experiment 20000478 PARAMETER Experiment Name: Zm_5mM_SA_P Parameter: Age (day) Value: 11
  misc_feature: MA Experiment 20000478 PARAMETER Experiment Name: Zm_5mM_SA_P Parameter: Organism Value: Zea mays
  misc_feature: MA Experiment 20000478 PARAMETER Experiment Name: Zm_5mM_SA_P Parameter: Plant Line Value: 35A19
  misc_feature: MA Experiment 20000478 PARAMETER Experiment Name: Zm_5mM_SA_P Parameter: Timepoint (hr) Value: 72
  misc_feature: MA Experiment 20000478 PARAMETER Experiment Name: Zm_5mM_SA_P Parameter: Tissue Value: Aerial
  misc_feature: MA Experiment 20000478 PARAMETER Experiment Name: Zm_5mM_SA_P Parameter: Treatment Value: 5mM SA vs. No Treatment
  misc_feature: MA Experiment ID: 20000479 Result: Down-regulated in Transcription
  misc_feature: MA Experiment 20000479 PARAMETER Experiment Name: Zm_Drought_P Parameter: Age (day) Value: 10
  misc_feature: MA Experiment 20000479 PARAMETER Experiment Name: Zm_Drought_P Parameter: Organism Value: Zea mays
  misc_feature: MA Experiment 20000479 PARAMETER Experiment Name: Zm_Drought_P Parameter: Plant Line Value: 35A19
  misc_feature: MA Experiment 20000479 PARAMETER Experiment Name: Zm_Drought_P Parameter: Timepoint (hr) Value: 48
  misc_feature: MA Experiment 20000479 PARAMETER Experiment Name: Zm_Drought_P Parameter: Tissue Value: Aerial
  misc_feature: MA Experiment 20000479 PARAMETER Experiment Name: Zm_Drought_P Parameter: Treatment Value: Drought vs. No Drought
  misc_feature: MA Experiment ID: 20000480 Result: Down-regulated in Transcription
  misc_feature: MA Experiment 20000480 PARAMETER Experiment Name: Zm_Drought_P Parameter: Age (day) Value: 11
  misc_feature: MA Experiment 20000480 PARAMETER Experiment Name: Zm_Drought_P Parameter: Organism Value: Zea mays
  misc_feature: MA Experiment 20000480 PARAMETER Experiment Name: Zm_Drought_P Parameter: Plant Line Value: 35A19
  misc_feature: MA Experiment 20000480 PARAMETER Experiment Name: Zm_Drought_P Parameter: Timepoint (hr) Value: 72
  misc_feature: MA Experiment 20000480 PARAMETER Experiment Name: Zm_Drought_P Parameter: Tissue Value: Aerial
  misc_feature: MA Experiment 20000480 PARAMETER Experiment Name: Zm_Drought_P Parameter: Treatment Value: Drought vs. No Drought
  misc_feature: MA Experiment ID: 20000492 Result: Down-regulated in Transcription
  misc_feature: MA Experiment 20000492 PARAMETER Experiment Name: Zm_Hybrid_Seed_Dev_P Parameter: DAP Value: 12
  misc_feature: MA Experiment 20000492 PARAMETER Experiment Name: Zm_Hybrid_Seed_Dev_P Parameter: Organism Value: Zea mays
  misc_feature: MA Experiment 20000492 PARAMETER Experiment Name: Zm_Hybrid_Seed_Dev_P Parameter: Plant Line Value: 35A19
  misc_feature: MA Experiment 20000492 PARAMETER Experiment Name: Zm_Hybrid_Seed_Dev_P Parameter: Tissue Value: Fert Kernel vs. Unfert Floret
  misc_feature: MA Experiment ID: 20000535 Result: Down-regulated in Transcription
  misc_feature: MA Experiment 20000535 PARAMETER Experiment Name: Zm_Hybrid_Seed_Dev_P Parameter: DAP Value: 30 vs. 12
  misc_feature: MA Experiment 20000535 PARAMETER Experiment Name: Zm_Hybrid_Seed_Dev_P Parameter: Organism Value: Zea mays
  misc_feature: MA Experiment 20000535 PARAMETER Experiment Name: Zm_Hybrid_Seed_Dev_P Parameter: Plant Line Value: 35A19
  misc_feature: MA Experiment 20000535 PARAMETER Experiment Name: Zm_Hybrid_Seed_Dev_P Parameter: Tissue Value: Embryo vs. Unfert Floret
gcacgagaccattacctagaacatcctaatcgaaaaaagtcgcatcgcacgccatcagcagctagcgcgctcctcgagcccagcagagaaaggccggcagcgctaatcgtaatagccatgggctccaccgccgccgacgtggccgcggtggtggacgaggaggcgtgcatgtacgcgatgcagctggcgtcgtcgtccatcctgccctgaagaacgccatcgagctgggcctgctggaggtgctgcagaaggaggccggcggcggcaaggcggcgctggcgccgaggaggtggtggcgcggatgcccgcggcgcccagcgaccccgccgccgccgcgncattggtggaccgcatgctccgcctgctcgcctcctacgacgtcgtccggtgccagatggaggaccgggacggccggtacgagcgccgctactccgccgcgcccgtctgcaagtggctcacccccaacgaggacggcgtgtccatggccgccctcgcgctcatgaaccaggacaaggtcctcatggagagctggtactatctcaaggacgcggtgctggacggcggcatcccgttcaacaaggcgtacgggatgacggcgttcgagtaccacggcacggacgcgcgcttcaaccgcgtgttcaacgagggcatgaagaaccactcggtgatcatcaccaagaagctgctggacttctacacgggcttcgagggcgtgtcgacgctggtggacgtgggcggcggcgtgggcgccacgctgcacgccatcacgtcccgccacccgcacatctccggggtcaacttcgacctgccgcacgtcatctccgaggcgccgccgttccccggcgtgcgccacgtgggcggggacatgttcgcgtccgtgcccgccggcgacgccatcctcatgaagtggatcctccacgactggagcgacgcgcactgcgccacgctgctcaagaactgctacgacgcgctgccggaaaatggcaaggtcatcgtcgtcgagtgcgtgctgccggtcaacacggaggccacccccaaggcgcagggcgtgttccacgtcgacatgatcatgctcgcgcacaaccccggcggcaaggagcggtacgagcgcgagttccgcgagctcgccaagggcgccggcttctccgggttcaaggccacctacatctacgccaacgcctgggccatcgagttcatcaagtgaatacggctaccaccgtcgccgcgatgagatgcatggctgccacatgcatgcttgcttgcttggtcctcgtatcgtacgtcgccgtcgtcgtcttcttctggttgcgctgctaccttgctgctctcgccctcgcgtatgcatgtacttttgcttaattttctttcttcatatcatgcactctggctggcctagactgcccccgatccatggtggccatgtcttcggtacgtcttgtcgagctcttgcatgtcgtggattctaaattcttcttctgcgtcgaattgtctctgccatgtgcgagtaataacaatcaaggttatacttacc

SEQ ID NO: 5316 - protein, 300 aa, Zea mays subsp. mays
  peptide (1)..(300): Ceres Seq. ID no. 12435049
  misc_feature (36)..(277): Pfam Name: O-methyltransferase Pfam Description: O-methyltransferase
  misc_feature (1)..(300): Homolog of NCBI NO: 729135 NR Description: Caffeic acid 3-O-methyltransferase (S-adenosysl-L-
  misc_feature (1)..(300): Homolog of NCBI NO: 29839259 NR Description: Caffeic acid 3-O-methyltransferase (S-adenosysl-L-
  misc_feature (1)..(300): Homolog of NCBI NO: 28569609 NR Description: caffeic acid O-methyltransferase [Sorghum bicolor]
  misc_feature (1)..(300): Homolog of NCBI NO: 18033964 NR Description: O-methyltransferase [Sorghum bicolor]
  misc_feature (1)..(300): Homolog of NCBI NO: 30385246 NR Description: caffeic acid O-methyltransferase [Triticum
  misc_feature (1)..(300): Homolog of NCBI NO: 14578615 NR Description: caffeic acid O-methyltransferase [Festuca
  misc_feature (1)..(300): Homolog of NCBI NO: 14578617 NR Description: caffeic acid O-methyltransferase [Festuca
  misc_feature (1)..(300): Homolog of NCBI NO: 14578613 NR Description: caffeic acid O-methyltransferase [Festuca
  misc_feature (1)..(300): Homolog of NCBI NO: 4104224 NR Description: caffeic acid O-methyltransferase; LPOMT3 [Lolium
  misc_feature (1)..(300): Homolog of NCBI NO: 14578611 NR Description: caffeic acid O-methyltransferase [Festuca
  misc_feature (13)..(13): Xaa is any aa, unknown or other
MPAAPSDPAAAAXLVDRMLRLLASYDVVRCQMEDRDGRYERRYSAAPVCKWLTPNEDGVSMAALALMNQDKVLMESWYYLKDAVLDGGIPFNKAYGMTAFEYHGTDARFNRVFNEGMKNHSVIITKKLLDFYTGFEGVSTLVDVGGGVGATLHAITSRHPHISGVNFDLPHVISEAPPFPGVRHVGGDMFASVPAGDAILMKWILHDWSDAHCATLLKNCYDALPENGKVIVVECVLPVNTEATPKAQGVFHVDMIMLAHNPGGKERYEREFRELAKGAGFSGFKATYIYANAWAIEFIK

SEQ ID NO: 5317 - protein, 283 aa, Zea mays subsp. mays
  peptide (1)..(283): Ceres Seq. ID no. 12435050
  misc_feature (19)..(260): Pfam Name: O-methyltransferase Pfam Description: O-methyltransferase
  misc_feature (1)..(283): Homolog of NCBI NO: 729135 NR Description: Caffeic acid 3-O-methyltransferase (S-adenosysl-L-
  misc_feature (1)..(283): Homolog of NCBI NO: 29839259 NR Description: Caffeic acid 3-O-methyltransferase (S-adenosysl-L-
  misc_feature (1)..(283): Homolog of NCBI NO: 28569609 NR Description: caffeic acid O-methyltransferase [Sorghum bicolor]
  misc_feature (1)..(283): Homolog of NCBI NO: 18033964 NR Description: O-methyltransferase [Sorghum bicolor]
  misc_feature (1)..(283): Homolog of NCBI NO: 30385246 NR Description: caffeic acid O-methyltransferase [Triticum
  misc_feature (1)..(283): Homolog of NCBI NO: 14578615 NR Description: caffeic acid O-methyltransferase [Festuca
  misc_feature (1)..(283): Homolog of NCBI NO: 14578617 NR Description: caffeic acid O-methyltransferase [Festuca
  misc_feature (1)..(283): Homolog of NCBI NO: 14578613 NR Description: caffeic acid O-methyltransferase [Festuca
  misc_feature (1)..(283): Homolog of NCBI NO: 4104224 NR Description: caffeic acid O-methyltransferase; LPOMT3 [Lolium
  misc_feature (1)..(283): Homolog of NCBI NO: 14578611 NR Description: caffeic acid O-methyltransferase [Festuca
MLRLLASYDVVRCQMEDRDGRYERRYSAAPVCKWLTPNEDGVSMAALALMNQDKVLMESWYYLKDAVLDGGIPFNKAYGMTAFEYHGTDARFNRVFNEGMKNHSVIITKKLLDFYTGFEGVSTLVDVGGGVGATLHAITSRHPHISGVNFDLPHVISEAPPFPGVRHVGGDMFASVPAGDAILMKWILHDWSDAHCATLLKNCYDALPENGKVIVVECVLPVNTEATPKAQGVFHVDMIMLAHNPGGKERYEREFRELAKGAGFSGFKATYIYANAWAIEFIK

SEQ ID NO: 5318 - protein, 269 aa, Zea mays subsp. mays
  peptide (1)..(269): Ceres Seq. ID no. 12435051
  misc_feature (5)..(246): Pfam Name: O-methyltransferase Pfam Description: O-methyltransferase
  misc_feature (1)..(269): Homolog of NCBI NO: 729135 NR Description: Caffeic acid 3-O-methyltransferase (S-adenosysl-L-
  misc_feature (1)..(269): Homolog of NCBI NO: 29839259 NR Description: Caffeic acid 3-O-methyltransferase (S-adenosysl-L-
  misc_feature (1)..(269): Homolog of NCBI NO: 28569609 NR Description: caffeic acid O-methyltransferase [Sorghum bicolor]
  misc_feature (1)..(269): Homolog of NCBI NO: 18033964 NR Description: O-methyltransferase [Sorghum bicolor]
  misc_feature (1)..(269): Homolog of NCBI NO: 30385246 NR Description: caffeic acid O-methyltransferase [Triticum
  misc_feature (1)..(269): Homolog of NCBI NO: 14578615 NR Description: caffeic acid O-methyltransferase [Festuca
  misc_feature (1)..(269): Homolog of NCBI NO: 14578617 NR Description: caffeic acid O-methyltransferase [Festuca
  misc_feature (1)..(269): Homolog of NCBI NO: 14578613 NR Description: caffeic acid O-methyltransferase [Festuca
  misc_feature (1)..(269): Homolog of NCBI NO: 4104224 NR Description: caffeic acid O-methyltransferase; LPOMT3 [Lolium
  misc_feature (1)..(269): Homolog of NCBI NO: 14578611 NR Description: caffeic acid O-methyltransferase [Festuca
MEDRDGRYERRYSAAPVCKWLTPNEDGVSMAALALMNQDKVLMESWYYLKDAVLDGGIPFNKAYGMTAFEYHGTDARFNRVFNEGMKNHSVIITKKLLDFYTGFEGVSTLVDVGGGVGATLHAITSRHPHISGVNFDLPHVISEAPPFPGVRHVGGDMFASVPAGDAILMKWILHDWSDAHCATLLKNCYDALPENGKVIVVECVLPVNTEATPKAQGVFHVDMIMLAHNPGGKERYEREFRELAKGAGFSGFKATYIYANAWAIEFIK

SEQ ID NO: 5319 - DNA, 1131 bp, Zea mays subsp. mays
  misc_feature (1)..(1131): Ceres Seq. ID no. 12409590
  misc_feature: MA Experiment ID: 108504 Result: Down-regulated in Transcription
  misc_feature: MA Experiment 108504 PARAMETER Experiment Name: Zm_Drought_P Parameter: Age (day) Value: 8
  misc_feature: MA Experiment 108504 PARAMETER Experiment Name: Zm_Drought_P Parameter: Organism Value: Zea mays
  misc_feature: MA Experiment 108504 PARAMETER Experiment Name: Zm_Drought_P Parameter: Plant Line Value: 35A19
  misc_feature: MA Experiment 108504 PARAMETER Experiment Name: Zm_Drought_P Parameter: Timepoint (hr) Value: 12
  misc_feature: MA Experiment 108504 PARAMETER Experiment Name: Zm_Drought_P Parameter: Tissue Value: Aerial
  misc_feature: MA Experiment 108504 PARAMETER Experiment Name: Zm_Drought_P Parameter: Treatment Value: Drought vs. No Drought
  misc_feature: MA Experiment ID: 108536 Result: Down-regulated in Transcription
  misc_feature: MA Experiment 108536 PARAMETER Experiment Name: Zm_Meristem_P Parameter: Age (day) Value: 8
  misc_feature: MA Experiment 108536 PARAMETER Experiment Name: Zm_Meristem_P Parameter: Organism Value: Zea mays
  misc_feature: MA Experiment 108536 PARAMETER Experiment Name: Zm_Meristem_P Parameter: Plant Line Value: 35A19
  misc_feature: MA Experiment 108536 PARAMETER Experiment Name: Zm_Meristem_P Parameter: Tissue Value: Shoot Meristem vs. Above Shoot Meristem
  misc_feature: MA Experiment ID: 108540 Result: Down-regulated in Transcription
  misc_feature: MA Experiment 108540 PARAMETER Experiment Name: Zm_20percent_PEG_P Parameter: Age (day) Value: 8
  misc_feature: MA Experiment 108540 PARAMETER Experiment Name: Zm_20percent_PEG_P Parameter: Organism Value: Zea mays
  misc_feature: MA Experiment 108540 PARAMETER Experiment Name: Zm_20percent_PEG_P Parameter: Plant Line Value: 35A19
  misc_feature: MA Experiment 108540 PARAMETER Experiment Name: Zm_20percent_PEG_P Parameter: Timepoint (hr) Value: 6
  misc_feature: MA Experiment 108540 PARAMETER Experiment Name: Zm_20percent_PEG_P Parameter: Tissue Value: Aerial
  misc_feature: MA Experiment 108540 PARAMETER Experiment Name: Zm_20percent_PEG_P Parameter: Treatment Value: 20percent PEG vs. No Treatment
  misc_feature: MA Experiment ID: 108543 Result: Up-regulated in Transcription
  misc_feature: MA Experiment ID: 108544 Result: Down-regulated in Transcription
  misc_feature: MA Experiment ID: 108556 Result: Down-regulated in Transcription
  misc_feature: MA Experiment 108556 PARAMETER Experiment Name: Zm_Drought_P Parameter: Age (day) Value: 9
  misc_feature: MA Experiment 108556 PARAMETER Experiment Name: Zm_Drought_P Parameter: Organism Value: Zea mays
  misc_feature: MA Experiment 108556 PARAMETER Experiment Name: Zm_Drought_P Parameter: Plant Line Value: 35A19
  misc_feature: MA Experiment 108556 PARAMETER Experiment Name: Zm_Drought_P Parameter: Timepoint (hr) Value: 24
  misc_feature: MA Experiment 108556 PARAMETER Experiment Name: Zm_Drought_P Parameter: Tissue Value: Aerial
  misc_feature: MA Experiment 108556 PARAMETER Experiment Name: Zm_Drought_P Parameter: Treatment Value: Drought vs. No Drought
  misc_feature: MA Experiment ID: 108597 Result: Down-regulated in Transcription
  misc_feature: MA Experiment 108597 PARAMETER Experiment Name: Zm_100uM_ABA_P Parameter: Age (day) Value: 9
  misc_feature: MA Experiment 108597 PARAMETER Experiment Name: Zm_100uM_ABA_P Parameter: Organism Value: Zea mays
  misc_feature: MA Experiment 108597 PARAMETER Experiment Name: Zm_100uM_ABA_P Parameter: Plant Line Value: 35A19
  misc_feature: MA Experiment 108597 PARAMETER Experiment Name: Zm_100uM_ABA_P Parameter: Timepoint (hr) Value: 24
  misc_feature: MA Experiment 108597 PARAMETER Experiment Name: Zm_100uM_ABA_P Parameter: Tissue Value: Aerial
  misc_feature: MA Experiment 108597 PARAMETER Experiment Name: Zm_100uM_ABA_P Parameter: Treatment Value: 100uM ABA vs. No Treatment
  misc_feature: MA Experiment ID: 20000535 Result: Down-regulated in Transcription
  misc_feature: MA Experiment 20000535 PARAMETER Experiment Name: Zm_Hybrid_Seed_Dev_P Parameter: DAP Value: 30 vs. 12
  misc_feature: MA Experiment 20000535 PARAMETER Experiment Name: Zm_Hybrid_Seed_Dev_P Parameter: Organism Value: Zea mays
  misc_feature: MA Experiment 20000535 PARAMETER Experiment Name: Zm_Hybrid_Seed_Dev_P Parameter: Plant Line Value: 35A19
  misc_feature: MA Experiment 20000535 PARAMETER Experiment Name: Zm_Hybrid_Seed_Dev_P Parameter: Tissue Value: Embryo vs. Unfert Floret
ctaatcaaaaatcgctcactacgcgaccgctagctactcgatcggatcctgaccacgcccgcctaccagaccaccaccaccaccaccaccaccacccacaaatccccaatggcgaggcgcatcgccgtggcggcagcgttcctggcgctggccgtggtggctcccgccgcgctggcgcaggctcccgggcccgcggcgacgccgagcgggccgcccgaacgtgacggcgatcctggagaagggcgggcagttcaccatgttcatgcggctgatgaaggagacgcagcaggacacgcagctgaacagccagctgaacagctcgtactgccagcagcggcggcgggtacacggtgttcgcgcccaccgacaacgccttcaacaacctcaagcccggcacgctcaactcgctgacgcagcagcagcaggtggcgctggtgcagggccacgtcctgccccagttctacagcatggactccttccagaccgccagcaaccccgtccgcacccaggcctccggccgcgacgggccctacacgctcaacatcaccgccaccgccaacaaccaggtcaacgtctcctcgggcgtcgccgaggtcaccatcaacaacgcgctcagcgccgtcaagcccctcgccgtctactccgtcgacaaggtgctcctgcccctggagctgttcggggccaaggcgcccgccgccgngcccgccgcgtcccaggggaagcccaagaagggcgggtcctcggacgctccctccgggtcggccggctccgacgacgccgcgccaacgggcgccgccggcgccagggccgtcggctggagcttcgccggcctcgccgccgtccttggctgcctgttgtgagagtgagaccgtgcgtcgtttctagggacggacggacggacgacaagctagttgaagatgagaatgccatgaccgaggccgggcatgggcgccttcttccatttccatctttgtctgagattgtcagtggccgtgttcccttgcccttctttctctctgtttatttatttaaacttctttcatctcgctagtttctttaatttgtactattggtggtttgtaagattggcttatgtgattcaatttatgcgcctgccgctgttgatactgc

SEQ ID NO: 5320 - protein, 264 aa, Zea mays subsp. mays
  peptide (1)..(264): Ceres Seq. ID no. 12409591
  misc_feature (1)..(23): Homolog of NCBI NO: 34910950 NR Description: putative arabinogalactan-like protein [Oryza
  misc_feature (1)..(22): Homolog of NCBI NO: 15242651 NR Description: fasciclin-like arabinogalactan-protein (FLA11); id: At5g03170.1, supported by cDNA: 14950., supported by cDNA:
  misc_feature (1)..(22): Homolog of NCBI NO: 21553523 NR Description: arabinogalactan protein-like [Arabidopsis
  misc_feature (1)..(22): Homolog of NCBI NO: 18379157 NR Description: fasciclin-like arabinogalactan-protein (FLA9); id: At1g03870.1, supported by cDNA: 39763., supported by cDNA: [Arabidopsis thaliana] >gi|25350180|pir||D86169 hypothetical
  misc_feature (1)..(22): Homolog of NCBI NO: 24417458 NR Description: unknown [Arabidopsis thaliana]
  misc_feature (1)..(22): Homolog of NCBI NO: 2129473 NR Description: arabinogalactan-like protein - loblolly pine
  misc_feature (1)..(22): Homolog of NCBI NO: 18399381 NR Description: fasciclin-like arabinogalactan-protein (FLA6); id: At2g20520.1, supported by cDNA: gi_13377779 [Arabidopsis
  misc_feature (1)..(22): Homolog of NCBI NO: 25350183 NR Description: probable surface protein [imported] - Arabidopsis
  misc_feature (1)..(22): Homolog of NCBI NO: 15241423 NR Description: fasciclin-like arabinogalactan-protein, putative protein id: At5g44130.1, supported by cDNA: gi_16648846, by cDNA: gi_20466118 [Arabidopsis thaliana]
  misc_feature (1)..(22): Homolog of NCBI NO: 30841338 NR Description: arabinogalactan protein [Gossypium hirsutum]
  misc_feature (148)..(148): Xaa is any aa, unknown or other
MFMRLMKETQQDTQLNSQLNSSYCQQRRRVHGVRAHRQRLQQPQARHAQLADAAAAGGAGAGPRPAPVLQHGLLPDRQQPRPHPGLRPRRALHAQHHRHRQQPGQRLLGRRRGHHQQRAQRRQAPRRLLRRQGAPAPGAVRGQGARRXARRVPGEAQEGRVLGRSLRVGRLRRRRANGRRRRQGRRLELRRPRRRPWLPVVRVRPCVVSRDGRTDDKLVEDENAMTEAGHGRLLPFPSLSEIVSGRVPLPFFLSVYLFKLLSSR

SEQ ID NO: 5321 - protein, 262 aa, Zea mays subsp. mays
  peptide (1)..(262): Ceres Seq. ID no. 12409592
  misc_feature (1)..(21): Homolog of NCBI NO: 34910950 NR Description: putative arabinogalactan-like protein [Oryza
  misc_feature (1)..(20): Homolog of NCBI NO: 15242651 NR Description: fasciclin-like arabinogalactan-protein (FLA11); id: At5g03170.1, supported by cDNA: 14950., supported by cDNA:
  misc_feature (1)..(20): Homolog of NCBI NO: 21553523 NR Description: arabinogalactan protein-like [Arabidopsis
  misc_feature (1)..(20): Homolog of NCBI NO: 18379157 NR Description: fasciclin-like arabinogalactan-protein (FLA9); id: At1g03870.1, supported by cDNA: 39763., supported by cDNA: [Arabidopsis thaliana] >gi|25350180|pir||D86169 hypothetical
  misc_feature (1)..(20): Homolog of NCBI NO: 24417458 NR Description: unknown [Arabidopsis thaliana]
  misc_feature (1)..(20): Homolog of NCBI NO: 2129473 NR Description: arabinogalactan-like protein - loblolly pine
  misc_feature (1)..(20): Homolog of NCBI NO: 18399381 NR Description: fasciclin-like arabinogalactan-protein (FLA6); id: At2g20520.1, supported by cDNA: gi_13377779 [Arabidopsis
  misc_feature (1)..(20): Homolog of NCBI NO: 25350183 NR Description: probable surface protein [imported] - Arabidopsis
  misc_feature (1)..(20): Homolog of NCBI NO: 15241423 NR Description: fasciclin-like arabinogalactan-protein, putative protein id: At5g44130.1, supported by cDNA: gi_16648846, by cDNA: gi_20466118 [Arabidopsis thaliana]
  misc_feature (1)..(20): Homolog of NCBI NO: 30841338 NR Description: arabinogalactan protein [Gossypium hirsutum]
  misc_feature (146)..(146): Xaa is any aa, unknown or other
MRLMKETQQDTQLNSQLNSSYCQQRRRVHGVRAHRQRLQQPQARHAQLADAAAAGGAGAGPRPAPVLQHGLLPDRQQPRPHPGLRPRRALHAQHHRHRQQPGQRLLGRRRGHHQQRAQRRQAPRRLLRRQGAPAPGAVRGQGARRXARRVPGEAQEGRVLGRSLRVGRLRRRRANGRRRRQGRRLELRRPRRRPWLPVVRVRPCVVSRDGRTDDKLVEDENAMTEAGHGRLLPFPSLSEIVSGRVPLPFFLSVYLFKLLSSR

SEQ ID NO: 5322 - protein, 259 aa, Zea mays subsp. mays
  peptide (1)..(259): Ceres Seq. ID no. 12409593
  misc_feature (1)..(18): Homolog of NCBI NO: 34910950 NR Description: putative arabinogalactan-like protein [Oryza
  misc_feature (1)..(17): Homolog of NCBI NO: 15242651 NR Description: fasciclin-like arabinogalactan-protein (FLA11); id: At5g03170.1, supported by cDNA: 14950., supported by cDNA:
  misc_feature (1)..(17): Homolog of NCBI NO: 21553523 NR Description: arabinogalactan protein-like [Arabidopsis
  misc_feature (1)..(17): Homolog of NCBI NO: 18379157 NR Description: fasciclin-like arabinogalactan-protein (FLA9); id: At1g03870.1, supported by cDNA: 39763., supported by cDNA: [Arabidopsis thaliana] >gi|25350180|pir||D86169 hypothetical
  misc_feature (1)..(17): Homolog of NCBI NO: 24417458 NR Description: unknown [Arabidopsis thaliana]
  misc_feature (1)..(17): Homolog of NCBI NO: 2129473 NR Description: arabinogalactan-like protein - loblolly pine
  misc_feature (1)..(17): Homolog of NCBI NO: 18399381 NR Description: fasciclin-like arabinogalactan-protein (FLA6); id: At2g20520.1, supported by cDNA: gi_13377779 [Arabidopsis
  misc_feature (1)..(17): Homolog of NCBI NO: 25350183 NR Description: probable surface protein [imported] - Arabidopsis
  misc_feature (1)..(17): Homolog of NCBI NO: 15241423 NR Description: fasciclin-like arabinogalactan-protein, putative protein id: At5g44130.1, supported by cDNA: gi_16648846, by cDNA: gi_20466118 [Arabidopsis thaliana]
  misc_feature (1)..(17): Homolog of NCBI NO: 30841338 NR Description: arabinogalactan protein [Gossypium hirsutum]
  misc_feature (143)..(143): Xaa is any aa, unknown or other
MKETQQDTQLNSQLNSSYCQQRRRVHGVRAHRQRLQQPQARHAQLADAAAAGGAGAGPRPAPVLQHGLLPDRQQPRPHPGLRPRRALHAQHHRHRQQPGQRLLGRRRGHHQQRAQRRQAPRRLLRRQGAPAPGAVRGQGARRXARRVPGEAQEGRVLGRSLRVGRLRRRRANGRRRRQGRRLELRRPRRRPWLPVVRVRPCVVSRDGRTDDKLVEDENAMTEAGHGRLLPFPSLSEIVSGRVPLPFFLSVYLFKLLSSR

SEQ ID NO: 5323 - DNA, 1562 bp, Zea mays subsp. mays
  misc_feature (1)..(1562): Ceres Seq. ID no. 12341687
  misc_feature: MA Experiment ID: 108528 Result: Down-regulated in Transcription
  misc_feature: MA Experiment 108528 PARAMETER Experiment Name: Zm_Imbibed_Seeds_P Parameter: Age (day) Value: 5 vs. 2
  misc_feature: MA Experiment 108528 PARAMETER Experiment Name: Zm_Imbibed_Seeds_P Parameter: Organism Value: Zea mays
  misc_feature: MA Experiment 108528 PARAMETER Experiment Name: Zm_Imbibed_Seeds_P Parameter: Plant Line Value: 35A19
  misc_feature: MA Experiment 108528 PARAMETER Experiment Name: Zm_Imbibed_Seeds_P Parameter: Tissue Value: Aerial vs. Embryo
  misc_feature: MA Experiment ID: 108530 Result: Down-regulated in Transcription
  misc_feature: MA Experiment 108530 PARAMETER Experiment Name: Zm_Imbibed_Seeds_P Parameter: Age (day) Value: 6 vs. 2
  misc_feature: MA Experiment 108530 PARAMETER Experiment Name: Zm_Imbibed_Seeds_P Parameter: Organism Value: Zea mays
  misc_feature: MA Experiment 108530 PARAMETER Experiment Name: Zm_Imbibed_Seeds_P Parameter: Plant Line Value: 35A19
  misc_feature: MA Experiment 108530 PARAMETER Experiment Name: Zm_Imbibed_Seeds_P Parameter: Tissue Value: Aerial vs. Embryo
  misc_feature: MA Experiment ID: 108535 Result: Up-regulated in Transcription
  misc_feature: MA Experiment 108535 PARAMETER Experiment Name: Zm_Meristem_P Parameter: Age (day) Value: 8
  misc_feature: MA Experiment 108535 PARAMETER Experiment Name: Zm_Meristem_P Parameter: Organism Value: Zea mays
  misc_feature: MA Experiment 108535 PARAMETER Experiment Name: Zm_Meristem_P Parameter: Plant Line Value: 35A19
  misc_feature: MA Experiment 108535 PARAMETER Experiment Name: Zm_Meristem_P Parameter: Tissue Value: Root Meristem vs. Above Root Meristem
  misc_feature: MA Experiment ID: 108544 Result: Down-regulated in Transcription
  misc_feature: MA Experiment ID: 108547 Result: Down-regulated in Transcription
  misc_feature: MA Experiment 108547 PARAMETER Experiment Name: Zm_Imbibed_Seeds_P Parameter: Age (day) Value: 4 vs. 2
  misc_feature: MA Experiment 108547 PARAMETER Experiment Name: Zm_Imbibed_Seeds_P Parameter: Organism Value: Zea mays
  misc_feature: MA Experiment 108547 PARAMETER Experiment Name: Zm_Imbibed_Seeds_P Parameter: Plant Line Value: 35A19
  misc_feature: MA Experiment 108547 PARAMETER Experiment Name: Zm_Imbibed_Seeds_P Parameter: Tissue Value: Aerial vs. Embryo
  misc_feature: MA Experiment ID: 20000108 Result: Up-regulated in Transcription
  misc_feature: MA Experiment 20000108 PARAMETER Experiment Name: Zm_Root-Tips_P Parameter: Age (day) Value: 12
  misc_feature: MA Experiment 20000108 PARAMETER Experiment Name: Zm_Root-Tips_P Parameter: Organism Value: Zea mays
  misc_feature: MA Experiment 20000108 PARAMETER Experiment Name: Zm_Root-Tips_P Parameter: Tissue Value: Root tips vs. Root mid region    35
  misc_feature: MA Experiment 20000108 PARAMETER Experiment Name: Zm_Root-Tips_P Parameter: Tissue Value: Root tips vs. Root mid region   Sequence Listing-Misc Features (4)
aagagattgataataataataatagttcggtgcctttttctagcggggaggaggcaggcggcgcaatctggcaccggccatcacgttccctccggccgcttccccctccctgccctccctttccccagatccgaagccattaaaaccagcggatctcacctcggggcgcgtccgcggcatctgggcaagcgagtggtagagcccgcagccatgagatggtatgcatcggtagcctcctgagggcgctggtcctgagtgcggcggcgtctgcgggcaggcgccgggggcccaggatcctgtgtggccacgaggcggatgtacgcgtgactcctcggcacggacacggctggcgcagattccgggcagtcacgggaaggatgatgctggactcctctgactgtgcctctgctgccgccgccgcggagacggggcaggtgcagccgcagcgccgcgcggtgggggccgtgcccctggcgcacgacggcggctacgccagcggcggatgggagagagaagatggcaaactgagttgtggatactcaagttttagaggcaagagagctacgatggaagatttctatgatgtaaaactaactgaaattgatggacaagctgttagcctgtttggtgttttcgacggtcatggaggatcacgtgctgctgagtatttgagggagcacttgtttgataaccttctcaagcaccctgatttcttgacagatacaaagcttgcgataagtgaaacatatcagaaaacagatacagatttcttggaatcagaagcaagcgctttcagggatgatggttcaacagcttcaactgcacttttggtgggtgaccatttatatgttgcaaatgttggtgattctcgtgccgttatttcaaaagctggcaaagctatggcgctttcagaagatcacaaacctaacagaattgatgagcgaaagagaattgaaaatgctggtggtattgtcatttgggctggcacttggagggtgggtggtgtattggcaatgtcccgtgcatttggcaatcgtttactgaagccatatgtggtggcagaacctgaaattcaggaagaacaggtcagtggtgggctggaatgcctggttcttgctagtgatgggctttgggatgttgtggaaaatgaggaagctgttttccttgggagatcggaggacacgccagagtctgcagctaggaaattgacagagattgcttactctcgcggcagcgctgacaatatcacatgcatcgtggtccaatttcaccatgacaaaaccggatgagccgtatggctgccaatttcagttgtaccctgcttcagtctattattatcctgcaagctgggtggtggccggtgggcttctcccagatttaccctgcttcatgctattattatcctgcaagccgggcggtggggtttctcagatctatcgctcatgtagcaactttcaagcactcgtccattgattcttttgttgtcttgtaggaaacatttgttccgacaggtgtagtagacacttttaaactgataattcaataaacgtatgtttacggct

SEQ ID NO: 5324 - protein, 357 aa, Zea mays subsp. mays
  peptide (1)..(357): Ceres Seq. ID no. 12341688
  misc_feature (104)..(344): Pfam Name: Protein phosphatase 2C Pfam Description: Protein phosphatase 2C
  misc_feature (104)..(344): Pfam Name: Protein phosphatase 2C Pfam Description: Protein phosphatase 2C
  misc_feature (1)..(356): Homolog of NCBI NO: 18423476 NR Description: protein phosphatase 2C (PP2C); protein id: supported by cDNA: gi_15027924, supported by cDNA: gi_18086419, by cDNA: gi_20259166 [Arabidopsis thaliana]
  misc_feature (1)..(356): Homolog of NCBI NO: 18086420 NR Description: AT5g53140/MFH8_8 [Arabidopsis thaliana]
  misc_feature (118)..(356): Homolog of NCBI NO: 9757995 NR Description: protein phosphatase 2C-like [Arabidopsis thaliana]
  misc_feature (118)..(357): Homolog of NCBI NO: 34912708 NR Description: putative protein phosphatase 2C-like protein
  misc_feature (89)..(357): Homolog of NCBI NO: 30689144 NR Description: protein phosphatase 2C (PP2C), putative thaliana] >gi|19347765|gb|AAL86334.1| unknown protein thaliana] >gi|22136752|gb|AAM91695.1| unknown protein
  misc_feature (1)..(356): Homolog of NCBI NO: 18086420 NR Description: AT5g53140/MFH8_8 [Arabidopsis thaliana]
  misc_feature (118)..(357): Homolog of NCBI NO: 34912708 NR Description: putative protein phosphatase 2C-like protein
  misc_feature (100)..(287): Homolog of NCBI NO: 7486331 NR Description: hypothetical protein F28M20.60 - Arabidopsis >gi|3281853|emb|CAA19748.1| putative protein [Arabidopsis >gi|7270078|emb|CAB79893.1| putative protein [Arabidopsis
  misc_feature (89)..(353): Homolog of NCBI NO: 38345197 NR Description: OSJNBa0015K02.7 [Oryza sativa (japonica
  misc_feature (93)..(356): Homolog of NCBI NO: 18416366 NR Description: protein phosphatase 2C -like protein; protein id:
  misc_feature (94)..(351): Homolog of NCBI NO: 20146110 NR Description: protein phosphatase 2C [Mesembryanthemum
  misc_feature (93)..(356): Homolog of NCBI NO: 15238651 NR Description: Protein phosphatase 2C-like protein; protein id:
  misc_feature (89)..(357): Homolog of NCBI NO: 30689144 NR Description: protein phosphatase 2C (PP2C), putative thaliana] >gi|19347765|gb|AAL86334.1| unknown protein thaliana] >gi|22136752|gb|AAM91695.1| unknown protein
  misc_feature (118)..(356): Homolog of NCBI NO: 9757995 NR Description: protein phosphatase 2C-like [Arabidopsis thaliana]
  misc_feature (1)..(356): Homolog of NCBI NO: 18423476 NR Description: protein phosphatase 2C (PP2C); protein id: supported by cDNA: gi_15027924, supported by cDNA: gi_18086419, by cDNA: gi_20259166 [Arabidopsis thaliana]
  misc_feature (93)..(356): Homolog of NCBI NO: 15238651 NR Description: Protein phosphatase 2C-like protein; protein id:
  misc_feature (94)..(351): Homolog of NCBI NO: 20146110 NR Description: protein phosphatase 2C [Mesembryanthemum
  misc_feature (93)..(356): Homolog of NCBI NO: 18416366 NR Description: protein phosphatase 2C -like protein; protein id:
  misc_feature (89)..(353): Homolog of NCBI NO: 38345197 NR Description: OSJNBa0015K02.7 [Oryza sativa (japonica
  misc_feature (100)..(287): Homolog of NCBI NO: 7486331 NR Description: hypothetical protein F28M20.60 - Arabidopsis >gi|3281853|emb|CAA19748.1| putative protein [Arabidopsis >gi|7270078|emb|CAB79893.1| putative protein [Arabidopsis
MVCIGSLLRALVLSAAASAGRRRGPRILCGHEADVRVTPRHGHGWRRFRAVTGRMMLDSSDCASAAAAAETGQVQPQRRAVGAVPLAHDGGYASGGWEREDGKLSCGYSSFRGKRATMEDFYDVKLTEIDGQAVSLFGVFDGHGGSRAAEYLREHLFDNLLKHPDFLTDTKLAISETYQKTDTDFLESEASAFRDDGSTASTALLVGDHLYVANVGDSRAVISKAGKAMALSEDHKPNRIDERKRIENAGGIVIWAGTWRVGGVLAMSRAFGNRLLKPYVVAEPEIQEEQVSGGLECLVLASDGLWDVVENEEAVFLGRSEDTPESAARKLTEIAYSRGSADNITCIVVQFHHDKTG

SEQ ID NO: 5325 - protein, 303 aa, Zea mays subsp. mays
  peptide (1)..(303): Ceres Seq. ID no. 12341689
  misc_feature (50)..(290): Pfam Name: Protein phosphatase 2C Pfam Description: Protein phosphatase 2C
  misc_feature (50)..(290): Pfam Name: Protein phosphatase 2C Pfam Description: Protein phosphatase 2C
  misc_feature (1)..(302): Homolog of NCBI NO: 18423476 NR Description: protein phosphatase 2C (PP2C); protein id: supported by cDNA: gi_15027924, supported by cDNA: gi_18086419, by cDNA: gi_20259166 [Arabidopsis thaliana]
  misc_feature (1)..(302): Homolog of NCBI NO: 18086420 NR Description: AT5g53140/MFH8_8 [Arabidopsis thaliana]
  misc_feature (64)..(302): Homolog of NCBI NO: 9757995 NR Description: protein phosphatase 2C-like [Arabidopsis thaliana]
  misc_feature (64)..(303): Homolog of NCBI NO: 34912708 NR Description: putative protein phosphatase 2C-like protein
  misc_feature (35)..(303): Homolog of NCBI NO: 30689144 NR Description: protein phosphatase 2C (PP2C), putative thaliana] >gi|19347765|gb|AAL86334.1| unknown protein thaliana] >gi|22136752|gb|AAM91695.1| unknown protein
  misc_feature (1)..(302): Homolog of NCBI NO: 18423476 NR Description: protein phosphatase 2C (PP2C); protein id: supported by cDNA: gi_15027924, supported by cDNA: gi_18086419, by cDNA: gi_20259166 [Arabidopsis thaliana]
  misc_feature (64)..(302): Homolog of NCBI NO: 9757995 NR Description: protein phosphatase 2C-like [Arabidopsis thaliana]
  misc_feature (35)..(299): Homolog of NCBI NO: 38345197 NR Description: OSJNBa0015K02.7 [Oryza sativa (japonica
  misc_feature (39)..(302): Homolog of NCBI NO: 18416366 NR Description: protein phosphatase 2C -like protein; protein id:
  misc_feature (40)..(297): Homolog of NCBI NO: 20146110 NR Description: protein phosphatase 2C [Mesembryanthemum
  misc_feature (39)..(302): Homolog of NCBI NO: 15238651 NR Description: Protein phosphatase 2C-like protein; protein id:
  misc_feature (35)..(303): Homolog of NCBI NO: 30689144 NR Description: protein phosphatase 2C (PP2C), putative thaliana] >gi|19347765|gb|AAL86334.1| unknown protein thaliana] >gi|22136752|gb|AAM91695.1| unknown protein
  misc_feature (64)..(303): Homolog of NCBI NO: 34912708 NR Description: putative protein phosphatase 2C-like protein
  misc_feature (1)..(302): Homolog of NCBI NO: 18086420 NR Description: AT5g53140/MFH8_8 [Arabidopsis thaliana]
  misc_feature (39)..(302): Homolog of NCBI NO: 15238651 NR Description: Protein phosphatase 2C-like protein; protein id:
  misc_feature (40)..(297): Homolog of NCBI NO: 20146110 NR Description: protein phosphatase 2C [Mesembryanthemum
  misc_feature (39)..(302): Homolog of NCBI NO: 18416366 NR Description: protein phosphatase 2C -like protein; protein id:
  misc_feature (35)..(299): Homolog of NCBI NO: 38345197 NR Description: OSJNBa0015K02.7 [Oryza sativa (japonica
  misc_feature (46)..(233): Homolog of NCBI NO: 7486331 NR Description: hypothetical protein F28M20.60 - Arabidopsis >gi|3281853|emb|CAA19748.1| putative protein [Arabidopsis >gi|7270078|emb|CAB79893.1| putative protein [Arabidopsis
  misc_feature (46)..(233): Homolog of NCBI NO: 7486331 NR Description: hypothetical protein F28M20.60 - Arabidopsis >gi|3281853|emb|CAA19748.1| putative protein [Arabidopsis >gi|7270078|emb|CAB79893.1| putative protein [Arabidopsis
MMLDSSDCASAAAAAETGQVQPQRRAVGAVPLAHDGGYASGGWEREDGKLSCGYSSFRGKRATMEDFYDVKLTEIDGQAVSLFGVFDGHGGSRAAEYLREHLFDNLLKHPDFLTDTKLAISETYQKTDTDFLESEASAFRDDGSTASTALLVGDHLYVANVGDSRAVISKAGKAMALSEDHKPNRIDERKRIENAGGIVIWAGTWRVGGVLAMSRAFGNRLLKPYVVAEPEIQEEQVSGGLECLVLASDGLWDVVENEEAVFLGRSEDTPESAARKLTEIAYSRGSADNITCIVVQFHHDKTG

SEQ ID NO: 5326 - protein, 302 aa, Zea mays subsp. mays
  peptide (1)..(302): Ceres Seq. ID no. 12341690
  misc_feature (49)..(289): Pfam Name: Protein phosphatase 2C Pfam Description: Protein phosphatase 2C
  misc_feature (49)..(289): Pfam Name: Protein phosphatase 2C Pfam Description: Protein phosphatase 2C
  misc_feature (1)..(301): Homolog of NCBI NO: 18423476 NR Description: protein phosphatase 2C (PP2C); protein id: supported by cDNA: gi_15027924, supported by cDNA: gi_18086419, by cDNA: gi_20259166 [Arabidopsis thaliana]
  misc_feature (1)..(301): Homolog of NCBI NO: 18086420 NR Description: AT5g53140/MFH8_8 [Arabidopsis thaliana]
  misc_feature (63)..(301): Homolog of NCBI NO: 9757995 NR Description: protein phosphatase 2C-like [Arabidopsis thaliana]
  misc_feature (63)..(302): Homolog of NCBI NO: 34912708 NR Description: putative protein phosphatase 2C-like protein
  misc_feature (34)..(302): Homolog of NCBI NO: 30689144 NR Description: protein phosphatase 2C (PP2C), putative thaliana] >gi|19347765|gb|AAL86334.1| unknown protein thaliana] >gi|22136752|gb|AAM91695.1| unknown protein
  misc_feature (1)..(301): Homolog of NCBI NO: 18086420 NR Description: AT5g53140/MFH8_8 [Arabidopsis thaliana]
  misc_feature (63)..(302): Homolog of NCBI NO: 34912708 NR Description: putative protein phosphatase 2C-like protein
  misc_feature (45)..(232): Homolog of NCBI NO: 7486331 NR Description: hypothetical protein F28M20.60 - Arabidopsis >gi|3281853|emb|CAA19748.1| putative protein [Arabidopsis >gi|7270078|emb|CAB79893.1| putative protein [Arabidopsis
  misc_feature (34)..(298): Homolog of NCBI NO: 38345197 NR Description: OSJNBa0015K02.7 [Oryza sativa (japonica
  misc_feature (38)..(301): Homolog of NCBI NO: 18416366 NR Description: protein phosphatase 2C -like protein; protein id:
  misc_feature (39)..(296): Homolog of NCBI NO: 20146110 NR Description: protein phosphatase 2C [Mesembryanthemum
  misc_feature (38)..(301): Homolog of NCBI NO: 15238651 NR Description: Protein phosphatase 2C-like protein; protein id:
  misc_feature (34)..(302): Homolog of NCBI NO: 30689144 NR Description: protein phosphatase 2C (PP2C), putative thaliana] >gi|19347765|gb|AAL86334.1| unknown protein thaliana] >gi|22136752|gb|AAM91695.1| unknown protein
  misc_feature (63)..(301): Homolog of NCBI NO: 9757995 NR Description: protein phosphatase 2C-like [Arabidopsis thaliana]
  misc_feature (1)..(301): Homolog of NCBI NO: 18423476 NR Description: protein phosphatase 2C (PP2C); protein id: supported by cDNA: gi_15027924, supported by cDNA: gi_18086419, by cDNA: gi_20259166 [Arabidopsis thaliana]
  misc_feature (38)..(301): Homolog of NCBI NO: 15238651 NR Description: Protein phosphatase 2C-like protein; protein id:
  misc_feature (39)..(296): Homolog of NCBI NO: 20146110 NR Description: protein phosphatase 2C [Mesembryanthemum
  misc_feature (38)..(301): Homolog of NCBI NO: 18416366 NR Description: protein phosphatase 2C -like protein; protein id:
  misc_feature (34)..(298): Homolog of NCBI NO: 38345197 NR Description: OSJNBa0015K02.7 [Oryza sativa (japonica
  misc_feature (45)..(232): Homolog of NCBI NO: 7486331 NR Description: hypothetical protein F28M20.60 - Arabidopsis >gi|3281853|emb|CAA19748.1| putative protein [Arabidopsis >gi|7270078|emb|CAB79893.1| putative protein [Arabidopsis
MLDSSDCASAAAAAETGQVQPQRRAVGAVPLAHDGGYASGGWEREDGKLSCGYSSFRGKRATMEDFYDVKLTEIDGQAVSLFGVFDGHGGSRAAEYLREHLFDNLLKHPDFLTDTKLAISETYQKTDTDFLESEASAFRDDGSTASTALLVGDHLYVANVGDSRAVISKAGKAMALSEDHKPNRIDERKRIENAGGIVIWAGTWRVGGVLAMSRAFGNRLLKPYVVAEPEIQEEQVSGGLECLVLASDGLWDVVENEEAVFLGRSEDTPESAARKLTEIAYSRGSADNITCIVVQFHHDKTG

SEQ ID NO: 5327 - DNA, 1223 bp, Zea mays subsp. mays
  misc_feature (1)..(1223): Ceres Seq. ID no. 12341691
  misc_feature: MA Experiment ID: 108527 Result: Up-regulated in Transcription
  misc_feature: MA Experiment 108527 PARAMETER Experiment Name: Zm_5mM_NO_P Parameter: Age (day) Value: 8
  misc_feature: MA Experiment 108527 PARAMETER Experiment Name: Zm_5mM_NO_P Parameter: Organism Value: Zea mays
  misc_feature: MA Experiment 108527 PARAMETER Experiment Name: Zm_5mM_NO_P Parameter: Plant Line Value: 35A19
  misc_feature: MA Experiment 108527 PARAMETER Experiment Name: Zm_5mM_NO_P Parameter: Timepoint (hr) Value: 6
  misc_feature: MA Experiment 108527 PARAMETER Experiment Name: Zm_5mM_NO_P Parameter: Tissue Value: Aerial
  misc_feature: MA Experiment 108527 PARAMETER Experiment Name: Zm_5mM_NO_P Parameter: Treatment Value: 5mM NO vs. No Treatment
gtcggccttggcccaagccaaggaccctttcgcttctctcagtctacgactaggcggcggcggcggccttcacgcacgagccttcgccgcctatacttgcgcttcgtcgagccggtgaattgtggtctaagaacaagagggaaggatctttctccagacttcgcaattttggacgacgaggttttgtgttatctggtttgtcgggatggatgccaaaaagttcctgcagctggtcgaagagaagaaaaggaggatcctcgagaagaaagaagccccactaaagtggcagcagaagcttgaagcagcagttaacgtcaaagctgatgcagaagcgaaggcgaaaaaactaaaatcaagaaagcataggaggagaggagattcttcctcggactctgacagtgactatgacagcgatgttgatcggaaacaccggaggaggaaggatcgtagaaggaacaagaagcatgagcattctgactctgatgatgccaggagacgcaagcataggtccagaaagggctcagactcaagtgatgagagcaaccgtgaatatgaaagcgggtctgaagaagaacgtacaaagaagaagcgttcgcacagaagaaagcatcacagacactcttcaatgtcagactctgaagacaacagtgatgaggatgagcggagatctgccaaggaccattctcagccccgcagacgccaccatcagtcttctgatgatggctcggacaagatcaggtcgagacatgggaagcgtctgagatcaagttacgagaatgctcggccagattccaacaaccataagcatctcaggagccaatccttggaggagtcatcagatgatagagatgatgatggatcagagaagataagaaatggcaaaaggtatcacaagaatcatcaccgtcaccaccatcatcatcgtcaccatcagcaccaccatgaaagacataatagctcagcagaacctaatgacaggaggcaagtactgaaagatgaccagagggcccttgaaggtagcagtgcagactgaaggtatccaccagaggacggaaagattgattctccattcgtgatgttcccagttatttgttgtgctgataacatttctttgatttgggctatgaaacgtggtcattctaccaattatgttggttttgagaatttggtaatactgagttaacaatgaagcatgattatctgaaatgtttaagtattagatc

SEQ ID NO: 5328 - protein, 275 aa, Zea mays subsp. mays
  peptide (1)..(275): Ceres Seq. ID no. 12341692
  misc_feature (29)..(226): Pfam Name: Caldesmon Pfam Description: Caldesmon
  misc_feature (1)..(275): Homolog of NCBI NO: 34895374 NR Description: P0698A04.25 [Oryza sativa (japonica
  misc_feature (1)..(259): Homolog of NCBI NO: 18379151 NR Description: expressed protein; protein id: At2g01100.1, by cDNA: 39741., supported by cDNA: gi_18086560 [Arabidopsis >gi|25410880|pir||F84420 hypothetical protein At2g01100
  misc_feature (20)..(270): Homolog of NCBI NO: 15218071 NR Description: DEAD/DEAH box RNA helicase, putative; protein id: [Arabidopsis thaliana] >gi|25518759|pir||H86341 hypothetical
  misc_feature (36)..(250): Homolog of NCBI NO: 39580460 NR Description: Hypothetical protein CBG20540 [Caenorhabditis
  misc_feature (40)..(265): Homolog of NCBI NO: 38181860 NR Description: Unknown (protein for MGC:63496) [Danio rerio]
  misc_feature (50)..(260): Homolog of NCBI NO: 31201363 NR Description: ENSANGP00000011118 [Anopheles gambiae]
  misc_feature (15)..(259): Homolog of NCBI NO: 12834839 NR Description: unnamed protein product [Mus musculus]
  misc_feature (37)..(275): Homolog of NCBI NO: 39591417 NR Description: Hypothetical protein CBG20922 [Caenorhabditis
  misc_feature (11)..(270): Homolog of NCBI NO: 24580684 NR Description: CG2839-PA [Drosophila melanogaster]
  misc_feature (30)..(265): Homolog of NCBI NO: 32407697 NR Description: hypothetical protein [Neurospora crassa]
MDAKKFLQLVEEKKRRILEKKEAPLKWQQKLEAAVNVKADAEAKAKKLKSRKHRRRGDSSSDSDSDYDSDVDRKHRRRKDRRRNKKHEHSDSDDARRRKHRSRKGSDSSDESNREYESGSEEERTKKKRSHRRKHHRHSSMSDSEDNSDEDERRSAKDHSQPRRRHHQSSDDGSDKIRSRHGKRLRSSYENARPDSNNHKHLRSQSLEESSDDRDDDGSEKIRNGKRYHKNHHRHHHHHRHHQHHHERHNSSAEPNDRRQVLKDDQRALEGSSAD

SEQ ID NO: 5329 - DNA, 1217 bp, Zea mays subsp. mays
  misc_feature (1)..(1217): Ceres Seq. ID no. 12405631
  misc_feature: MA Experiment ID: 108522 Result: Up-regulated in Transcription
  misc_feature: MA Experiment 108522 PARAMETER Experiment Name: Zm_42deg_Heat_P Parameter: Age (day) Value: 8
  misc_feature: MA Experiment 108522 PARAMETER Experiment Name: Zm_42deg_Heat_P Parameter: Organism Value: Zea mays
  misc_feature: MA Experiment 108522 PARAMETER Experiment Name: Zm_42deg_Heat_P Parameter: Plant Line Value: 35A19
  misc_feature: MA Experiment 108522 PARAMETER Experiment Name: Zm_42deg_Heat_P Parameter: Temperature (deg C) Value: 42 vs. 22
  misc_feature: MA Experiment 108522 PARAMETER Experiment Name: Zm_42deg_Heat_P Parameter: Timepoint (hr) Value: 1
  misc_feature: MA Experiment 108522 PARAMETER Experiment Name: Zm_42deg_Heat_P Parameter: Tissue Value: Aerial
  misc_feature: MA Experiment ID: 108535 Result: Down-regulated in Transcription
  misc_feature: MA Experiment 108535 PARAMETER Experiment Name: Zm_Meristem_P Parameter: Age (day) Value: 8
  misc_feature: MA Experiment 108535 PARAMETER Experiment Name: Zm_Meristem_P Parameter: Organism Value: Zea mays
  misc_feature: MA Experiment 108535 PARAMETER Experiment Name: Zm_Meristem_P Parameter: Plant Line Value: 35A19
  misc_feature: MA Experiment 108535 PARAMETER Experiment Name: Zm_Meristem_P Parameter: Tissue Value: Root Meristem vs. Above Root Meristem
  misc_feature: MA Experiment ID: 108543 Result: Up-regulated in Transcription
  misc_feature: MA Experiment ID: 108544 Result: Up-regulated in Transcription
  misc_feature: MA Experiment ID: 20000535 Result: Down-regulated in Transcription
  misc_feature: MA Experiment 20000535 PARAMETER Experiment Name: Zm_Hybrid_Seed_Dev_P Parameter: DAP Value: 30 vs. 12
  misc_feature: MA Experiment 20000535 PARAMETER Experiment Name: Zm_Hybrid_Seed_Dev_P Parameter: Organism Value: Zea mays
  misc_feature: MA Experiment 20000535 PARAMETER Experiment Name: Zm_Hybrid_Seed_Dev_P Parameter: Plant Line Value: 35A19
  misc_feature: MA Experiment 20000535 PARAMETER Experiment Name: Zm_Hybrid_Seed_Dev_P Parameter: Tissue Value: Embryo vs. Unfert Floret
acgccgctgctccaagaaaccaccgccgagcccaaccgcacaagcgcgcgaggcaggagagagagagagagagagagagagagagagaggcggggagcaaaacaatggaggggaaagaggaggacgtgcgcctgggcgccaacaagttctcggagcgccagcccatcgggacggcggcgcagggcgccgctgacgacaaggactacaaggagcccccgccggcgccgctgttcgagcccggggagctcaagtcctggtccttctaccgcgcgggcatcgccgagttcgtcgccaccttcctcttcctctacatcaccatcctcaccgtcatgggcgtctccaagtccacctccaagtgcgccaccgtcggcatccagggcatcgcctggtccttcggaggaatgatcttcgcgctcgtctactgcaccgccggcatctccggaggacacatcaacccagctgtgactttcgggctgttcttagccaggaagctgtccctgactaggggccctcttctacatcatcatgcaatgcctgggtgccatctgtggagctggagtggtgaagggcttccagcagggactttacatgggcaacggtggtggcgccaatgttgtcgcacctggctacaccaagggtgatggccttggcgctgagattgttggcaccttcatcctagtctacaccgtcttctcagccaccgatgccaagaggaatgccagggactcccatgttcctatccttgccccactgccaattgggttcgcggtgttcctggtccaccttgccaccatccccattactggcactggcatcaacccagctaggagccttggcgctgccatcatctacaacagggatcacgcctggaacgaccattggatcttctgggtcggccccttcattggcgctgccctggctgccatctaccaccaggtgatcatcagagccatcccgttcaagagcaggtcttaagctgccgtggccgtgccgagacatgccagtccgaagaacgggcgtcttcctgtgatgtcttcttgtctgcccacgcctagtttctctgtcgattcctattcgtcgtctcttcagggctggtgctcactgctgcgccgttctgttaaccgaaacaagaactctgtgtattcctgtaccgagctgtgcatgtttttttttttttctttccatcgtggagaatttaagttattatccgtttgctg

SEQ ID NO: 5330 - protein, 212 aa, Zea mays subsp. mays
  peptide (1)..(212): Ceres Seq. ID no. 12405632
  misc_feature (81)..(168): Pfam Name: Major intrinsic protein Pfam Description: Major intrinsic protein
  misc_feature (35)..(197): Homolog of NCBI NO: 4768911 NR Description: plasma membrane MIP protein [Zea mays]
  misc_feature (35)..(168): Homolog of NCBI NO: 13447793 NR Description: plasma membrane integral protein ZmPIP1-3 [Zea
  misc_feature (35)..(168): Homolog of NCBI NO: 2894534 NR Description: aquaporin [Oryza sativa]
  misc_feature (35)..(168): Homolog of NCBI NO: 2696804 NR Description: water channel protein [Oryza sativa (japonica
  misc_feature (35)..(168): Homolog of NCBI NO: 6692753 NR Description: bpw3 [Hordeum vulgare subsp. vulgare]
  misc_feature (35)..(168): Homolog of NCBI NO: 4388774 NR Description: transmembrane protein [Hordeum vulgare subsp.
  misc_feature (35)..(168): Homolog of NCBI NO: 7441250 NR Description: transmembrane protein - rice
  misc_feature (35)..(197): Homolog of NCBI NO: 13235338 NR Description: plasma membrane intrinsic protein [Zea mays]
  misc_feature (35)..(168): Homolog of NCBI NO: 542126 NR Description: transmembrane protein - barley
  misc_feature (35)..(168): Homolog of NCBI NO: 7649312 NR Description: aquaporin 2 [Allium cepa]
AAAPRNHRRAQPHKRARQEREREREREREAGSKTMEGKEEDVRLGANKFSERQPIGTAAQGAADDKDYKEPPPAPLFEPGELKSWSFYRAGIAEFVATFLFLYITILTVMGVSKSTSKCATVGIQGIAWSFGGMIFALVYCTAGISGGHINPAVTFGLFLARKLSLTRGPLLHHHAMPGCHLWSWSGEGLPAGTLHGQRWWRQCCRTWLHQG

SEQ ID NO: 5331 - protein, 178 aa, Zea mays subsp. mays
  peptide (1)..(178): Ceres Seq. ID no. 12405633
  misc_feature (47)..(134): Pfam Name: Major intrinsic protein Pfam Description: Major intrinsic protein
  misc_feature (1)..(163): Homolog of NCBI NO: 4768911 NR Description: plasma membrane MIP protein [Zea mays]
  misc_feature (1)..(134): Homolog of NCBI NO: 13447793 NR Description: plasma membrane integral protein ZmPIP1-3 [Zea
  misc_feature (1)..(134): Homolog of NCBI NO: 2894534 NR Description: aquaporin [Oryza sativa]
  misc_feature (1)..(134): Homolog of NCBI NO: 2696804 NR Description: water channel protein [Oryza sativa (japonica
  misc_feature (1)..(134): Homolog of NCBI NO: 6692753 NR Description: bpw3 [Hordeum vulgare subsp. vulgare]
  misc_feature (1)..(134): Homolog of NCBI NO: 4388774 NR Description: transmembrane protein [Hordeum vulgare subsp.
  misc_feature (1)..(134): Homolog of NCBI NO: 7441250 NR Description: transmembrane protein - rice
  misc_feature (1)..(163): Homolog of NCBI NO: 13235338 NR Description: plasma membrane intrinsic protein [Zea mays]
  misc_feature (1)..(134): Homolog of NCBI NO: 542126 NR Description: transmembrane protein - barley
  misc_feature (1)..(134): Homolog of NCBI NO: 7649312 NR Description: aquaporin 2 [Allium cepa]
MEGKEEDVRLGANKFSERQPIGTAAQGAADDKDYKEPPPAPLFEPGELKSWSFYRAGIAEFVATFLFLYITILTVMGVSKSTSKCATVGIQGIAWSFGGMIFALVYCTAGISGGHINPAVTFGLFLARKLSLTRGPLLHHHAMPGCHLWSWSGEGLPAGTLHGQRWWRQCCRTWLHQG

SEQ ID NO: 5332 - protein, 149 aa, Zea mays subsp. mays
  peptide (1)..(149): Ceres Seq. ID no. 12405634
  misc_feature (1)..(136): Pfam Name: Major intrinsic protein Pfam Description: Major intrinsic protein
  misc_feature (1)..(149): Homolog of NCBI NO: 4768911 NR Description: plasma membrane MIP protein [Zea mays]
  misc_feature (1)..(149): Homolog of NCBI NO: 13447793 NR Description: plasma membrane integral protein ZmPIP1-3 [Zea
  misc_feature (1)..(149): Homolog of NCBI NO: 2894534 NR Description: aquaporin [Oryza sativa]
  misc_feature (1)..(149): Homolog of NCBI NO: 2696804 NR Description: water channel protein [Oryza sativa (japonica
  misc_feature (1)..(149): Homolog of NCBI NO: 6692753 NR Description: bpw3 [Hordeum vulgare subsp. vulgare]
  misc_feature (1)..(149): Homolog of NCBI NO: 4388774 NR Description: transmembrane protein [Hordeum vulgare subsp.
  misc_feature (1)..(149): Homolog of NCBI NO: 7441250 NR Description: transmembrane protein - rice
  misc_feature (1)..(149): Homolog of NCBI NO: 542126 NR Description: transmembrane protein - barley
  misc_feature (1)..(148): Homolog of NCBI NO: 13235338 NR Description: plasma membrane intrinsic protein [Zea mays]
  misc_feature (1)..(149): Homolog of NCBI NO: 7649312 NR Description: aquaporin 2 [Allium cepa]
MQCLGAICGAGVVKGFQQGLYMGNGGGANVVAPGYTKGDGLGAEIVGTFILVYTVFSATDAKRNARDSHVPILAPLPIGFAVFLVHLATIPITGTGINPARSLGAAIIYNRDHAWNDHWIFWVGPFIGAALAAIYHQVIIRAIPFKSRS

SEQ ID NO: 5333 - DNA, 1024 bp, Zea mays subsp. mays
  misc_feature (1)..(1024): Ceres Seq. ID no. 12593662
  misc_feature: MA Experiment ID: 108528 Result: Up-regulated in Transcription
  misc_feature: MA Experiment 108528 PARAMETER Experiment Name: Zm_Imbibed_Seeds_P Parameter: Age (day) Value: 5 vs. 2
  misc_feature: MA Experiment 108528 PARAMETER Experiment Name: Zm_Imbibed_Seeds_P Parameter: Organism Value: Zea mays
  misc_feature: MA Experiment 108528 PARAMETER Experiment Name: Zm_Imbibed_Seeds_P Parameter: Plant Line Value: 35A19
  misc_feature: MA Experiment 108528 PARAMETER Experiment Name: Zm_Imbibed_Seeds_P Parameter: Tissue Value: Aerial vs. Embryo
  misc_feature: MA Experiment ID: 108529 Result: Up-regulated in Transcription
  misc_feature: MA Experiment 108529 PARAMETER Experiment Name: Zm_Imbibed_Seeds_P Parameter: Age (day) Value: 5 vs. 2
  misc_feature: MA Experiment 108529 PARAMETER Experiment Name: Zm_Imbibed_Seeds_P Parameter: Organism Value: Zea mays
  misc_feature: MA Experiment 108529 PARAMETER Experiment Name: Zm_Imbibed_Seeds_P Parameter: Plant Line Value: 35A19
  misc_feature: MA Experiment 108529 PARAMETER Experiment Name: Zm_Imbibed_Seeds_P Parameter: Tissue Value: Roots vs. Embryo
  misc_feature: MA Experiment ID: 108535 Result: Down-regulated in Transcription
  misc_feature: MA Experiment 108535 PARAMETER Experiment Name: Zm_Meristem_P Parameter: Age (day) Value: 8
  misc_feature: MA Experiment 108535 PARAMETER Experiment Name: Zm_Meristem_P Parameter: Organism Value: Zea mays
  misc_feature: MA Experiment 108535 PARAMETER Experiment Name: Zm_Meristem_P Parameter: Plant Line Value: 35A19
  misc_feature: MA Experiment 108535 PARAMETER Experiment Name: Zm_Meristem_P Parameter: Tissue Value: Root Meristem vs. Above Root Meristem
  misc_feature: MA Experiment ID: 108543 Result: Up-regulated in Transcription
  misc_feature: MA Experiment ID: 108546 Result: Up-regulated in Transcription
  misc_feature: MA Experiment 108546 PARAMETER Experiment Name: Zm_Imbibed_Seeds_P Parameter: Age (day) Value: 3 vs. 2
  misc_feature: MA Experiment 108546 PARAMETER Experiment Name: Zm_Imbibed_Seeds_P Parameter: Organism Value: Zea mays
  misc_feature: MA Experiment 108546 PARAMETER Experiment Name: Zm_Imbibed_Seeds_P Parameter: Plant Line Value: 35A19
  misc_feature: MA Experiment 108546 PARAMETER Experiment Name: Zm_Imbibed_Seeds_P Parameter: Tissue Value: Roots vs. Embryo
  misc_feature: MA Experiment ID: 108547 Result: Up-regulated in Transcription
  misc_feature: MA Experiment 108547 PARAMETER Experiment Name: Zm_Imbibed_Seeds_P Parameter: Age (day) Value: 4 vs. 2
  misc_feature: MA Experiment 108547 PARAMETER Experiment Name: Zm_Imbibed_Seeds_P Parameter: Organism Value: Zea mays
  misc_feature: MA Experiment 108547 PARAMETER Experiment Name: Zm_Imbibed_Seeds_P Parameter: Plant Line Value: 35A19
  misc_feature: MA Experiment 108547 PARAMETER Experiment Name: Zm_Imbibed_Seeds_P Parameter: Tissue Value: Aerial vs. Embryo
  misc_feature: MA Experiment ID: 20000108 Result: Down-regulated in Transcription
  misc_feature: MA Experiment 20000108 PARAMETER Experiment Name: Zm_Root-Tips_P Parameter: Age (day) Value: 12
  misc_feature: MA Experiment 20000108 PARAMETER Experiment Name: Zm_Root-Tips_P Parameter: Organism Value: Zea mays
  misc_feature: MA Experiment 20000108 PARAMETER Experiment Name: Zm_Root-Tips_P Parameter: Tissue Value: Root tips vs. Root mid region    35
  misc_feature: MA Experiment 20000108 PARAMETER Experiment Name: Zm_Root-Tips_P Parameter: Tissue Value: Root tips vs. Root mid region   Sequence Listing-Misc Features (4)
  misc_feature: MA Experiment ID: 20000535 Result: Down-regulated in Transcription
  misc_feature: MA Experiment 20000535 PARAMETER Experiment Name: Zm_Hybrid_Seed_Dev_P Parameter: DAP Value: 30 vs. 12
  misc_feature: MA Experiment 20000535 PARAMETER Experiment Name: Zm_Hybrid_Seed_Dev_P Parameter: Organism Value: Zea mays
  misc_feature: MA Experiment 20000535 PARAMETER Experiment Name: Zm_Hybrid_Seed_Dev_P Parameter: Plant Line Value: 35A19
  misc_feature: MA Experiment 20000535 PARAMETER Experiment Name: Zm_Hybrid_Seed_Dev_P Parameter: Tissue Value: Embryo vs. Unfert Floret
gccacaaccgtagcctgtagcttcatccgttgcgctgctcccggttccatcgcgcggtgcggaatttaacatggccgtgccggaggtggtggtcgacggcgtcgtcttcccgccggtggcccgcccgccgggctccgccggctcgcacttcctcggcggcgcaggcgtgcgaggcctcgagatcggaggcaacttcatcaagttcacggccatcggcgtgtacctggaggacgcggccgtgcccgcgctggccaagaagtggggcggcaagacggccgacgagctcgcctccgacgccgccttcttccgcgacgtcgtcacgggcgacttcgagaagttcacgagggtgacgatgatcctcccgctgacgggcgagcagtacgcggagaaagtgacggagaactgcgtggcgttctggaaggccgccggcctgtacacggacgccgagggcgtcgccgtggagaagttcagggaggtgttcaagccagagactttcgcgccgggcgcctccatcctcttcacgcactcgcccgccggagtcctcaccgtcgccttctccaaggactcgtcggtgccagcggccggcggcgtggcgatcgagaacaagcgcctctgcgaggccgtgctggagtccatcatcggggagcgcggcgtgtcgccggccgcgaagctgagcctcgccgcgagggtgtcggagctcctcgccaaggagaccgccgcgcccgccgacgcgccgcaggcggagcccgtctccatcaccgcctgaggcgaggagcgggcgggcgagcgaacgaaccgcgaggagaaagaaagcaaccagacggttgggcggcacggcgtctcacacctgccgcctgcgcttgcgtgctccggaccggagagatgccgcgcgggtgcagtgcagccgtcgcgtcatgtctgtccgcgctctggcgtcgtgttcctgcctttctggtcgcgtagttgtcttgtgttcgctgttggtcgttctgggtaacatttgaataaaacaagcggatttgtt

SEQ ID NO: 5334 - protein, 231 aa, Zea mays subsp. mays
  peptide (1)..(231): Ceres Seq. ID no. 12593663
  misc_feature (11)..(212): Pfam Name: Chalcone-flavanone isomerase Pfam Description: Chalcone-flavanone isomerase
  misc_feature (11)..(231): Homolog of NCBI NO: 729103 NR Description: CHALCONE--FLAVONONE ISOMERASE (CHALCONE ISOMERASE)
  misc_feature (1)..(230): Homolog of NCBI NO: 20152986 NR Description: chalcone isomerase [Hordeum vulgare subsp.
  misc_feature (2)..(231): Homolog of NCBI NO: 29124145 NR Description: chalcone isomerase [Oryza sativa (japonica
  misc_feature (2)..(231): Homolog of NCBI NO: 20152984 NR Description: chalcone isomerase [Oryza sativa (japonica
  misc_feature (2)..(228): Homolog of NCBI NO: 1705761 NR Description: CHALCONE--FLAVONONE ISOMERASE (CHALCONE
  misc_feature (1)..(228): Homolog of NCBI NO: 5921722 NR Description: Chalcone--flavonone isomerase (Chalcone >gi|3126969|gb|AAC16013.1| chalcone isomerase [Elaeagnus
  misc_feature (1)..(231): Homolog of NCBI NO: 68481 NR Description: chalcone isomerase (EC 5.5.1.6) A - garden
  misc_feature (1)..(231): Homolog of NCBI NO: 116136 NR Description: CHALCONE--FLAVONONE ISOMERASE A (CHALCONE
  misc_feature (1)..(231): Homolog of NCBI NO: 228617 NR Description: chalcone flavanone isomerase
  misc_feature (2)..(211): Homolog of NCBI NO: 4126399 NR Description: chalcone isomerase [Citrus sinensis]
MAVPEVVVDGVVFPPVARPPGSAGSHFLGGAGVRGLEIGGNFIKFTAIGVYLEDAAVPALAKKWGGKTADELASDAAFFRDVVTGDFEKFTRVTMILPLTGEQYAEKVTENCVAFWKAAGLYTDAEGVAVEKFREVFKPETFAPGASILFTHSPAGVLTVAFSKDSSVPAAGGVAIENKRLCEAVLESIIGERGVSPAAKLSLAARVSELLAKETAAPADAPQAEPVSITA

SEQ ID NO: 5335 - protein, 137 aa, Zea mays subsp. mays
  peptide (1)..(137): Ceres Seq. ID no. 12593664
  misc_feature (1)..(118): Pfam Name: Chalcone-flavanone isomerase Pfam Description: Chalcone-flavanone isomerase
  misc_feature (1)..(137): Homolog of NCBI NO: 729103 NR Description: CHALCONE--FLAVONONE ISOMERASE (CHALCONE ISOMERASE)
  misc_feature (1)..(136): Homolog of NCBI NO: 20152986 NR Description: chalcone isomerase [Hordeum vulgare subsp.
  misc_feature (1)..(137): Homolog of NCBI NO: 29124145 NR Description: chalcone isomerase [Oryza sativa (japonica
  misc_feature (1)..(137): Homolog of NCBI NO: 20152984 NR Description: chalcone isomerase [Oryza sativa (japonica
  misc_feature (1)..(134): Homolog of NCBI NO: 1705761 NR Description: CHALCONE--FLAVONONE ISOMERASE (CHALCONE
  misc_feature (1)..(134): Homolog of NCBI NO: 5921722 NR Description: Chalcone--flavonone isomerase (Chalcone >gi|3126969|gb|AAC16013.1| chalcone isomerase [Elaeagnus
  misc_feature (1)..(137): Homolog of NCBI NO: 68481 NR Description: chalcone isomerase (EC 5.5.1.6) A - garden
  misc_feature (1)..(137): Homolog of NCBI NO: 116136 NR Description: CHALCONE--FLAVONONE ISOMERASE A (CHALCONE
  misc_feature (1)..(137): Homolog of NCBI NO: 228617 NR Description: chalcone flavanone isomerase
  misc_feature (1)..(117): Homolog of NCBI NO: 4126399 NR Description: chalcone isomerase [Citrus sinensis]
MILPLTGEQYAEKVTENCVAFWKAAGLYTDAEGVAVEKFREVFKPETFAPGASILFTHSPAGVLTVAFSKDSSVPAAGGVAIENKRLCEAVLESIIGERGVSPAAKLSLAARVSELLAKETAAPADAPQAEPVSITA

SEQ ID NO: 5336 - DNA, 1238 bp, Zea mays subsp. mays
  misc_feature (1)..(1238): Ceres Seq. ID no. 12349046
  misc_feature: MA Experiment ID: 108536 Result: Up-regulated in Transcription
  misc_feature: MA Experiment 108536 PARAMETER Experiment Name: Zm_Meristem_P Parameter: Age (day) Value: 8
  misc_feature: MA Experiment 108536 PARAMETER Experiment Name: Zm_Meristem_P Parameter: Organism Value: Zea mays
  misc_feature: MA Experiment 108536 PARAMETER Experiment Name: Zm_Meristem_P Parameter: Plant Line Value: 35A19
  misc_feature: MA Experiment 108536 PARAMETER Experiment Name: Zm_Meristem_P Parameter: Tissue Value: Shoot Meristem vs. Above Shoot Meristem
ctatctaatgcatgccgagtatcattttctccagaaggtcccatatctgaagaggcgcttgagagagtccgtgcactgttagatatgataagacctctagatgtcggcctagataatgaagcccaaattgcacgcaattggagtagttctacgcgtccatcaaatgggagacgaggacgcaatggggctaaccagttcgcggctccaatcaaatatttgcacattcatgaatgtgaaagcttctctatgggtatattttgtatgccaccttcttcagttatcccacttcataatcatcctggaatgactgtacttagcaagcttctttatggacgtctgcatgctgaatcttatgactgggttgacatacctgatcatccaattgatcaattacaaacaaggccagccaagcttgttaaagattgtgaaatgactgctccagagacaactattctttaccctaatgcaggtggtaacatccacactttcagagccattacaccttgtgctctctttgacgttctttctccaccatactccgctgaggatgggcgacactgttcatacttccgaaaatctcagatgaatcagccacctgttgttttgcctgctgagatagatagctctcaggtagtttggttggaggagttggaggaccatcagcccccagaaggctttgttgttgcaagaggtctgtataaaggccctgtaattaggagataatttgctttggagcgcagaatcaaccaagctgcaaatcagctgaaagacgatgcaggcttgtagtgcctagtgcaagcatcgtcaggtcatgtgcagcctacggtttatttgtacatctcaaagtgatctttgataatttaacagcagttttacagaacaggaacggatgttttttgtttggctgccattttaactgtgtcccactgctggagtatctctgacctagttatggagctcttatcagatcaagaccatggagaacatacttttgatgtaccagcatagctattgtcatgatgtaccagggaagatcaagacaagtgtttccatttggtgatttcagaaagaatttggtgtggggctaccattttgtctgtgtaatagcagcattactattttggagcaagactgtaaattacgggagaggaactataataatatcattaggtttatcatgaaatatattttcatggtgtatctatttaggccttgtttggaaggagatctttttctgc

SEQ ID NO: 5337 - protein, 240 aa, Zea mays subsp. mays
  peptide (1)..(240): Ceres Seq. ID no. 12349047
  misc_feature (1)..(240): Homolog of NCBI NO: 38345647 NR Description: OSJNBb0040D15.1 [Oryza sativa (japonica
  misc_feature (1)..(240): Homolog of NCBI NO: 15231104 NR Description: putative protein; protein id: At3g58670.1, by cDNA: 114412., supported by cDNA: gi_15293012 [Arabidopsis
  misc_feature (1)..(239): Homolog of NCBI NO: 18406030 NR Description: expressed protein; protein id: At2g42670.1, by cDNA: 113423. [Arabidopsis thaliana] expressed protein [Arabidopsis thaliana]
  misc_feature (1)..(239): Homolog of NCBI NO: 25370572 NR Description: hypothetical protein At2g42670 [imported] -
  misc_feature (1)..(239): Homolog of NCBI NO: 21536850 NR Description: unknown [Arabidopsis thaliana]
  misc_feature (1)..(238): Homolog of NCBI NO: 15242218 NR Description: putative protein; protein id: At5g15120.1
  misc_feature (1)..(239): Homolog of NCBI NO: 10176982 NR Description: contains similarity to unknown
  misc_feature (1)..(239): Homolog of NCBI NO: 15242505 NR Description: putative protein; protein id: At5g39890.1, by cDNA: 100590. [Arabidopsis thaliana] unknown [Arabidopsis thaliana] >gi|27808558|gb|AAO24559.1|
  misc_feature (1)..(238): Homolog of NCBI NO: 34906308 NR Description: unnamed protein product [Oryza sativa (japonica group)] >gi|9558428|dbj|BAB03364.1| unnamed protein product
  misc_feature (1)..(239): Homolog of NCBI NO: 18394617 NR Description: expressed protein; protein id: At1g18490.1,
LSNACRVSFSPEGPISEEALERVRALLDMIRPLDVGLDNEAQIARNWSSSTRPSNGRRGRNGANQFAAPIKYLHIHECESFSMGIFCMPPSSVIPLHNHPGMTVLSKLLYGRLHAESYDWVDIPDHPIDQLQTRPAKLVKDCEMTAPETTILYPNAGGNIHTFRAITPCALFDVLSPPYSAEDGRHCSYFRKSQMNQPPVVLPAEIDSSQVVWLEELEDHQPPEGFVVARGLYKGPVIRR

SEQ ID NO: 5338 - protein, 212 aa, Zea mays subsp. mays
  peptide (1)..(212): Ceres Seq. ID no. 12349048
  misc_feature (1)..(212): Homolog of NCBI NO: 38345647 NR Description: OSJNBb0040D15.1 [Oryza sativa (japonica
  misc_feature (1)..(212): Homolog of NCBI NO: 15231104 NR Description: putative protein; protein id: At3g58670.1, by cDNA: 114412., supported by cDNA: gi_15293012 [Arabidopsis
  misc_feature (1)..(211): Homolog of NCBI NO: 18406030 NR Description: expressed protein; protein id: At2g42670.1, by cDNA: 113423. [Arabidopsis thaliana] expressed protein [Arabidopsis thaliana]
  misc_feature (1)..(211): Homolog of NCBI NO: 25370572 NR Description: hypothetical protein At2g42670 [imported] -
  misc_feature (1)..(211): Homolog of NCBI NO: 21536850 NR Description: unknown [Arabidopsis thaliana]
  misc_feature (1)..(210): Homolog of NCBI NO: 15242218 NR Description: putative protein; protein id: At5g15120.1
  misc_feature (1)..(211): Homolog of NCBI NO: 10176982 NR Description: contains similarity to unknown
  misc_feature (1)..(211): Homolog of NCBI NO: 15242505 NR Description: putative protein; protein id: At5g39890.1, by cDNA: 100590. [Arabidopsis thaliana] unknown [Arabidopsis thaliana] >gi|27808558|gb|AAO24559.1|
  misc_feature (1)..(210): Homolog of NCBI NO: 34906308 NR Description: unnamed protein product [Oryza sativa (japonica group)] >gi|9558428|dbj|BAB03364.1| unnamed protein product
  misc_feature (1)..(211): Homolog of NCBI NO: 18394617 NR Description: expressed protein; protein id: At1g18490.1,
MIRPLDVGLDNEAQIARNWSSSTRPSNGRRGRNGANQFAAPIKYLHIHECESFSMGIFCMPPSSVIPLHNHPGMTVLSKLLYGRLHAESYDWVDIPDHPIDQLQTRPAKLVKDCEMTAPETTILYPNAGGNIHTFRAITPCALFDVLSPPYSAEDGRHCSYFRKSQMNQPPVVLPAEIDSSQVVWLEELEDHQPPEGFVVARGLYKGPVIRR

SEQ ID NO: 5339 - protein, 158 aa, Zea mays subsp. mays
  peptide (1)..(158): Ceres Seq. ID no. 12349049
  misc_feature (1)..(158): Homolog of NCBI NO: 38345647 NR Description: OSJNBb0040D15.1 [Oryza sativa (japonica
  misc_feature (1)..(158): Homolog of NCBI NO: 15231104 NR Description: putative protein; protein id: At3g58670.1, by cDNA: 114412., supported by cDNA: gi_15293012 [Arabidopsis
  misc_feature (1)..(157): Homolog of NCBI NO: 18406030 NR Description: expressed protein; protein id: At2g42670.1, by cDNA: 113423. [Arabidopsis thaliana] expressed protein [Arabidopsis thaliana]
  misc_feature (1)..(157): Homolog of NCBI NO: 25370572 NR Description: hypothetical protein At2g42670 [imported] -
  misc_feature (1)..(157): Homolog of NCBI NO: 21536850 NR Description: unknown [Arabidopsis thaliana]
  misc_feature (1)..(156): Homolog of NCBI NO: 15242218 NR Description: putative protein; protein id: At5g15120.1
  misc_feature (1)..(157): Homolog of NCBI NO: 10176982 NR Description: contains similarity to unknown
  misc_feature (1)..(157): Homolog of NCBI NO: 15242505 NR Description: putative protein; protein id: At5g39890.1, by cDNA: 100590. [Arabidopsis thaliana] unknown [Arabidopsis thaliana] >gi|27808558|gb|AAO24559.1|
  misc_feature (1)..(156): Homolog of NCBI NO: 34906308 NR Description: unnamed protein product [Oryza sativa (japonica group)] >gi|9558428|dbj|BAB03364.1| unnamed protein product
  misc_feature (1)..(157): Homolog of NCBI NO: 18394617 NR Description: expressed protein; protein id: At1g18490.1,
MGIFCMPPSSVIPLHNHPGMTVLSKLLYGRLHAESYDWVDIPDHPIDQLQTRPAKLVKDCEMTAPETTILYPNAGGNIHTFRAITPCALFDVLSPPYSAEDGRHCSYFRKSQMNQPPVVLPAEIDSSQVVWLEELEDHQPPEGFVVARGLYKGPVIRR

SEQ ID NO: 5340 - DNA, 1634 bp, Zea mays subsp. mays
  misc_feature (1)..(1634): Ceres Seq. ID no. 12356246
  misc_feature: MA Experiment ID: 108535 Result: Up-regulated in Transcription
  misc_feature: MA Experiment 108535 PARAMETER Experiment Name: Zm_Meristem_P Parameter: Age (day) Value: 8
  misc_feature: MA Experiment 108535 PARAMETER Experiment Name: Zm_Meristem_P Parameter: Organism Value: Zea mays
  misc_feature: MA Experiment 108535 PARAMETER Experiment Name: Zm_Meristem_P Parameter: Plant Line Value: 35A19
  misc_feature: MA Experiment 108535 PARAMETER Experiment Name: Zm_Meristem_P Parameter: Tissue Value: Root Meristem vs. Above Root Meristem
  misc_feature: MA Experiment ID: 20000492 Result: Down-regulated in Transcription
  misc_feature: MA Experiment 20000492 PARAMETER Experiment Name: Zm_Hybrid_Seed_Dev_P Parameter: DAP Value: 12
  misc_feature: MA Experiment 20000492 PARAMETER Experiment Name: Zm_Hybrid_Seed_Dev_P Parameter: Organism Value: Zea mays
  misc_feature: MA Experiment 20000492 PARAMETER Experiment Name: Zm_Hybrid_Seed_Dev_P Parameter: Plant Line Value: 35A19
  misc_feature: MA Experiment 20000492 PARAMETER Experiment Name: Zm_Hybrid_Seed_Dev_P Parameter: Tissue Value: Fert Kernel vs. Unfert Floret
aagcatagcagcagcccattgcctgcctttcggcttaccctctctctctctctctcacacacacacacaaccactcacactgccggttggtttcccttccgttgtggttggtgcgtacttagtggcggccggccatggcgcggaggaggggcttctcggcggtggtgccgccggcgtggctgccggcggtgctcctgtgcctggcaggcgcggcgtcgggcgagccgctgccgcagtactacaatgccatcttcagcttcggcgactccttctccgacacgggcaacttcgtcatcatcaactcgggcaagctgcccaacatgcccaagttcccgccgccgtacgcgaggtgctccaacggccgcctcgtgatcgacttcctggccgaggcgttcggtctcccgctgctccctccgtcggcgaacaagggcaccaacttcagccagggcgccaacttcgcggtgatgggcgcgacggcgcttgacctcaagtacttcaaggacaacaacgtgtggagcatcccgcccttcaacacgtccatgggcgtgcagctggagtggttccaggaggtgaagcgcagcatctgccccgacgaccccggcgcgtgccgcgccctgttcgggagggccctgttcgtgttcggcgagttcggcggcaacgactacagcttcgcgtggaaggcggactggtcgctggagaaggtgaagacgatggtgccggcggtggtggcgtcgctggtgggcggcgtggagcggctgctggacgagggcgcccgccacgtcgtggtgccgggcaacctccccgccggatgcatccccatcacgctcaccatgtacccgtccgaggaccgctccgagtacgacccgcgcaccggctgcctcaagaagtacaacagcgtcgcgctctaccacaacgccatgctccgcgtcgcgctcgaccgcctgcagcgcccccgcccggagtccccgcgtcgtctacgccgactactacacgccctacatacagttcgcgcgcacaccgcacctctacggctacaagcgcggcgctctgcgggcttgctgcggcggcggcgggccgtacaactacaacgtgagcgcgtcgtgcgggctccccggcgccaccacctgcgaggaccccgacgcgcacgtcagctgggacggcatccacctcaccgaggcgccctaccgcttcatcgccaacacctgggtcaagggcccctacgcgcacccgccgctcgccaccgtcgtgctcgaggacatggtcgactgatcctcttgtggtttggcacaagggaagagctgatatgtaacgtgaattccattcgttcatgtccatgtatattgggtactaccggagcggagtaacaaaaaaaaaatatatatgttagtcttttctgtttttttttcgtcgtgcacctgtgtgccgtgcagtcgcatagatcaatgaagaaaccactccagctgtttttgatgattggtttaggcggacttgcaagcggtcgagcctgcttatgttgggcagtgtactgtacacgctaaggccttgttcgtttctgtcggatcggtgggtcggaacgattccaaaccggattgcttctctaatttatataaactttgattgagtggaacgattcc

SEQ ID NO: 5341 - protein, 409 aa, Zea mays subsp. mays
  peptide (1)..(409): Ceres Seq. ID no. 12356247
  misc_feature (39)..(277): Pfam Name: GDSL-like Lipase/Acylhydrolase Pfam Description: GDSL-like Lipase/Acylhydrolase
  misc_feature (24)..(277): Homolog of NCBI NO: 34903994 NR Description: unnamed protein product [Oryza sativa (japonica group)] >gi|7523492|dbj|BAA94220.1| unnamed protein product
  misc_feature (12)..(275): Homolog of NCBI NO: 34903996 NR Description: unnamed protein product [Oryza sativa (japonica group)] >gi|7523491|dbj|BAA94219.1| unnamed protein product
  misc_feature (19)..(275): Homolog of NCBI NO: 34903986 NR Description: unnamed protein product [Oryza sativa (japonica group)] >gi|7523496|dbj|BAA94224.1| unnamed protein product
  misc_feature (107)..(276): Homolog of NCBI NO: 15237586 NR Description: lipase -like protein; protein id: At5g03980.1
  misc_feature (36)..(275): Homolog of NCBI NO: 1911765 NR Description: iEP4 [Daucus carota] >gi|4204870|gb|AAD11468.1|
  misc_feature (36)..(275): Homolog of NCBI NO: 1362081 NR Description: secreted glycoprotein EP4, 47K, precursor -
  misc_feature (38)..(290): Homolog of NCBI NO: 21358785 NR Description: lipase SIL1 [Brassica rapa subsp. pekinensis]
  misc_feature (1)..(253): Homolog of NCBI NO: 15231809 NR Description: unknown protein; protein id: At3g14225.1
  misc_feature (38)..(277): Homolog of NCBI NO: 18417760 NR Description: putative protein; protein id: At5g15720.1, by cDNA: 118296. [Arabidopsis thaliana]
  misc_feature (38)..(277): Homolog of NCBI NO: 11280578 NR Description: hypothetical protein F14F8_100 - Arabidopsis >gi|9755617|emb|CAC01771.1| putative protein [Arabidopsis
MARRRGFSAVVPPAWLPAVLLCLAGAASGEPLPQYYNAIFSFGDSFSDTGNFVIINSGKLPNMPKFPPPYARCSNGRLVIDFLAEAFGLPLLPPSANKGTNFSQGANFAVMGATALDLKYFKDNNVWSIPPFNTSMGVQLEWFQEVKRSICPDDPGACRALFGRALFVFGEFGGNDYSFAWKADWSLEKVKTMVPAVVASLVGGVERLLDEGARHVVVPGNLPAGCIPITLTMYPSEDRSEYDPRTGCLKKYNSVALYHNAMLRVALDRLQRPRPESPRRLRRLLHALHTVRAHTAPLRLQARRSAGLLRRRRAVQLQRERVVRAPRRHHLRGPRRARQLGRHPPHRGALPLHRQHLGQGPLRAPAARHRRARGHGRLILLWFGTREELICNVNSIRSCPCILGTTGAE

SEQ ID NO: 5342 - protein, 347 aa, Zea mays subsp. mays
  peptide (1)..(347): Ceres Seq. ID no. 12356248
  misc_feature (1)..(215): Pfam Name: GDSL-like Lipase/Acylhydrolase Pfam Description: GDSL-like Lipase/Acylhydrolase
  misc_feature (45)..(214): Homolog of NCBI NO: 15237586 NR Description: lipase -like protein; protein id: At5g03980.1
  misc_feature (1)..(213): Homolog of NCBI NO: 1911765 NR Description: iEP4 [Daucus carota] >gi|4204870|gb|AAD11468.1|
  misc_feature (1)..(213): Homolog of NCBI NO: 1362081 NR Description: secreted glycoprotein EP4, 47K, precursor -
  misc_feature (1)..(228): Homolog of NCBI NO: 21358785 NR Description: lipase SIL1 [Brassica rapa subsp. pekinensis]
  misc_feature (1)..(213): Homolog of NCBI NO: 34903996 NR Description: unnamed protein product [Oryza sativa (japonica group)] >gi|7523491|dbj|BAA94219.1| unnamed protein product
  misc_feature (1)..(213): Homolog of NCBI NO: 34903986 NR Description: unnamed protein product [Oryza sativa (japonica group)] >gi|7523496|dbj|BAA94224.1| unnamed protein product
  misc_feature (1)..(215): Homolog of NCBI NO: 34903994 NR Description: unnamed protein product [Oryza sativa (japonica group)] >gi|7523492|dbj|BAA94220.1| unnamed protein product
  misc_feature (1)..(191): Homolog of NCBI NO: 15231809 NR Description: unknown protein; protein id: At3g14225.1
  misc_feature (1)..(215): Homolog of NCBI NO: 18417760 NR Description: putative protein; protein id: At5g15720.1, by cDNA: 118296. [Arabidopsis thaliana]
  misc_feature (1)..(215): Homolog of NCBI NO: 11280578 NR Description: hypothetical protein F14F8_100 - Arabidopsis >gi|9755617|emb|CAC01771.1| putative protein [Arabidopsis
MPKFPPPYARCSNGRLVIDFLAEAFGLPLLPPSANKGTNFSQGANFAVMGATALDLKYFKDNNVWSIPPFNTSMGVQLEWFQEVKRSICPDDPGACRALFGRALFVFGEFGGNDYSFAWKADWSLEKVKTMVPAVVASLVGGVERLLDEGARHVVVPGNLPAGCIPITLTMYPSEDRSEYDPRTGCLKKYNSVALYHNAMLRVALDRLQRPRPESPRRLRRLLHALHTVRAHTAPLRLQARRSAGLLRRRRAVQLQRERVVRAPRRHHLRGPRRARQLGRHPPHRGALPLHRQHLGQGPLRAPAARHRRARGHGRLILLWFGTREELICNVNSIRSCPCILGTTGAE

SEQ ID NO: 5343 - protein, 299 aa, Zea mays subsp. mays
  peptide (1)..(299): Ceres Seq. ID no. 12356249
  misc_feature (1)..(167): Pfam Name: GDSL-like Lipase/Acylhydrolase Pfam Description: GDSL-like Lipase/Acylhydrolase
  misc_feature (1)..(167): Homolog of NCBI NO: 34903994 NR Description: unnamed protein product [Oryza sativa (japonica group)] >gi|7523492|dbj|BAA94220.1| unnamed protein product
  misc_feature (1)..(165): Homolog of NCBI NO: 34903996 NR Description: unnamed protein product [Oryza sativa (japonica group)] >gi|7523491|dbj|BAA94219.1| unnamed protein product
  misc_feature (1)..(165): Homolog of NCBI NO: 34903986 NR Description: unnamed protein product [Oryza sativa (japonica group)] >gi|7523496|dbj|BAA94224.1| unnamed protein product
  misc_feature (1)..(166): Homolog of NCBI NO: 15237586 NR Description: lipase -like protein; protein id: At5g03980.1
  misc_feature (1)..(165): Homolog of NCBI NO: 1911765 NR Description: iEP4 [Daucus carota] >gi|4204870|gb|AAD11468.1|
  misc_feature (1)..(165): Homolog of NCBI NO: 1362081 NR Description: secreted glycoprotein EP4, 47K, precursor -
  misc_feature (1)..(180): Homolog of NCBI NO: 21358785 NR Description: lipase SIL1 [Brassica rapa subsp. pekinensis]
  misc_feature (1)..(143): Homolog of NCBI NO: 15231809 NR Description: unknown protein; protein id: At3g14225.1
  misc_feature (1)..(167): Homolog of NCBI NO: 18417760 NR Description: putative protein; protein id: At5g15720.1, by cDNA: 118296. [Arabidopsis thaliana]
  misc_feature (1)..(167): Homolog of NCBI NO: 11280578 NR Description: hypothetical protein F14F8_100 - Arabidopsis >gi|9755617|emb|CAC01771.1| putative protein [Arabidopsis
MGATALDLKYFKDNNVWSIPPFNTSMGVQLEWFQEVKRSICPDDPGACRALFGRALFVFGEFGGNDYSFAWKADWSLEKVKTMVPAVVASLVGGVERLLDEGARHVVVPGNLPAGCIPITLTMYPSEDRSEYDPRTGCLKKYNSVALYHNAMLRVALDRLQRPRPESPRRLRRLLHALHTVRAHTAPLRLQARRSAGLLRRRRAVQLQRERVVRAPRRHHLRGPRRARQLGRHPPHRGALPLHRQHLGQGPLRAPAARHRRARGHGRLILLWFGTREELICNVNSIRSCPCILGTTGAE

SEQ ID NO: 5344 - DNA, 1128 bp, Zea mays subsp. mays
  misc_feature (1)..(1128): Ceres Seq. ID no. 12387077
  misc_feature: MA Experiment ID: 108529 Result: Up-regulated in Transcription
  misc_feature: MA Experiment 108529 PARAMETER Experiment Name: Zm_Imbibed_Seeds_P Parameter: Age (day) Value: 5 vs. 2
  misc_feature: MA Experiment 108529 PARAMETER Experiment Name: Zm_Imbibed_Seeds_P Parameter: Organism Value: Zea mays
  misc_feature: MA Experiment 108529 PARAMETER Experiment Name: Zm_Imbibed_Seeds_P Parameter: Plant Line Value: 35A19
  misc_feature: MA Experiment 108529 PARAMETER Experiment Name: Zm_Imbibed_Seeds_P Parameter: Tissue Value: Roots vs. Embryo
  misc_feature: MA Experiment ID: 108535 Result: Down-regulated in Transcription
  misc_feature: MA Experiment 108535 PARAMETER Experiment Name: Zm_Meristem_P Parameter: Age (day) Value: 8
  misc_feature: MA Experiment 108535 PARAMETER Experiment Name: Zm_Meristem_P Parameter: Organism Value: Zea mays
  misc_feature: MA Experiment 108535 PARAMETER Experiment Name: Zm_Meristem_P Parameter: Plant Line Value: 35A19
  misc_feature: MA Experiment 108535 PARAMETER Experiment Name: Zm_Meristem_P Parameter: Tissue Value: Root Meristem vs. Above Root Meristem
  misc_feature: MA Experiment ID: 108543 Result: Up-regulated in Transcription
  misc_feature: MA Experiment ID: 108546 Result: Up-regulated in Transcription
  misc_feature: MA Experiment 108546 PARAMETER Experiment Name: Zm_Imbibed_Seeds_P Parameter: Age (day) Value: 3 vs. 2
  misc_feature: MA Experiment 108546 PARAMETER Experiment Name: Zm_Imbibed_Seeds_P Parameter: Organism Value: Zea mays
  misc_feature: MA Experiment 108546 PARAMETER Experiment Name: Zm_Imbibed_Seeds_P Parameter: Plant Line Value: 35A19
  misc_feature: MA Experiment 108546 PARAMETER Experiment Name: Zm_Imbibed_Seeds_P Parameter: Tissue Value: Roots vs. Embryo
  misc_feature: MA Experiment ID: 20000108 Result: Down-regulated in Transcription
  misc_feature: MA Experiment 20000108 PARAMETER Experiment Name: Zm_Root-Tips_P Parameter: Age (day) Value: 12
  misc_feature: MA Experiment 20000108 PARAMETER Experiment Name: Zm_Root-Tips_P Parameter: Organism Value: Zea mays
  misc_feature: MA Experiment 20000108 PARAMETER Experiment Name: Zm_Root-Tips_P Parameter: Tissue Value: Root tips vs. Root mid region    35
  misc_feature: MA Experiment 20000108 PARAMETER Experiment Name: Zm_Root-Tips_P Parameter: Tissue Value: Root tips vs. Root mid region   Sequence Listing-Misc Features (4)
  misc_feature: MA Experiment ID: 20000492 Result: Down-regulated in Transcription
  misc_feature: MA Experiment 20000492 PARAMETER Experiment Name: Zm_Hybrid_Seed_Dev_P Parameter: DAP Value: 12
  misc_feature: MA Experiment 20000492 PARAMETER Experiment Name: Zm_Hybrid_Seed_Dev_P Parameter: Organism Value: Zea mays
  misc_feature: MA Experiment 20000492 PARAMETER Experiment Name: Zm_Hybrid_Seed_Dev_P Parameter: Plant Line Value: 35A19
  misc_feature: MA Experiment 20000492 PARAMETER Experiment Name: Zm_Hybrid_Seed_Dev_P Parameter: Tissue Value: Fert Kernel vs. Unfert Floret
  misc_feature: MA Experiment ID: 20000535 Result: Down-regulated in Transcription
  misc_feature: MA Experiment 20000535 PARAMETER Experiment Name: Zm_Hybrid_Seed_Dev_P Parameter: DAP Value: 30 vs. 12
  misc_feature: MA Experiment 20000535 PARAMETER Experiment Name: Zm_Hybrid_Seed_Dev_P Parameter: Organism Value: Zea mays
  misc_feature: MA Experiment 20000535 PARAMETER Experiment Name: Zm_Hybrid_Seed_Dev_P Parameter: Plant Line Value: 35A19
  misc_feature: MA Experiment 20000535 PARAMETER Experiment Name: Zm_Hybrid_Seed_Dev_P Parameter: Tissue Value: Embryo vs. Unfert Floret
atcctcctcctcctgctgctctggcctctggagtcgccgcccctcccaagaacaccaggctctaatttaatttaagcggagggaagcttgatcgatcagtctgacactgccctcgttaagttatagcaaatgcctcccgcttcgacggatgcaaacaacgcgatccagaagctgtacgaggtctgcagagcctcactgtccgagaaggggcctctatctcctcctgactactctctcgacaacgtccgtgctgcgttagacatggttaccccgtccgacgtcggccttgaacgcgaggctggagctgtgcgtgcttggaggagcccacgggcggccctgggtcggaagaggattttccattccagcccagccatcagatatcgccatatatacgagtgcgcaagcttctcgattgggatgttttgcatgccggcatcatccatcatcccgctccacaaccatcctggaatgaccgtgctcggcaaggttttgtacggcgcggcgcacgtcagatcgtaccgctggattgaatcagccggatcgtccattaacctgtcgaaagcgaggccagccaaggttgtaagggacggcgagatgtccgcgccgtgcggagcgatggttcttcgtccggaggaaggcggcgacgtccacgccttgagagccatcactccctgcgccgtcctccacatcctgacgcccccgtactcctcgcaggacgggaggcactgctcctacttccggagacgcccaagatcacacccatcgggcgttttattgaaccgaacaggggggtctgagttcgtgtggctggaagaataccagccacgtcacaacttcatcattagaagggacctgtacacaggacccgctttaaagttatgatgacatcatgacaaacaggggggataattatatatatacgcttcccctttggcttcttattaagttatatcgatggacaagcacttagctatatgtgcttggcacttttttatttatatggtagtattaaaaagacagttgattatcctacgtacagggccgcctgctgtatgtattattctaagataatgttattgtacatctgatgatgtcacccactgacagaatgttatttatataataatt

SEQ ID NO: 5345 - protein, 250 aa, Zea mays subsp. mays
  peptide (1)..(250): Ceres Seq. ID no. 12387078
  misc_feature (12)..(249): Homolog of NCBI NO: 15231104 NR Description: putative protein; protein id: At3g58670.1, by cDNA: 114412., supported by cDNA: gi_15293012 [Arabidopsis
  misc_feature (13)..(249): Homolog of NCBI NO: 18406030 NR Description: expressed protein; protein id: At2g42670.1, by cDNA: 113423. [Arabidopsis thaliana] expressed protein [Arabidopsis thaliana]
  misc_feature (12)..(249): Homolog of NCBI NO: 38345647 NR Description: OSJNBb0040D15.1 [Oryza sativa (japonica
  misc_feature (13)..(249): Homolog of NCBI NO: 25370572 NR Description: hypothetical protein At2g42670 [imported] -
  misc_feature (13)..(249): Homolog of NCBI NO: 21536850 NR Description: unknown [Arabidopsis thaliana]
  misc_feature (7)..(249): Homolog of NCBI NO: 15242218 NR Description: putative protein; protein id: At5g15120.1
  misc_feature (1)..(248): Homolog of NCBI NO: 34906308 NR Description: unnamed protein product [Oryza sativa (japonica group)] >gi|9558428|dbj|BAB03364.1| unnamed protein product
  misc_feature (12)..(249): Homolog of NCBI NO: 10176982 NR Description: contains similarity to unknown
  misc_feature (12)..(249): Homolog of NCBI NO: 15242505 NR Description: putative protein; protein id: At5g39890.1, by cDNA: 100590. [Arabidopsis thaliana] unknown [Arabidopsis thaliana] >gi|27808558|gb|AAO24559.1|
  misc_feature (1)..(250): Homolog of NCBI NO: 18394617 NR Description: expressed protein; protein id: At1g18490.1,
MPPASTDANNAIQKLYEVCRASLSEKGPLSPPDYSLDNVRAALDMVTPSDVGLEREAGAVRAWRSPRAALGRKRIFHSSPAIRYRHIYECASFSIGMFCMPASSIIPLHNHPGMTVLGKVLYGAAHVRSYRWIESAGSSINLSKARPAKVVRDGEMSAPCGAMVLRPEEGGDVHALRAITPCAVLHILTPPYSSQDGRHCSYFRRRPRSHPSGVLLNRTGGSEFVWLEEYQPRHNFIIRRDLYTGPALKL

SEQ ID NO: 5346 - protein, 206 aa, Zea mays subsp. mays
  peptide (1)..(206): Ceres Seq. ID no. 12387079
  misc_feature (1)..(205): Homolog of NCBI NO: 15231104 NR Description: putative protein; protein id: At3g58670.1, by cDNA: 114412., supported by cDNA: gi_15293012 [Arabidopsis
  misc_feature (1)..(205): Homolog of NCBI NO: 18406030 NR Description: expressed protein; protein id: At2g42670.1, by cDNA: 113423. [Arabidopsis thaliana] expressed protein [Arabidopsis thaliana]
  misc_feature (1)..(205): Homolog of NCBI NO: 38345647 NR Description: OSJNBb0040D15.1 [Oryza sativa (japonica
  misc_feature (1)..(205): Homolog of NCBI NO: 25370572 NR Description: hypothetical protein At2g42670 [imported] -
  misc_feature (1)..(205): Homolog of NCBI NO: 21536850 NR Description: unknown [Arabidopsis thaliana]
  misc_feature (1)..(205): Homolog of NCBI NO: 15242218 NR Description: putative protein; protein id: At5g15120.1
  misc_feature (1)..(204): Homolog of NCBI NO: 34906308 NR Description: unnamed protein product [Oryza sativa (japonica group)] >gi|9558428|dbj|BAB03364.1| unnamed protein product
  misc_feature (1)..(205): Homolog of NCBI NO: 10176982 NR Description: contains similarity to unknown
  misc_feature (1)..(205): Homolog of NCBI NO: 15242505 NR Description: putative protein; protein id: At5g39890.1, by cDNA: 100590. [Arabidopsis thaliana] unknown [Arabidopsis thaliana] >gi|27808558|gb|AAO24559.1|
  misc_feature (1)..(206): Homolog of NCBI NO: 18394617 NR Description: expressed protein; protein id: At1g18490.1,
MVTPSDVGLEREAGAVRAWRSPRAALGRKRIFHSSPAIRYRHIYECASFSIGMFCMPASSIIPLHNHPGMTVLGKVLYGAAHVRSYRWIESAGSSINLSKARPAKVVRDGEMSAPCGAMVLRPEEGGDVHALRAITPCAVLHILTPPYSSQDGRHCSYFRRRPRSHPSGVLLNRTGGSEFVWLEEYQPRHNFIIRRDLYTGPALKL

SEQ ID NO: 5347 - protein, 154 aa, Zea mays subsp. mays
  peptide (1)..(154): Ceres Seq. ID no. 12387080
  misc_feature (1)..(153): Homolog of NCBI NO: 15231104 NR Description: putative protein; protein id: At3g58670.1, by cDNA: 114412., supported by cDNA: gi_15293012 [Arabidopsis
  misc_feature (1)..(153): Homolog of NCBI NO: 18406030 NR Description: expressed protein; protein id: At2g42670.1, by cDNA: 113423. [Arabidopsis thaliana] expressed protein [Arabidopsis thaliana]
  misc_feature (1)..(153): Homolog of NCBI NO: 38345647 NR Description: OSJNBb0040D15.1 [Oryza sativa (japonica
  misc_feature (1)..(153): Homolog of NCBI NO: 25370572 NR Description: hypothetical protein At2g42670 [imported] -
  misc_feature (1)..(153): Homolog of NCBI NO: 21536850 NR Description: unknown [Arabidopsis thaliana]
  misc_feature (1)..(153): Homolog of NCBI NO: 15242218 NR Description: putative protein; protein id: At5g15120.1
  misc_feature (1)..(152): Homolog of NCBI NO: 34906308 NR Description: unnamed protein product [Oryza sativa (japonica group)] >gi|9558428|dbj|BAB03364.1| unnamed protein product
  misc_feature (1)..(153): Homolog of NCBI NO: 10176982 NR Description: contains similarity to unknown
  misc_feature (1)..(153): Homolog of NCBI NO: 15242505 NR Description: putative protein; protein id: At5g39890.1, by cDNA: 100590. [Arabidopsis thaliana] unknown [Arabidopsis thaliana] >gi|27808558|gb|AAO24559.1|
  misc_feature (1)..(154): Homolog of NCBI NO: 18394617 NR Description: expressed protein; protein id: At1g18490.1,
MFCMPASSIIPLHNHPGMTVLGKVLYGAAHVRSYRWIESAGSSINLSKARPAKVVRDGEMSAPCGAMVLRPEEGGDVHALRAITPCAVLHILTPPYSSQDGRHCSYFRRRPRSHPSGVLLNRTGGSEFVWLEEYQPRHNFIIRRDLYTGPALKL

SEQ ID NO: 5348 - DNA, 871 bp, Zea mays subsp. mays
  misc_feature (1)..(871): Ceres Seq. ID no. 12413307
  misc_feature: MA Experiment ID: 108527 Result: Down-regulated in Transcription
  misc_feature: MA Experiment 108527 PARAMETER Experiment Name: Zm_5mM_NO_P Parameter: Age (day) Value: 8
  misc_feature: MA Experiment 108527 PARAMETER Experiment Name: Zm_5mM_NO_P Parameter: Organism Value: Zea mays
  misc_feature: MA Experiment 108527 PARAMETER Experiment Name: Zm_5mM_NO_P Parameter: Plant Line Value: 35A19
  misc_feature: MA Experiment 108527 PARAMETER Experiment Name: Zm_5mM_NO_P Parameter: Timepoint (hr) Value: 6
  misc_feature: MA Experiment 108527 PARAMETER Experiment Name: Zm_5mM_NO_P Parameter: Tissue Value: Aerial
  misc_feature: MA Experiment 108527 PARAMETER Experiment Name: Zm_5mM_NO_P Parameter: Treatment Value: 5mM NO vs. No Treatment
  misc_feature: MA Experiment ID: 108535 Result: Down-regulated in Transcription
  misc_feature: MA Experiment 108535 PARAMETER Experiment Name: Zm_Meristem_P Parameter: Age (day) Value: 8
  misc_feature: MA Experiment 108535 PARAMETER Experiment Name: Zm_Meristem_P Parameter: Organism Value: Zea mays
  misc_feature: MA Experiment 108535 PARAMETER Experiment Name: Zm_Meristem_P Parameter: Plant Line Value: 35A19
  misc_feature: MA Experiment 108535 PARAMETER Experiment Name: Zm_Meristem_P Parameter: Tissue Value: Root Meristem vs. Above Root Meristem
  misc_feature: MA Experiment ID: 108543 Result: Up-regulated in Transcription
  misc_feature: MA Experiment ID: 108556 Result: Down-regulated in Transcription
  misc_feature: MA Experiment 108556 PARAMETER Experiment Name: Zm_Drought_P Parameter: Age (day) Value: 9
  misc_feature: MA Experiment 108556 PARAMETER Experiment Name: Zm_Drought_P Parameter: Organism Value: Zea mays
  misc_feature: MA Experiment 108556 PARAMETER Experiment Name: Zm_Drought_P Parameter: Plant Line Value: 35A19
  misc_feature: MA Experiment 108556 PARAMETER Experiment Name: Zm_Drought_P Parameter: Timepoint (hr) Value: 24
  misc_feature: MA Experiment 108556 PARAMETER Experiment Name: Zm_Drought_P Parameter: Tissue Value: Aerial
  misc_feature: MA Experiment 108556 PARAMETER Experiment Name: Zm_Drought_P Parameter: Treatment Value: Drought vs. No Drought
  misc_feature: MA Experiment ID: 20000108 Result: Down-regulated in Transcription
  misc_feature: MA Experiment 20000108 PARAMETER Experiment Name: Zm_Root-Tips_P Parameter: Age (day) Value: 12
  misc_feature: MA Experiment 20000108 PARAMETER Experiment Name: Zm_Root-Tips_P Parameter: Organism Value: Zea mays
  misc_feature: MA Experiment 20000108 PARAMETER Experiment Name: Zm_Root-Tips_P Parameter: Tissue Value: Root tips vs. Root mid region    35
  misc_feature: MA Experiment 20000108 PARAMETER Experiment Name: Zm_Root-Tips_P Parameter: Tissue Value: Root tips vs. Root mid region   Sequence Listing-Misc Features (4)
  misc_feature: MA Experiment ID: 20000479 Result: Down-regulated in Transcription
  misc_feature: MA Experiment 20000479 PARAMETER Experiment Name: Zm_Drought_P Parameter: Age (day) Value: 10
  misc_feature: MA Experiment 20000479 PARAMETER Experiment Name: Zm_Drought_P Parameter: Organism Value: Zea mays
  misc_feature: MA Experiment 20000479 PARAMETER Experiment Name: Zm_Drought_P Parameter: Plant Line Value: 35A19
  misc_feature: MA Experiment 20000479 PARAMETER Experiment Name: Zm_Drought_P Parameter: Timepoint (hr) Value: 48
  misc_feature: MA Experiment 20000479 PARAMETER Experiment Name: Zm_Drought_P Parameter: Tissue Value: Aerial
  misc_feature: MA Experiment 20000479 PARAMETER Experiment Name: Zm_Drought_P Parameter: Treatment Value: Drought vs. No Drought
  misc_feature: MA Experiment ID: 20000535 Result: Down-regulated in Transcription
  misc_feature: MA Experiment 20000535 PARAMETER Experiment Name: Zm_Hybrid_Seed_Dev_P Parameter: DAP Value: 30 vs. 12
  misc_feature: MA Experiment 20000535 PARAMETER Experiment Name: Zm_Hybrid_Seed_Dev_P Parameter: Organism Value: Zea mays
  misc_feature: MA Experiment 20000535 PARAMETER Experiment Name: Zm_Hybrid_Seed_Dev_P Parameter: Plant Line Value: 35A19
  misc_feature: MA Experiment 20000535 PARAMETER Experiment Name: Zm_Hybrid_Seed_Dev_P Parameter: Tissue Value: Embryo vs. Unfert Floret
ataattattatcgtttttgggacaggccggcaaggaagcgtaaagggtagggcggtggttggtgacagcagcaggcctccttcctcctcgctcgcggcgcctccgcctatacctgttgcggcaggcaacaaggcaggcaggcagcagcggagtgccttggtgatctacgaagaggatggattccaggatctcgctcctctgcgccctcgtcctcgcctcctccctcctgcactgcgccagatccgacggcaatgacgcgcagctcctcaagggcatcaacagctacaggtcctcgctcaaggtccccggcgctggccgagaacaagaacgcggcgtgcctggccgagcagctcgcgagacagttcaaggggcaggagtgcaccaacacgacgggcgccaacaccgtcatcggcaccgagcagcagttcccggactaccccaggtacctggaccgctgccacctcaacgcgtcggtgaccgaggacggccaggtgatgccggcgtgcgtgccgggcctcgtccccgccgtcgtcctcgccaactacaccaagtcgcagtacaaccggttcctcaacgacagccagttctccggcgccgggatcgcgagcgagggcgactgggtcgtggtcgtgctcagcaccagcacgggatccggcgactactcgccggctccgccgggctccaactgggcggtctcggcagctcggccgttcggcttcggccagctggtccttttgttggtggggtttgtagttttgctggtgaaatgatgagtgtttagtacgcatgcaccaacatcttcgtggcttatgttgtcacgttcaggtctcgttggctttattaagctttttttcacttgaaaagattgatt

SEQ ID NO: 5349 - protein, 201 aa, Zea mays subsp. mays
  peptide (1)..(201): Ceres Seq. ID no. 12413308
  misc_feature (1)..(44): Homolog of NCBI NO: 34904816 NR Description: contains ESTs to Arabidopsis thaliana AY088405.1~unknown protein [Oryza sativa
MDSRISLLCALVLASSLLHCARSDGNDAQLLKGINSYRSSLKVPGAGREQERGVPGRAARETVQGAGVHQHDGRQHRHRHRAAVPGLPQVPGPLPPQRVGDRGRPGDAGVRAGPRPRRRPRQLHQVAVQPVPQRQPVLRRRDRERGRLGRGRAQHQHGIRRLLAGSAGLQLGGLGSSAVRLRPAGPFVGGVCSFAGEMMSV

SEQ ID NO: 5350 - protein, 172 aa, Zea mays subsp. mays
  peptide (1)..(172): Ceres Seq. ID no. 12413309
  misc_feature (19)..(171): Homolog of NCBI NO: 34904816 NR Description: contains ESTs to Arabidopsis thaliana AY088405.1~unknown protein [Oryza sativa
  misc_feature (21)..(167): Homolog of NCBI NO: 18397452 NR Description: Expressed protein; protein id: At3g06035.1,
  misc_feature (21)..(167): Homolog of NCBI NO: 21594024 NR Description: unknown [Arabidopsis thaliana]
  misc_feature (21)..(160): Homolog of NCBI NO: 15239687 NR Description: putative protein; protein id: At5g19250.1
  misc_feature (17)..(169): Homolog of NCBI NO: 18405086 NR Description: expressed protein; protein id: At1g54860.1, by cDNA: 1530. [Arabidopsis thaliana] >gi|3776578|gb|AAC64895.1| gb|F13915 and gb|F13916 come from this gene. [Arabidopsis
  misc_feature (21)..(154): Homolog of NCBI NO: 15239686 NR Description: putative protein; protein id: At5g19240.1
  misc_feature (21)..(154): Homolog of NCBI NO: 24417436 NR Description: unknown [Arabidopsis thaliana]
  misc_feature (21)..(154): Homolog of NCBI NO: 34395876 NR Description: Putative GPI-anchored protein At5g19240 precursor
  misc_feature (21)..(160): Homolog of NCBI NO: 15239685 NR Description: putative protein; protein id: At5g19230.1 thaliana] >gi|27311585|gb|AAO00758.1| putative protein
  misc_feature (21)..(79): Homolog of NCBI NO: 24417290 NR Description: unknown [Arabidopsis thaliana]
MTRSSSRASTATGPRSRSPALAENKNAACLAEQLARQFKGQECTNTTGANTVIGTEQQFPDYPRYLDRCHLNASVTEDGQVMPACVPGLVPAVVLANYTKSQYNRFLNDSQFSGAGIASEGDWVVVVLSTSTGSGDYSPAPPGSNWAVSAARPFGFGQLVLLLVGFVVLLVK

SEQ ID NO: 5351 - DNA, 1664 bp, Zea mays subsp. mays
  misc_feature (1)..(1664): Ceres Seq. ID no. 12406665
  misc_feature: MA Experiment ID: 108534 Result: Up-regulated in Transcription
  misc_feature: MA Experiment 108534 PARAMETER Experiment Name: Zm_4deg_Cold_P Parameter: Age (hr) Value: 8
  misc_feature: MA Experiment 108534 PARAMETER Experiment Name: Zm_4deg_Cold_P Parameter: Organism Value: Zea mays
  misc_feature: MA Experiment 108534 PARAMETER Experiment Name: Zm_4deg_Cold_P Parameter: Plant Line Value: 35A19
  misc_feature: MA Experiment 108534 PARAMETER Experiment Name: Zm_4deg_Cold_P Parameter: Temperature (deg C) Value: 4 vs. 22
  misc_feature: MA Experiment 108534 PARAMETER Experiment Name: Zm_4deg_Cold_P Parameter: Timepoint (hr) Value: 6
  misc_feature: MA Experiment 108534 PARAMETER Experiment Name: Zm_4deg_Cold_P Parameter: Tissue Value: Aerial
  misc_feature: MA Experiment ID: 108535 Result: Down-regulated in Transcription
  misc_feature: MA Experiment 108535 PARAMETER Experiment Name: Zm_Meristem_P Parameter: Age (day) Value: 8
  misc_feature: MA Experiment 108535 PARAMETER Experiment Name: Zm_Meristem_P Parameter: Organism Value: Zea mays
  misc_feature: MA Experiment 108535 PARAMETER Experiment Name: Zm_Meristem_P Parameter: Plant Line Value: 35A19
  misc_feature: MA Experiment 108535 PARAMETER Experiment Name: Zm_Meristem_P Parameter: Tissue Value: Root Meristem vs. Above Root Meristem
  misc_feature: MA Experiment ID: 108543 Result: Up-regulated in Transcription
  misc_feature: MA Experiment ID: 108546 Result: Up-regulated in Transcription
  misc_feature: MA Experiment 108546 PARAMETER Experiment Name: Zm_Imbibed_Seeds_P Parameter: Age (day) Value: 3 vs. 2
  misc_feature: MA Experiment 108546 PARAMETER Experiment Name: Zm_Imbibed_Seeds_P Parameter: Organism Value: Zea mays
  misc_feature: MA Experiment 108546 PARAMETER Experiment Name: Zm_Imbibed_Seeds_P Parameter: Plant Line Value: 35A19
  misc_feature: MA Experiment 108546 PARAMETER Experiment Name: Zm_Imbibed_Seeds_P Parameter: Tissue Value: Roots vs. Embryo
  misc_feature: MA Experiment ID: 20000477 Result: Down-regulated in Transcription
  misc_feature: MA Experiment 20000477 PARAMETER Experiment Name: Zm_5mM_SA_P Parameter: Age (day) Value: 10
  misc_feature: MA Experiment 20000477 PARAMETER Experiment Name: Zm_5mM_SA_P Parameter: Organism Value: Zea mays
  misc_feature: MA Experiment 20000477 PARAMETER Experiment Name: Zm_5mM_SA_P Parameter: Plant Line Value: 35A19
  misc_feature: MA Experiment 20000477 PARAMETER Experiment Name: Zm_5mM_SA_P Parameter: Timepoint (hr) Value: 48
  misc_feature: MA Experiment 20000477 PARAMETER Experiment Name: Zm_5mM_SA_P Parameter: Tissue Value: Aerial
  misc_feature: MA Experiment 20000477 PARAMETER Experiment Name: Zm_5mM_SA_P Parameter: Treatment Value: 5mM SA vs. No Treatment
  misc_feature: MA Experiment ID: 20000535 Result: Down-regulated in Transcription
  misc_feature: MA Experiment 20000535 PARAMETER Experiment Name: Zm_Hybrid_Seed_Dev_P Parameter: DAP Value: 30 vs. 12
  misc_feature: MA Experiment 20000535 PARAMETER Experiment Name: Zm_Hybrid_Seed_Dev_P Parameter: Organism Value: Zea mays
  misc_feature: MA Experiment 20000535 PARAMETER Experiment Name: Zm_Hybrid_Seed_Dev_P Parameter: Plant Line Value: 35A19
  misc_feature: MA Experiment 20000535 PARAMETER Experiment Name: Zm_Hybrid_Seed_Dev_P Parameter: Tissue Value: Embryo vs. Unfert Floret
  misc_feature: MA Experiment ID: 20001608 Result: Down-regulated in Transcription
  misc_feature: MA Experiment 20001608 PARAMETER Experiment Name: Zm_50ppm_KNO3_L-to-H_P Parameter: Age (day) Value: 21
  misc_feature: MA Experiment 20001608 PARAMETER Experiment Name: Zm_50ppm_KNO3_L-to-H_P Parameter: Organism Value: Zea mays
  misc_feature: MA Experiment 20001608 PARAMETER Experiment Name: Zm_50ppm_KNO3_L-to-H_P Parameter: Plant Line Value: 35A19
  misc_feature: MA Experiment 20001608 PARAMETER Experiment Name: Zm_50ppm_KNO3_L-to-H_P Parameter: Timepoint (hr) Value: 48
  misc_feature: MA Experiment 20001608 PARAMETER Experiment Name: Zm_50ppm_KNO3_L-to-H_P Parameter: Tissue Value: Shoots
  misc_feature: MA Experiment 20001608 PARAMETER Experiment Name: Zm_50ppm_KNO3_L-to-H_P Parameter: Treatment Value: 50ppm KNO3 vs. 50ppm KCl
atttccccaatcgagagtccgagacccgagaggaggcacaggcacctgcgctagctgcagctgcaaatcgtcttccccagatccggcgccgcctagttcgctcctgctcgcgacagcgcccagagccgtccgcgtgcgcccgcagagatcgtttcggggacagccgagcagagcagagcagagcagagctgactctgccgcttgttgcccgttcttggctgctgttgctggcgagagcgcgcaggaggagcggctgatttttgattctctctgtccctccctccctcgcttcgctcgcgcggggtgcgtgcacgtaccatgagaagatgatgcgcgccaggcccaaaggtacattcgccgacgcgatgagggagagctcccctcctcctcctccccctccggctccggcttcggcagcggtgaaagaggacgagtgggaggtgcggcccggcgggatgctggtgcagaagcggagccccgacgccgacgcccccgccggggcgcccgtccccaccatccgcgtcaaggtcaagttcaacggcgtgtaccacgagatctacatcaactcccaggcctccttcggtgagctgaagaagatgctgtcggcgcggaccgggctgcaccccgaggaccagaagctggtgtacaaggacaaggagcgggactccaaggcgttcctggacatggccggcgtcaaggaccgctccaagatggtgctgctcgaggaccccgccgcgcaggccaagcgcctcctcgagcagcgccgcaccgacaaggcggagcgcgccgccaagtccatctcccgcatcggcctcgacgtcgacaagctcgccaccaaggtgtcggcgctggaggccatcgtcagcaagggcggcaaggtggtggacgctgacgtggtcgccctcaccgaggcgctcatgaacgagctggtcaagctggactccatcgccgccgacggcgaagtcaaggtgcagcgacgaatgcaggagaagcgggtgcagaagtacgtggagacgctggacgctatccgcgccaagaacgcggcggcgcccaaggccaaggccaaggccaacggcgacatgaatgggcacgccaaggcccgcgcgccgcaactcccgccgcgcccgccgcccgtgtcgcagaggcggaacttccagcagccctccccggcgccagcgccgcccacgcagggctgggagtcgttcgacctgctgtcgtcggtgccgtccacgtcctcggccaccgtgaccaccaccatggcggccgcgaccaccaccacctcgccggccggcgtctccccgatcccgcggttcgactgggagctcttctgaagccctccctcctcgcggcgcgtcggcgtgccggttggtcgatcagacggtacctacctcccttgtccatggatcttccctgctctcatcagtagtgccattgtttcttctgtggattctttccatttcttttcgcctcattctctcttcttttcttccatttcctttcgaatttgtatatctactatatgtctacaaaaagaacagagagaccgacgcggtgcggtgagtgtgttcactgggtcaaaagtccgtcagttgacaactcctcctcgtgaggatccatccatgcatgttgttcagtcacagcaaataagtggtggtcttattatg

SEQ ID NO: 5352 - protein, 334 aa, Zea mays subsp. mays
  peptide (1)..(334): Ceres Seq. ID no. 12406666
  misc_feature (62)..(135): Pfam Name: Ubiquitin family Pfam Description: Ubiquitin family
  misc_feature (1)..(334): Homolog of NCBI NO: 25553557 NR Description: OSJNBa0038F22.4 [Oryza sativa (japonica
  misc_feature (18)..(334): Homolog of NCBI NO: 34898024 NR Description: ESTs AU082174(S13676),AU032395(R3986) correspond a region of the predicted gene.~Similar to Arabidopsis thaliana
  misc_feature (38)..(334): Homolog of NCBI NO: 15242267 NR Description: putative protein; protein id: At5g52060.1 thaliana] >gi|10177741|dbj|BAB11054.1| contains similarity to
  misc_feature (25)..(334): Homolog of NCBI NO: 21537107 NR Description: unknown [Arabidopsis thaliana]
  misc_feature (25)..(334): Homolog of NCBI NO: 15240726 NR Description: putative protein; protein id: At5g07220.1, by cDNA: 12022., supported by cDNA: gi_16226482 [Arabidopsis
  misc_feature (34)..(304): Homolog of NCBI NO: 30697630 NR Description: BAG domain containing protein [Arabidopsis
  misc_feature (34)..(334): Homolog of NCBI NO: 21553443 NR Description: unknown [Arabidopsis thaliana]
  misc_feature (34)..(334): Homolog of NCBI NO: 30697627 NR Description: BAG domain containing protein [Arabidopsis
  misc_feature (34)..(304): Homolog of NCBI NO: 10176928 NR Description: contains similarity to unknown
  misc_feature (97)..(238): Homolog of NCBI NO: 10334497 NR Description: hypothetical protein [Cicer arietinum]
MMRARPKGTFADAMRESSPPPPPPPAPASAAVKEDEWEVRPGGMLVQKRSPDADAPAGAPVPTIRVKVKFNGVYHEIYINSQASFGELKKMLSARTGLHPEDQKLVYKDKERDSKAFLDMAGVKDRSKMVLLEDPAAQAKRLLEQRRTDKAERAAKSISRIGLDVDKLATKVSALEAIVSKGGKVVDADVVALTEALMNELVKLDSIAADGEVKVQRRMQEKRVQKYVETLDAIRAKNAAAPKAKAKANGDMNGHAKARAPQLPPRPPPVSQRRNFQQPSPAPAPPTQGWESFDLLSSVPSTSSATVTTTMAAATTTTSPAGVSPIPRFDWELF

SEQ ID NO: 5353 - protein, 333 aa, Zea mays subsp. mays
  peptide (1)..(333): Ceres Seq. ID no. 12406667
  misc_feature (61)..(134): Pfam Name: Ubiquitin family Pfam Description: Ubiquitin family
  misc_feature (1)..(333): Homolog of NCBI NO: 25553557 NR Description: OSJNBa0038F22.4 [Oryza sativa (japonica
  misc_feature (17)..(333): Homolog of NCBI NO: 34898024 NR Description: ESTs AU082174(S13676),AU032395(R3986) correspond a region of the predicted gene.~Similar to Arabidopsis thaliana
  misc_feature (37)..(333): Homolog of NCBI NO: 15242267 NR Description: putative protein; protein id: At5g52060.1 thaliana] >gi|10177741|dbj|BAB11054.1| contains similarity to
  misc_feature (24)..(333): Homolog of NCBI NO: 21537107 NR Description: unknown [Arabidopsis thaliana]
  misc_feature (24)..(333): Homolog of NCBI NO: 15240726 NR Description: putative protein; protein id: At5g07220.1, by cDNA: 12022., supported by cDNA: gi_16226482 [Arabidopsis
  misc_feature (33)..(303): Homolog of NCBI NO: 30697630 NR Description: BAG domain containing protein [Arabidopsis
  misc_feature (33)..(333): Homolog of NCBI NO: 21553443 NR Description: unknown [Arabidopsis thaliana]
  misc_feature (33)..(333): Homolog of NCBI NO: 30697627 NR Description: BAG domain containing protein [Arabidopsis
  misc_feature (33)..(303): Homolog of NCBI NO: 10176928 NR Description: contains similarity to unknown
  misc_feature (96)..(237): Homolog of NCBI NO: 10334497 NR Description: hypothetical protein [Cicer arietinum]
MRARPKGTFADAMRESSPPPPPPPAPASAAVKEDEWEVRPGGMLVQKRSPDADAPAGAPVPTIRVKVKFNGVYHEIYINSQASFGELKKMLSARTGLHPEDQKLVYKDKERDSKAFLDMAGVKDRSKMVLLEDPAAQAKRLLEQRRTDKAERAAKSISRIGLDVDKLATKVSALEAIVSKGGKVVDADVVALTEALMNELVKLDSIAADGEVKVQRRMQEKRVQKYVETLDAIRAKNAAAPKAKAKANGDMNGHAKARAPQLPPRPPPVSQRRNFQQPSPAPAPPTQGWESFDLLSSVPSTSSATVTTTMAAATTTTSPAGVSPIPRFDWELF

SEQ ID NO: 5354 - protein, 321 aa, Zea mays subsp. mays
  peptide (1)..(321): Ceres Seq. ID no. 12406668
  misc_feature (49)..(122): Pfam Name: Ubiquitin family Pfam Description: Ubiquitin family
  misc_feature (1)..(321): Homolog of NCBI NO: 25553557 NR Description: OSJNBa0038F22.4 [Oryza sativa (japonica
  misc_feature (5)..(321): Homolog of NCBI NO: 34898024 NR Description: ESTs AU082174(S13676),AU032395(R3986) correspond a region of the predicted gene.~Similar to Arabidopsis thaliana
  misc_feature (25)..(321): Homolog of NCBI NO: 15242267 NR Description: putative protein; protein id: At5g52060.1 thaliana] >gi|10177741|dbj|BAB11054.1| contains similarity to
  misc_feature (12)..(321): Homolog of NCBI NO: 21537107 NR Description: unknown [Arabidopsis thaliana]
  misc_feature (12)..(321): Homolog of NCBI NO: 15240726 NR Description: putative protein; protein id: At5g07220.1, by cDNA: 12022., supported by cDNA: gi_16226482 [Arabidopsis
  misc_feature (21)..(291): Homolog of NCBI NO: 30697630 NR Description: BAG domain containing protein [Arabidopsis
  misc_feature (21)..(321): Homolog of NCBI NO: 21553443 NR Description: unknown [Arabidopsis thaliana]
  misc_feature (21)..(321): Homolog of NCBI NO: 30697627 NR Description: BAG domain containing protein [Arabidopsis
  misc_feature (21)..(291): Homolog of NCBI NO: 10176928 NR Description: contains similarity to unknown
  misc_feature (84)..(225): Homolog of NCBI NO: 10334497 NR Description: hypothetical protein [Cicer arietinum]
MRESSPPPPPPPAPASAAVKEDEWEVRPGGMLVQKRSPDADAPAGAPVPTIRVKVKFNGVYHEIYINSQASFGELKKMLSARTGLHPEDQKLVYKDKERDSKAFLDMAGVKDRSKMVLLEDPAAQAKRLLEQRRTDKAERAAKSISRIGLDVDKLATKVSALEAIVSKGGKVVDADVVALTEALMNELVKLDSIAADGEVKVQRRMQEKRVQKYVETLDAIRAKNAAAPKAKAKANGDMNGHAKARAPQLPPRPPPVSQRRNFQQPSPAPAPPTQGWESFDLLSSVPSTSSATVTTTMAAATTTTSPAGVSPIPRFDWELF

SEQ ID NO: 5355 - DNA, 1337 bp, Zea mays subsp. mays
  misc_feature (1)..(1337): Ceres Seq. ID no. 12352345
  misc_feature: MA Experiment ID: 108523 Result: Up-regulated in Transcription
  misc_feature: MA Experiment 108523 PARAMETER Experiment Name: Zm_42deg_Heat_P Parameter: Age (day) Value: 8
  misc_feature: MA Experiment 108523 PARAMETER Experiment Name: Zm_42deg_Heat_P Parameter: Organism Value: Zea mays
  misc_feature: MA Experiment 108523 PARAMETER Experiment Name: Zm_42deg_Heat_P Parameter: Plant Line Value: 35A19
  misc_feature: MA Experiment 108523 PARAMETER Experiment Name: Zm_42deg_Heat_P Parameter: Temperature (deg C) Value: 42 vs. 22
  misc_feature: MA Experiment 108523 PARAMETER Experiment Name: Zm_42deg_Heat_P Parameter: Timepoint (hr) Value: 6
  misc_feature: MA Experiment 108523 PARAMETER Experiment Name: Zm_42deg_Heat_P Parameter: Tissue Value: Aerial
  misc_feature: MA Experiment ID: 108528 Result: Down-regulated in Transcription
  misc_feature: MA Experiment 108528 PARAMETER Experiment Name: Zm_Imbibed_Seeds_P Parameter: Age (day) Value: 5 vs. 2
  misc_feature: MA Experiment 108528 PARAMETER Experiment Name: Zm_Imbibed_Seeds_P Parameter: Organism Value: Zea mays
  misc_feature: MA Experiment 108528 PARAMETER Experiment Name: Zm_Imbibed_Seeds_P Parameter: Plant Line Value: 35A19
  misc_feature: MA Experiment 108528 PARAMETER Experiment Name: Zm_Imbibed_Seeds_P Parameter: Tissue Value: Aerial vs. Embryo
  misc_feature: MA Experiment ID: 108535 Result: Up-regulated in Transcription
  misc_feature: MA Experiment 108535 PARAMETER Experiment Name: Zm_Meristem_P Parameter: Age (day) Value: 8
  misc_feature: MA Experiment 108535 PARAMETER Experiment Name: Zm_Meristem_P Parameter: Organism Value: Zea mays
  misc_feature: MA Experiment 108535 PARAMETER Experiment Name: Zm_Meristem_P Parameter: Plant Line Value: 35A19
  misc_feature: MA Experiment 108535 PARAMETER Experiment Name: Zm_Meristem_P Parameter: Tissue Value: Root Meristem vs. Above Root Meristem
  misc_feature: MA Experiment ID: 20000534 Result: Down-regulated in Transcription
  misc_feature: MA Experiment 20000534 PARAMETER Experiment Name: Zm_Hybrid_Pollen_P Parameter: Age (day) Value: 8
  misc_feature: MA Experiment 20000534 PARAMETER Experiment Name: Zm_Hybrid_Pollen_P Parameter: Organism Value: Zea mays
  misc_feature: MA Experiment 20000534 PARAMETER Experiment Name: Zm_Hybrid_Pollen_P Parameter: Plant Line Value: 35A19
  misc_feature: MA Experiment 20000534 PARAMETER Experiment Name: Zm_Hybrid_Pollen_P Parameter: Tissue Value: Pollen vs. Aerial
atggagaagcttccttcagtgagtcctccctttccgtttaaggcagcaagcaggagcagacaggaggcgccgagagcccagcgtcggagatctccgccgccatggagacgctggccagcgccatgcggcgcgagaaccgccggtccaaggccccgccctcctcctctgcttcctccgccctcgcctcgggcagggtccctctcgtcatggccttcctctcctgcctcgcctggctctacgtcgccggccgtttgtggcaggacgcgcagacccgggcgatcctgtccggcctcctcgagaagagctctaccagcgtcccgaaggtgctctcggtggaggacaagcttaggaaccttgggtgcaaggcgattggaaggaaaattgttgaggcggagatggacctgaccaaggccaagagcgaggggtacctgtgggggaacaggactgcagctgtggactccgacaagaagcagcaccttcttgccgtcattggagtttacactgggtttggctcccgtctcaagaggaacgtcttccgtggctcctggatgccaagaggtgatgctctgaagaagcttgaggaaaagggtgtagctattcgttttgttattggtcggagtgcaaatcgaggtgatagcttggaccgtaatattgatgatgaaaatcggcagacaaaggacttcttgattcttgaaagtcatgaagaggctgcagaagaattaccgagcaaagcaaaaattttcttcagtgctgcagttgaagcctgggatgcagaattttatgtcaaagttgaagataacattaatcttgacttagctgggttaattgagatgctcgaaggccgtcgaggtagccaaggattgtacatgggttgtatgaaatcagggatggtcataagtgaagagggccaacaatggtatgaacctgagtggtggaaatttggagattcaaaaacgtattttcgacacgcttctggttctttgtttatcctctcaaaaaatttggctcgctacatcaacataaatagtgcgtcactgcagagttatgcacacgatgatatatcagtaggttcatggatgatgggactgaatgcaacttacgtggatgatgaccggttgtgctgcagcagttccagacaagagaaaatctgttccaatgcttgagcggaaggcgtggctgctggcctgttgctgtacatcctgatgaagattttgcacacctgtcattttgtatacactgctttcgtgaaccggaaaaggctactatccagatagaaacggcttgcaccaaaatttaggaacttccatcaaaaagaaaaaaaaagaacaattttttcc

SEQ ID NO: 5356 - protein, 353 aa, Zea mays subsp. mays
  peptide (1)..(353): Ceres Seq. ID no. 12352346
  misc_feature (140)..(337): Pfam Name: Galactosyltransferase Pfam Description: Galactosyltransferase
  misc_feature (1)..(353): Homolog of NCBI NO: 34898462 NR Description: ESTs D47620(S13223),AU029621(E31157) correspond a region of the predicted gene.~Similar to Arabidopsis thaliana
  misc_feature (1)..(353): Homolog of NCBI NO: 15236681 NR Description: putative protein; protein id: At4g32120.1, by cDNA: gi_15292682, supported by cDNA: gi_21281128 [Arabidopsis >gi|15292683|gb|AAK92710.1| unknown protein [Arabidopsis
  misc_feature (1)..(346): Homolog of NCBI NO: 15224704 NR Description: unknown protein; protein id: At2g25300.1
  misc_feature (73)..(353): Homolog of NCBI NO: 26451702 NR Description: unknown protein [Arabidopsis thaliana]
  misc_feature (19)..(351): Homolog of NCBI NO: 40253477 NR Description: putative Avr9 elicitor response protein [Oryza
  misc_feature (12)..(353): Homolog of NCBI NO: 20372915 NR Description: beta 1,3-glycosyltransferase-like protein I
  misc_feature (34)..(343): Homolog of NCBI NO: 22553068 NR Description: beta 1,3-glycosyltransferase-like protein I
  misc_feature (23)..(351): Homolog of NCBI NO: 18423501 NR Description: Avr9 elicitor response protein-like; protein id: supported by cDNA: gi_14423409, supported by cDNA: gi_20148408 thaliana] >gi|14423410|gb|AAK62387.1|AF386942_1 Avr9 [Arabidopsis
  misc_feature (23)..(348): Homolog of NCBI NO: 9759181 NR Description: Avr9 elicitor response protein-like [Arabidopsis
  misc_feature (64)..(343): Homolog of NCBI NO: 15225684 NR Description: unknown protein; protein id: At2g32430.1
METLASAMRRENRRSKAPPSSSASSALASGRVPLVMAFLSCLAWLYVAGRLWQDAQTRAILSGLLEKSSTSVPKVLSVEDKLRNLGCKAIGRKIVEAEMDLTKAKSEGYLWGNRTAAVDSDKKQHLLAVIGVYTGFGSRLKRNVFRGSWMPRGDALKKLEEKGVAIRFVIGRSANRGDSLDRNIDDENRQTKDFLILESHEEAAEELPSKAKIFFSAAVEAWDAEFYVKVEDNINLDLAGLIEMLEGRRGSQGLYMGCMKSGMVISEEGQQWYEPEWWKFGDSKTYFRHASGSLFILSKNLARYININSASLQSYAHDDISVGSWMMGLNATYVDDDRLCCSSSRQEKICSNA

SEQ ID NO: 5357 - protein, 346 aa, Zea mays subsp. mays
  peptide (1)..(346): Ceres Seq. ID no. 12352347
  misc_feature (133)..(330): Pfam Name: Galactosyltransferase Pfam Description: Galactosyltransferase
  misc_feature (16)..(344): Homolog of NCBI NO: 18423501 NR Description: Avr9 elicitor response protein-like; protein id: supported by cDNA: gi_14423409, supported by cDNA: gi_20148408 thaliana] >gi|14423410|gb|AAK62387.1|AF386942_1 Avr9 [Arabidopsis
  misc_feature (16)..(341): Homolog of NCBI NO: 9759181 NR Description: Avr9 elicitor response protein-like [Arabidopsis
  misc_feature (1)..(346): Homolog of NCBI NO: 15236681 NR Description: putative protein; protein id: At4g32120.1, by cDNA: gi_15292682, supported by cDNA: gi_21281128 [Arabidopsis >gi|15292683|gb|AAK92710.1| unknown protein [Arabidopsis
  misc_feature (66)..(346): Homolog of NCBI NO: 26451702 NR Description: unknown protein [Arabidopsis thaliana]
  misc_feature (5)..(346): Homolog of NCBI NO: 20372915 NR Description: beta 1,3-glycosyltransferase-like protein I
  misc_feature (27)..(336): Homolog of NCBI NO: 22553068 NR Description: beta 1,3-glycosyltransferase-like protein I
  misc_feature (12)..(344): Homolog of NCBI NO: 40253477 NR Description: putative Avr9 elicitor response protein [Oryza
  misc_feature (1)..(339): Homolog of NCBI NO: 15224704 NR Description: unknown protein; protein id: At2g25300.1
  misc_feature (1)..(346): Homolog of NCBI NO: 34898462 NR Description: ESTs D47620(S13223),AU029621(E31157) correspond a region of the predicted gene.~Similar to Arabidopsis thaliana
  misc_feature (57)..(336): Homolog of NCBI NO: 15225684 NR Description: unknown protein; protein id: At2g32430.1
MRRENRRSKAPPSSSASSALASGRVPLVMAFLSCLAWLYVAGRLWQDAQTRAILSGLLEKSSTSVPKVLSVEDKLRNLGCKAIGRKIVEAEMDLTKAKSEGYLWGNRTAAVDSDKKQHLLAVIGVYTGFGSRLKRNVFRGSWMPRGDALKKLEEKGVAIRFVIGRSANRGDSLDRNIDDENRQTKDFLILESHEEAAEELPSKAKIFFSAAVEAWDAEFYVKVEDNINLDLAGLIEMLEGRRGSQGLYMGCMKSGMVISEEGQQWYEPEWWKFGDSKTYFRHASGSLFILSKNLARYININSASLQSYAHDDISVGSWMMGLNATYVDDDRLCCSSSRQEKICSNA

SEQ ID NO: 5358 - protein, 318 aa, Zea mays subsp. mays
  peptide (1)..(318): Ceres Seq. ID no. 12352348
  misc_feature (105)..(302): Pfam Name: Galactosyltransferase Pfam Description: Galactosyltransferase
  misc_feature (1)..(318): Homolog of NCBI NO: 34898462 NR Description: ESTs D47620(S13223),AU029621(E31157) correspond a region of the predicted gene.~Similar to Arabidopsis thaliana
  misc_feature (1)..(318): Homolog of NCBI NO: 15236681 NR Description: putative protein; protein id: At4g32120.1, by cDNA: gi_15292682, supported by cDNA: gi_21281128 [Arabidopsis >gi|15292683|gb|AAK92710.1| unknown protein [Arabidopsis
  misc_feature (1)..(311): Homolog of NCBI NO: 15224704 NR Description: unknown protein; protein id: At2g25300.1
  misc_feature (38)..(318): Homolog of NCBI NO: 26451702 NR Description: unknown protein [Arabidopsis thaliana]
  misc_feature (1)..(316): Homolog of NCBI NO: 40253477 NR Description: putative Avr9 elicitor response protein [Oryza
  misc_feature (1)..(318): Homolog of NCBI NO: 20372915 NR Description: beta 1,3-glycosyltransferase-like protein I
  misc_feature (1)..(308): Homolog of NCBI NO: 22553068 NR Description: beta 1,3-glycosyltransferase-like protein I
  misc_feature (1)..(316): Homolog of NCBI NO: 18423501 NR Description: Avr9 elicitor response protein-like; protein id: supported by cDNA: gi_14423409, supported by cDNA: gi_20148408 thaliana] >gi|14423410|gb|AAK62387.1|AF386942_1 Avr9 [Arabidopsis
  misc_feature (1)..(313): Homolog of NCBI NO: 9759181 NR Description: Avr9 elicitor response protein-like [Arabidopsis
  misc_feature (29)..(308): Homolog of NCBI NO: 15225684 NR Description: unknown protein; protein id: At2g32430.1
MAFLSCLAWLYVAGRLWQDAQTRAILSGLLEKSSTSVPKVLSVEDKLRNLGCKAIGRKIVEAEMDLTKAKSEGYLWGNRTAAVDSDKKQHLLAVIGVYTGFGSRLKRNVFRGSWMPRGDALKKLEEKGVAIRFVIGRSANRGDSLDRNIDDENRQTKDFLILESHEEAAEELPSKAKIFFSAAVEAWDAEFYVKVEDNINLDLAGLIEMLEGRRGSQGLYMGCMKSGMVISEEGQQWYEPEWWKFGDSKTYFRHASGSLFILSKNLARYININSASLQSYAHDDISVGSWMMGLNATYVDDDRLCCSSSRQEKICSNA

SEQ ID NO: 5359 - DNA, 1301 bp, Zea mays subsp. mays
  misc_feature (1)..(1301): Ceres Seq. ID no. 12365448
  misc_feature: MA Experiment ID: 108523 Result: Up-regulated in Transcription
  misc_feature: MA Experiment 108523 PARAMETER Experiment Name: Zm_42deg_Heat_P Parameter: Age (day) Value: 8
  misc_feature: MA Experiment 108523 PARAMETER Experiment Name: Zm_42deg_Heat_P Parameter: Organism Value: Zea mays
  misc_feature: MA Experiment 108523 PARAMETER Experiment Name: Zm_42deg_Heat_P Parameter: Plant Line Value: 35A19
  misc_feature: MA Experiment 108523 PARAMETER Experiment Name: Zm_42deg_Heat_P Parameter: Temperature (deg C) Value: 42 vs. 22
  misc_feature: MA Experiment 108523 PARAMETER Experiment Name: Zm_42deg_Heat_P Parameter: Timepoint (hr) Value: 6
  misc_feature: MA Experiment 108523 PARAMETER Experiment Name: Zm_42deg_Heat_P Parameter: Tissue Value: Aerial
  misc_feature: MA Experiment ID: 108545 Result: Up-regulated in Transcription
  misc_feature: MA Experiment 108545 PARAMETER Experiment Name: Zm_Imbibed_Seeds_P Parameter: Age (day) Value: 3 vs. 2
  misc_feature: MA Experiment 108545 PARAMETER Experiment Name: Zm_Imbibed_Seeds_P Parameter: Organism Value: Zea mays
  misc_feature: MA Experiment 108545 PARAMETER Experiment Name: Zm_Imbibed_Seeds_P Parameter: Plant Line Value: 35A19
  misc_feature: MA Experiment 108545 PARAMETER Experiment Name: Zm_Imbibed_Seeds_P Parameter: Tissue Value: Aerial vs. Embryo
  misc_feature: MA Experiment ID: 108547 Result: Up-regulated in Transcription
  misc_feature: MA Experiment 108547 PARAMETER Experiment Name: Zm_Imbibed_Seeds_P Parameter: Age (day) Value: 4 vs. 2
  misc_feature: MA Experiment 108547 PARAMETER Experiment Name: Zm_Imbibed_Seeds_P Parameter: Organism Value: Zea mays
  misc_feature: MA Experiment 108547 PARAMETER Experiment Name: Zm_Imbibed_Seeds_P Parameter: Plant Line Value: 35A19
  misc_feature: MA Experiment 108547 PARAMETER Experiment Name: Zm_Imbibed_Seeds_P Parameter: Tissue Value: Aerial vs. Embryo
  misc_feature: MA Experiment ID: 108689 Result: Down-regulated in Transcription
  misc_feature: MA Experiment 108689 PARAMETER Experiment Name: Zm_Drought_Roots_P Parameter: Age (day) Value: 9
  misc_feature: MA Experiment 108689 PARAMETER Experiment Name: Zm_Drought_Roots_P Parameter: Organism Value: Zea mays
  misc_feature: MA Experiment 108689 PARAMETER Experiment Name: Zm_Drought_Roots_P Parameter: Plant Line Value: 35A19
  misc_feature: MA Experiment 108689 PARAMETER Experiment Name: Zm_Drought_Roots_P Parameter: Timepoint (hr) Value: 24
  misc_feature: MA Experiment 108689 PARAMETER Experiment Name: Zm_Drought_Roots_P Parameter: Tissue Value: Roots
  misc_feature: MA Experiment 108689 PARAMETER Experiment Name: Zm_Drought_Roots_P Parameter: Treatment Value: Drought vs. No Drought
  misc_feature: MA Experiment ID: 20000488 Result: Up-regulated in Transcription
  misc_feature: MA Experiment 20000488 PARAMETER Experiment Name: Zm_50mM_NH4NO3_L_to_H_P Parameter: Organism Value: Zea mays
  misc_feature: MA Experiment 20000488 PARAMETER Experiment Name: Zm_50mM_NH4NO3_L_to_H_P Parameter: Timepoint (hr) Value: 8
  misc_feature: MA Experiment 20000488 PARAMETER Experiment Name: Zm_50mM_NH4NO3_L_to_H_P Parameter: Tissue Value: Leaves
  misc_feature: MA Experiment 20000488 PARAMETER Experiment Name: Zm_50mM_NH4NO3_L_to_H_P Parameter: Treatment Value: 50mM NH4NO3 vs. 100mM Mannitol
  misc_feature: MA Experiment ID: 20000492 Result: Up-regulated in Transcription
  misc_feature: MA Experiment 20000492 PARAMETER Experiment Name: Zm_Hybrid_Seed_Dev_P Parameter: DAP Value: 12
  misc_feature: MA Experiment 20000492 PARAMETER Experiment Name: Zm_Hybrid_Seed_Dev_P Parameter: Organism Value: Zea mays
  misc_feature: MA Experiment 20000492 PARAMETER Experiment Name: Zm_Hybrid_Seed_Dev_P Parameter: Plant Line Value: 35A19
  misc_feature: MA Experiment 20000492 PARAMETER Experiment Name: Zm_Hybrid_Seed_Dev_P Parameter: Tissue Value: Fert Kernel vs. Unfert Floret
agatagacctcgcccttggctcccatggcttccgggctccggcttcttctcctcgccgtcgcgtgagactgcgctaaaacctaggctttgagacaccaatggcctccgcgacggcgacggcgcccacattcgctctcgcatcgtccttctcgcgcggcggcttccttccgctccctcgtcacgccggccggcccatgcttcagtctctgcgactcgtcgcgtcagccgtgaagcggcggcgcggcgcggtcgtggtggcagcggacgcggcggcggcggccgggagcgcggagttcggcgacgaggagaacccgtatgagcttctgggcatcaggccgcttgatagcttcgatcacatgaaaatggcctacaagaagaagcgcaaggacgccgaggagactggagacgacgagttccttgccaagttggacagggcctatgacactgtcatgatgcagcagctgcagtatcggaagaagggagtcacatacgggtctgttcaggtgtccaaggatatcaagtatgctgacaatcaaccagtggtgccttggggaccaagattctcccgatcaacaatgaaggacatgcgcataaatatggcagtatcagcagcatttgttgtttggatagctattatgggcaatgcagactggaagcctttgcagttcctttgttttgctttcttctacagaatactacagaagctaagagctactgaaccaccaattactccaatatacaatgaatatggcgaggtcgaaggacgagggataagaatggcaaaaagagtagtccgtgctttgggtttgatatttggatgtgtgttcgctgcatccctgggttatacagcagctattaacttgatcgagctttcaatgcagtacactccccgccttgtttattactaccaggagctgattgttacggcggctacctccgttcttctgtgcatcacagcctcatactaccgatgaacacgacgacgagcagtgatggcctggctgaggcgattgtgagatagccgagaatccacaaattttgtagcatacttccaccagcacctgtcagctttgaggcagagagttcttagtgcaggatcatacatgaccacttgtggcacaatgcagatgaccaatggatgaaaaacatttggcgtgaatgcttcaacagcagtgttgtgtgtgtgcaatttttaattaggtcttggacatgttagacaacagggttagctgcaatgtgcatgtgctttgttttgcctcgatcaacgaatgaatgaaagtactagctgctgcttctttgct

SEQ ID NO: 5360 - protein, 291 aa, Zea mays subsp. mays
  peptide (1)..(291): Ceres Seq. ID no. 12365449
  misc_feature (71)..(132): Pfam Name: DnaJ domain Pfam Description: DnaJ domain
  misc_feature (1)..(291): Homolog of NCBI NO: 18390922 NR Description: expressed protein; protein id: At1g08640.1, by cDNA: 35718., supported by cDNA: gi_13877838, supported by gi_16323503 [Arabidopsis thaliana]
  misc_feature (1)..(291): Homolog of NCBI NO: 23397051 NR Description: unknown protein [Arabidopsis thaliana]
  misc_feature (2)..(153): Homolog of NCBI NO: 37535386 NR Description: unknown protein [Oryza sativa (japonica
  misc_feature (216)..(291): Homolog of NCBI NO: 37535386 NR Description: unknown protein [Oryza sativa (japonica
  misc_feature (1)..(291): Homolog of NCBI NO: 21593057 NR Description: unknown [Arabidopsis thaliana]
  misc_feature (1)..(269): Homolog of NCBI NO: 25341936 NR Description: protein F22O13.12 [imported] - Arabidopsis >gi|9802577|gb|AAF99779.1|AC003981_29 F22O13.12 [Arabidopsis
  misc_feature (33)..(269): Homolog of NCBI NO: 7485979 NR Description: hypothetical protein F22O13.12 - Arabidopsis
MASATATAPTFALASSFSRGGFLPLPRHAGRPMLQSLRLVASAVKRRRGAVVVAADAAAAAGSAEFGDEENPYELLGIRPLDSFDHMKMAYKKKRKDAEETGDDEFLAKLDRAYDTVMMQQLQYRKKGVTYGSVQVSKDIKYADNQPVVPWGPRFSRSTMKDMRINMAVSAAFVVWIAIMGNADWKPLQFLCFAFFYRILQKLRATEPPITPIYNEYGEVEGRGIRMAKRVVRALGLIFGCVFAASLGYTAAINLIELSMQYTPRLVYYYQELIVTAATSVLLCITASYYR

SEQ ID NO: 5361 - protein, 259 aa, Zea mays subsp. mays
  peptide (1)..(259): Ceres Seq. ID no. 12365450
  misc_feature (39)..(100): Pfam Name: DnaJ domain Pfam Description: DnaJ domain
  misc_feature (1)..(259): Homolog of NCBI NO: 18390922 NR Description: expressed protein; protein id: At1g08640.1, by cDNA: 35718., supported by cDNA: gi_13877838, supported by gi_16323503 [Arabidopsis thaliana]
  misc_feature (1)..(259): Homolog of NCBI NO: 23397051 NR Description: unknown protein [Arabidopsis thaliana]
  misc_feature (1)..(121): Homolog of NCBI NO: 37535386 NR Description: unknown protein [Oryza sativa (japonica
  misc_feature (184)..(259): Homolog of NCBI NO: 37535386 NR Description: unknown protein [Oryza sativa (japonica
  misc_feature (1)..(259): Homolog of NCBI NO: 21593057 NR Description: unknown [Arabidopsis thaliana]
  misc_feature (1)..(237): Homolog of NCBI NO: 25341936 NR Description: protein F22O13.12 [imported] - Arabidopsis >gi|9802577|gb|AAF99779.1|AC003981_29 F22O13.12 [Arabidopsis
  misc_feature (1)..(237): Homolog of NCBI NO: 7485979 NR Description: hypothetical protein F22O13.12 - Arabidopsis
MLQSLRLVASAVKRRRGAVVVAADAAAAAGSAEFGDEENPYELLGIRPLDSFDHMKMAYKKKRKDAEETGDDEFLAKLDRAYDTVMMQQLQYRKKGVTYGSVQVSKDIKYADNQPVVPWGPRFSRSTMKDMRINMAVSAAFVVWIAIMGNADWKPLQFLCFAFFYRILQKLRATEPPITPIYNEYGEVEGRGIRMAKRVVRALGLIFGCVFAASLGYTAAINLIELSMQYTPRLVYYYQELIVTAATSVLLCITASYYR

SEQ ID NO: 5362 - protein, 205 aa, Zea mays subsp. mays
  peptide (1)..(205): Ceres Seq. ID no. 12365451
  misc_feature (1)..(46): Pfam Name: DnaJ domain Pfam Description: DnaJ domain
  misc_feature (1)..(205): Homolog of NCBI NO: 18390922 NR Description: expressed protein; protein id: At1g08640.1, by cDNA: 35718., supported by cDNA: gi_13877838, supported by gi_16323503 [Arabidopsis thaliana]
  misc_feature (1)..(205): Homolog of NCBI NO: 23397051 NR Description: unknown protein [Arabidopsis thaliana]
  misc_feature (1)..(67): Homolog of NCBI NO: 37535386 NR Description: unknown protein [Oryza sativa (japonica
  misc_feature (130)..(205): Homolog of NCBI NO: 37535386 NR Description: unknown protein [Oryza sativa (japonica
  misc_feature (1)..(205): Homolog of NCBI NO: 21593057 NR Description: unknown [Arabidopsis thaliana]
  misc_feature (1)..(183): Homolog of NCBI NO: 25341936 NR Description: protein F22O13.12 [imported] - Arabidopsis >gi|9802577|gb|AAF99779.1|AC003981_29 F22O13.12 [Arabidopsis
  misc_feature (1)..(183): Homolog of NCBI NO: 7485979 NR Description: hypothetical protein F22O13.12 - Arabidopsis
MKMAYKKKRKDAEETGDDEFLAKLDRAYDTVMMQQLQYRKKGVTYGSVQVSKDIKYADNQPVVPWGPRFSRSTMKDMRINMAVSAAFVVWIAIMGNADWKPLQFLCFAFFYRILQKLRATEPPITPIYNEYGEVEGRGIRMAKRVVRALGLIFGCVFAASLGYTAAINLIELSMQYTPRLVYYYQELIVTAATSVLLCITASYYR

SEQ ID NO: 5363 - DNA, 1068 bp, Zea mays subsp. mays
  misc_feature (1)..(1068): Ceres Seq. ID no. 12365452
  misc_feature: MA Experiment ID: 108534 Result: Up-regulated in Transcription
  misc_feature: MA Experiment 108534 PARAMETER Experiment Name: Zm_4deg_Cold_P Parameter: Age (hr) Value: 8
  misc_feature: MA Experiment 108534 PARAMETER Experiment Name: Zm_4deg_Cold_P Parameter: Organism Value: Zea mays
  misc_feature: MA Experiment 108534 PARAMETER Experiment Name: Zm_4deg_Cold_P Parameter: Plant Line Value: 35A19
  misc_feature: MA Experiment 108534 PARAMETER Experiment Name: Zm_4deg_Cold_P Parameter: Temperature (deg C) Value: 4 vs. 22
  misc_feature: MA Experiment 108534 PARAMETER Experiment Name: Zm_4deg_Cold_P Parameter: Timepoint (hr) Value: 6
  misc_feature: MA Experiment 108534 PARAMETER Experiment Name: Zm_4deg_Cold_P Parameter: Tissue Value: Aerial
  misc_feature: MA Experiment ID: 20000535 Result: Down-regulated in Transcription
  misc_feature: MA Experiment 20000535 PARAMETER Experiment Name: Zm_Hybrid_Seed_Dev_P Parameter: DAP Value: 30 vs. 12
  misc_feature: MA Experiment 20000535 PARAMETER Experiment Name: Zm_Hybrid_Seed_Dev_P Parameter: Organism Value: Zea mays
  misc_feature: MA Experiment 20000535 PARAMETER Experiment Name: Zm_Hybrid_Seed_Dev_P Parameter: Plant Line Value: 35A19
  misc_feature: MA Experiment 20000535 PARAMETER Experiment Name: Zm_Hybrid_Seed_Dev_P Parameter: Tissue Value: Embryo vs. Unfert Floret
ctacccgatcggcccggtcctgcctctcaagccgccgtccgcgcccggcgacggcgagcaggtagtagcacagcggcacgagtgcgtgaggtggctcgacgcgcagcccccagcgtccgtcgtgctgctctgctttgggagcatgggcggcagcttcccgtcgccccaggtccgcgagatcgccgacggcctcgagcgcagcgggcaccgcttcctgtgggtgctccgtggcccgccaccgccggacggttccaagtacccgacggacgccaacgtccacgagctgctcccggaagggttcctggagaggacgaagggccgaggcctcgtgtggcccacgtgggcgccgcagaaggacatcctcgccaaccccgccgtcggcggcttcgtcacccactgcggctggaactccatcctcgagagcctgtggcacggcgtgccgatggtgccctggccgcagttcgcggagcagcacctgaacgcgttcgagctcgtgtccgtcatgggcgtcgccgttgccatgcaggtggacaggaagcgcggcaacttcgtcgaggcggcggagctggagcgcgcggtccggtgcctgatgggcgggtcggaggaggaggggaggaaggcgcgggagaaggcgacggaggcgaaggccctgagccagaacggcgtggccagcggcgggtcgtcggacgcgtcggtgcagaaactggcgcgagagattttgcacaagcacgacgacaaggggtgtgccaccgcaagcggggagagcatgggcagcgtcgtcgttcccgcatctccggccggaataatatgatcccccgaacacggagaaatcgccgtcgtccacgaataaatcggaggccgccatgcgatccgtctggcactgctcacgttgtttgacattgttcagaatcgccgtgtgcactgtagtttcttatccgcagtagcttttactattcgaaataatgtagcatagcaagcgctgcttcttcctaagtccgtgcagcgtagcccgcgtgttcgagctagtttgtgttaagttgaatgagttaatggatgctagttgtagcc

SEQ ID NO: 5364 - protein, 298 aa, Zea mays subsp. mays
  peptide (1)..(298): Ceres Seq. ID no. 12365453
  misc_feature (2)..(295): Homolog of NCBI NO: 29247944 NR Description: GLP_26_54603_52153 [Giardia lamblia ATCC 50803]
LPDRPGPASQAAVRARRRRAGSSTAARVREVARRAAPSVRRAALLWEHGRQLPVAPGPRDRRRPRAQRAPLPVGAPWPATAGRFQVPDGRQRPRAAPGRVPGEDEGPRPRVAHVGAAEGHPRQPRRRRLRHPLRLELHPREPVARRADGALAAVRGAAPERVRARVRHGRRRCHAGGQEARQLRRGGGAGARGPVPDGRVGGGGEEGAGEGDGGEGPEPERRGQRRVVGRVGAETGARDFAQARRQGVCHRKRGEHGQRRRSRISGRNNMIPRTRRNRRRPRINRRPPCDPSGTAHVV

SEQ ID NO: 5365 - protein, 269 aa, Zea mays subsp. mays
  peptide (1)..(269): Ceres Seq. ID no. 12365454
  misc_feature (24)..(240): Pfam Name: UDP-glucoronosyl and UDP-glucosyl transferase Pfam Description: UDP-glucoronosyl and UDP-glucosyl transferase
  misc_feature (1)..(241): Homolog of NCBI NO: 34394688 NR Description: putative glucosyltransferase [Oryza sativa
  misc_feature (1)..(239): Homolog of NCBI NO: 34394683 NR Description: putative flavonol 3-O-glucosyltransferase [Oryza
  misc_feature (1)..(242): Homolog of NCBI NO: 34394680 NR Description: putative glucosyltransferase [Oryza sativa
  misc_feature (1)..(239): Homolog of NCBI NO: 34394653 NR Description: putative glucosyltransferase-3 [Oryza sativa
  misc_feature (1)..(242): Homolog of NCBI NO: 34394651 NR Description: putative glucosyltransferase [Oryza sativa
  misc_feature (1)..(235): Homolog of NCBI NO: 34394676 NR Description: putative glucosyltransferase [Oryza sativa
  misc_feature (24)..(240): Homolog of NCBI NO: 34898742 NR Description: putative betanidin 6-O-glucosyltransferase [Oryza
  misc_feature (1)..(240): Homolog of NCBI NO: 2501492 NR Description: Flavonol 3-O-glucosyltransferase 2 (UDP-glucose
  misc_feature (1)..(239): Homolog of NCBI NO: 15233151 NR Description: putative UDP-glucose glucosyltransferase; protein At3g21760.1, supported by cDNA: gi_13937235, supported by cDNA:
  misc_feature (1)..(240): Homolog of NCBI NO: 7488111 NR Description: probable glucosyltransferase - Arabidopsis >gi|2244884|emb|CAB10305.1| glucosyltransferase [Arabidopsis >gi|7268273|emb|CAB78568.1| glucosyltransferase [Arabidopsis
YPIGPVLPLKPPSAPGDGEQVVAQRHECVRWLDAQPPASVVLLCFGSMGGSFPSPQVREIADGLERSGHRFLWVLRGPPPPDGSKYPTDANVHELLPEGFLERTKGRGLVWPTWAPQKDILANPAVGGFVTHCGWNSILESLWHGVPMVPWPQFAEQHLNAFELVSVMGVAVAMQVDRKRGNFVEAAELERAVRCLMGGSEEEGRKAREKATEAKALSQNGVASGGSSDASVQKLAREILHKHDDKGCATASGESMGSVVVPASPAGII

SEQ ID NO: 5366 - protein, 222 aa, Zea mays subsp. mays
  peptide (1)..(222): Ceres Seq. ID no. 12365455
  misc_feature (1)..(193): Pfam Name: UDP-glucoronosyl and UDP-glucosyl transferase Pfam Description: UDP-glucoronosyl and UDP-glucosyl transferase
  misc_feature (1)..(194): Homolog of NCBI NO: 34394688 NR Description: putative glucosyltransferase [Oryza sativa
  misc_feature (1)..(192): Homolog of NCBI NO: 34394683 NR Description: putative flavonol 3-O-glucosyltransferase [Oryza
  misc_feature (1)..(195): Homolog of NCBI NO: 34394680 NR Description: putative glucosyltransferase [Oryza sativa
  misc_feature (1)..(192): Homolog of NCBI NO: 34394653 NR Description: putative glucosyltransferase-3 [Oryza sativa
  misc_feature (1)..(195): Homolog of NCBI NO: 34394651 NR Description: putative glucosyltransferase [Oryza sativa
  misc_feature (1)..(188): Homolog of NCBI NO: 34394676 NR Description: putative glucosyltransferase [Oryza sativa
  misc_feature (1)..(193): Homolog of NCBI NO: 34898742 NR Description: putative betanidin 6-O-glucosyltransferase [Oryza
  misc_feature (1)..(193): Homolog of NCBI NO: 2501492 NR Description: Flavonol 3-O-glucosyltransferase 2 (UDP-glucose
  misc_feature (1)..(192): Homolog of NCBI NO: 15233151 NR Description: putative UDP-glucose glucosyltransferase; protein At3g21760.1, supported by cDNA: gi_13937235, supported by cDNA:
  misc_feature (1)..(193): Homolog of NCBI NO: 7488111 NR Description: probable glucosyltransferase - Arabidopsis >gi|2244884|emb|CAB10305.1| glucosyltransferase [Arabidopsis >gi|7268273|emb|CAB78568.1| glucosyltransferase [Arabidopsis
MGGSFPSPQVREIADGLERSGHRFLWVLRGPPPPDGSKYPTDANVHELLPEGFLERTKGRGLVWPTWAPQKDILANPAVGGFVTHCGWNSILESLWHGVPMVPWPQFAEQHLNAFELVSVMGVAVAMQVDRKRGNFVEAAELERAVRCLMGGSEEEGRKAREKATEAKALSQNGVASGGSSDASVQKLAREILHKHDDKGCATASGESMGSVVVPASPAGII

SEQ ID NO: 5367 - DNA, 1486 bp, Zea mays subsp. mays
  misc_feature (1)..(1486): Ceres Seq. ID no. 12567030
  misc_feature: MA Experiment ID: 108515 Result: Up-regulated in Transcription
  misc_feature: MA Experiment 108515 PARAMETER Experiment Name: Zm_2mM_SA_P Parameter: Age (day) Value: 8
  misc_feature: MA Experiment 108515 PARAMETER Experiment Name: Zm_2mM_SA_P Parameter: Organism Value: Zea mays
  misc_feature: MA Experiment 108515 PARAMETER Experiment Name: Zm_2mM_SA_P Parameter: Plant Line Value: 35A19
  misc_feature: MA Experiment 108515 PARAMETER Experiment Name: Zm_2mM_SA_P Parameter: Timepoint (hr) Value: 12
  misc_feature: MA Experiment 108515 PARAMETER Experiment Name: Zm_2mM_SA_P Parameter: Tissue Value: Aerial
  misc_feature: MA Experiment 108515 PARAMETER Experiment Name: Zm_2mM_SA_P Parameter: Treatment Value: 2mM SA vs. No Treatment
  misc_feature: MA Experiment ID: 108527 Result: Up-regulated in Transcription
  misc_feature: MA Experiment 108527 PARAMETER Experiment Name: Zm_5mM_NO_P Parameter: Age (day) Value: 8
  misc_feature: MA Experiment 108527 PARAMETER Experiment Name: Zm_5mM_NO_P Parameter: Organism Value: Zea mays
  misc_feature: MA Experiment 108527 PARAMETER Experiment Name: Zm_5mM_NO_P Parameter: Plant Line Value: 35A19
  misc_feature: MA Experiment 108527 PARAMETER Experiment Name: Zm_5mM_NO_P Parameter: Timepoint (hr) Value: 6
  misc_feature: MA Experiment 108527 PARAMETER Experiment Name: Zm_5mM_NO_P Parameter: Tissue Value: Aerial
  misc_feature: MA Experiment 108527 PARAMETER Experiment Name: Zm_5mM_NO_P Parameter: Treatment Value: 5mM NO vs. No Treatment
  misc_feature: MA Experiment ID: 108559 Result: Up-regulated in Transcription
  misc_feature: MA Experiment 108559 PARAMETER Experiment Name: Zm_5mM_NO_P Parameter: Age (day) Value: 8
  misc_feature: MA Experiment 108559 PARAMETER Experiment Name: Zm_5mM_NO_P Parameter: Organism Value: Zea mays
  misc_feature: MA Experiment 108559 PARAMETER Experiment Name: Zm_5mM_NO_P Parameter: Plant Line Value: 35A19
  misc_feature: MA Experiment 108559 PARAMETER Experiment Name: Zm_5mM_NO_P Parameter: Timepoint (hr) Value: 12
  misc_feature: MA Experiment 108559 PARAMETER Experiment Name: Zm_5mM_NO_P Parameter: Tissue Value: Aerial
  misc_feature: MA Experiment 108559 PARAMETER Experiment Name: Zm_5mM_NO_P Parameter: Treatment Value: 5mM NO vs. No Treatment
  misc_feature: MA Experiment ID: 108689 Result: Up-regulated in Transcription
  misc_feature: MA Experiment 108689 PARAMETER Experiment Name: Zm_Drought_Roots_P Parameter: Age (day) Value: 9
  misc_feature: MA Experiment 108689 PARAMETER Experiment Name: Zm_Drought_Roots_P Parameter: Organism Value: Zea mays
  misc_feature: MA Experiment 108689 PARAMETER Experiment Name: Zm_Drought_Roots_P Parameter: Plant Line Value: 35A19
  misc_feature: MA Experiment 108689 PARAMETER Experiment Name: Zm_Drought_Roots_P Parameter: Timepoint (hr) Value: 24
  misc_feature: MA Experiment 108689 PARAMETER Experiment Name: Zm_Drought_Roots_P Parameter: Tissue Value: Roots
  misc_feature: MA Experiment 108689 PARAMETER Experiment Name: Zm_Drought_Roots_P Parameter: Treatment Value: Drought vs. No Drought
  misc_feature: MA Experiment ID: 20000477 Result: Up-regulated in Transcription
  misc_feature: MA Experiment 20000477 PARAMETER Experiment Name: Zm_5mM_SA_P Parameter: Age (day) Value: 10
  misc_feature: MA Experiment 20000477 PARAMETER Experiment Name: Zm_5mM_SA_P Parameter: Organism Value: Zea mays
  misc_feature: MA Experiment 20000477 PARAMETER Experiment Name: Zm_5mM_SA_P Parameter: Plant Line Value: 35A19
  misc_feature: MA Experiment 20000477 PARAMETER Experiment Name: Zm_5mM_SA_P Parameter: Timepoint (hr) Value: 48
  misc_feature: MA Experiment 20000477 PARAMETER Experiment Name: Zm_5mM_SA_P Parameter: Tissue Value: Aerial
  misc_feature: MA Experiment 20000477 PARAMETER Experiment Name: Zm_5mM_SA_P Parameter: Treatment Value: 5mM SA vs. No Treatment
  misc_feature: MA Experiment ID: 20000478 Result: Up-regulated in Transcription
  misc_feature: MA Experiment 20000478 PARAMETER Experiment Name: Zm_5mM_SA_P Parameter: Age (day) Value: 11
  misc_feature: MA Experiment 20000478 PARAMETER Experiment Name: Zm_5mM_SA_P Parameter: Organism Value: Zea mays
  misc_feature: MA Experiment 20000478 PARAMETER Experiment Name: Zm_5mM_SA_P Parameter: Plant Line Value: 35A19
  misc_feature: MA Experiment 20000478 PARAMETER Experiment Name: Zm_5mM_SA_P Parameter: Timepoint (hr) Value: 72
  misc_feature: MA Experiment 20000478 PARAMETER Experiment Name: Zm_5mM_SA_P Parameter: Tissue Value: Aerial
  misc_feature: MA Experiment 20000478 PARAMETER Experiment Name: Zm_5mM_SA_P Parameter: Treatment Value: 5mM SA vs. No Treatment
  misc_feature: MA Experiment ID: 20000534 Result: Up-regulated in Transcription
  misc_feature: MA Experiment 20000534 PARAMETER Experiment Name: Zm_Hybrid_Pollen_P Parameter: Age (day) Value: 8
  misc_feature: MA Experiment 20000534 PARAMETER Experiment Name: Zm_Hybrid_Pollen_P Parameter: Organism Value: Zea mays
  misc_feature: MA Experiment 20000534 PARAMETER Experiment Name: Zm_Hybrid_Pollen_P Parameter: Plant Line Value: 35A19
  misc_feature: MA Experiment 20000534 PARAMETER Experiment Name: Zm_Hybrid_Pollen_P Parameter: Tissue Value: Pollen vs. Aerial
  misc_feature: MA Experiment ID: 20001613 Result: Up-regulated in Transcription
  misc_feature: MA Experiment 20001613 PARAMETER Experiment Name: Zm_50ppm_KNO3_L-to-H_P Parameter: Age (day) Value: 20
  misc_feature: MA Experiment 20001613 PARAMETER Experiment Name: Zm_50ppm_KNO3_L-to-H_P Parameter: Organism Value: Zea mays
  misc_feature: MA Experiment 20001613 PARAMETER Experiment Name: Zm_50ppm_KNO3_L-to-H_P Parameter: Plant Line Value: 35A19
  misc_feature: MA Experiment 20001613 PARAMETER Experiment Name: Zm_50ppm_KNO3_L-to-H_P Parameter: Timepoint (hr) Value: 24
  misc_feature: MA Experiment 20001613 PARAMETER Experiment Name: Zm_50ppm_KNO3_L-to-H_P Parameter: Tissue Value: Roots
  misc_feature: MA Experiment 20001613 PARAMETER Experiment Name: Zm_50ppm_KNO3_L-to-H_P Parameter: Treatment Value: 50ppm KNO3 vs. 50ppm KCl
gtccctgtctcgggtatcgtcgctggtcgctgccgcagccttcgtcctccctctcccactcccgatcgcatccaccctggaaccctagcggcccagcccgcgaccatggcgcggcggtcgacccctctcctacgccgccttctcgccccgtcaccttccctctccactcctctagccgacgccgtatcccgccgcaccgtcacgtacatgccccgcccgggggacggcgctccgcgggcgtcaccctcatcccgggcgacggcatcgggcccctcgtcacgggcgccgtgcggcaggtgatggaggcgatgcacgcgccggtctatttcgagacgtacgaggtccacggcgacatgcccacggtccccgccgaggtcatcgagtccatccgccgcaacaaggtctgcctcaagggcggcctcgccacccccgtaggcggtggtgtgtcctccctcaacgtgcagctccggaaggagctcgacctctacgccgcgctcgtcaactgtttcaacctccctggcctgcctaccaggcacgacaacgtggacatcgtcgtcattcgggagaacagtgagggagagtactcggggctcgagcatgaggtcgttcctggcgtcgtggagagtctcaaggtgataacaaaattctgctctgaaagaattgcaaagtatgcttttgagtatgcataccttaacaatcgaaagaaagtgacagcagtgcataaagccaatatcatgaagcttgctgatggtttgttcttggagtcttgccgtgaggttgcaaagaagtaccctggaattaaatataatgaaatcattgtggacaactgttgtatgcagcttgttgcaaagcctgaacaatttgatgttatggtcaccccaaatctttatggcaatctggtggctaatgtagctgcaggtattgctggaggcactggtgtcatgcctggaggcaatgtgggtcaggaccatgctatcttcgagcaaggtgcttctgcaggaaatgttggaaatgagaaaattgtggagaagaagagagctaaccctgttgcgctgctgctatcttctgccatgatgttgaggcacttgcaatttccatcatttgctgaccgtttggagacggcagttaagcgtgtcatagcagaaggcaagtacagaaccaaagatttgggcggcaccagcacaacccaggaagtgatagatgctgtcattgccaaactgggttaaacacaaaccgtgtgtttaatacattttttttcctcatggactaggtaactagtccttactaaatgtttgttcttcgtataggtttagactttagaccaccattttgttcggcaaattcttgtacaatcttcaggtatcttgtttctggcctggtttgggtgtgtggtgtaactgagcaaactcgtattaatttttacgcaaatttttgtgaccttaattcttaactggaaataagagaaaaatatggaacagttctccgt

SEQ ID NO: 5368 - protein, 407 aa, Zea mays subsp. mays
  peptide (1)..(407): Ceres Seq. ID no. 12567031
  misc_feature (80)..(402): Pfam Name: Isocitrate/isopropylmalate dehydrogenase Pfam Description: Isocitrate/isopropylmalate dehydrogenase
  misc_feature (53)..(406): Homolog of NCBI NO: 3790188 NR Description: NAD-dependent isocitrate dehydrogenase [Nicotiana
  misc_feature (72)..(406): Homolog of NCBI NO: 28974498 NR Description: NAD-dependent isocitrate dehydrogenase beta
  misc_feature (72)..(406): Homolog of NCBI NO: 15236932 NR Description: NAD+ dependent isocitrate dehydrogenase subunit protein id: At4g35260.1, supported by cDNA: 12228., supported by gi_15146237, supported by cDNA: gi_16226886, supported by cDNA:
  misc_feature (72)..(406): Homolog of NCBI NO: 21537157 NR Description: NAD+ dependent isocitrate dehydrogenase subunit 1
  misc_feature (72)..(406): Homolog of NCBI NO: 28974502 NR Description: NAD-dependent isocitrate dehydrogenase beta
  misc_feature (72)..(406): Homolog of NCBI NO: 1766046 NR Description: NAD+ dependent isocitrate dehydrogenase subunit 1
  misc_feature (72)..(406): Homolog of NCBI NO: 15237075 NR Description: NAD+ dependent isocitrate dehydrogenase -like protein id: At4g35650.1 [Arabidopsis thaliana]
  misc_feature (57)..(406): Homolog of NCBI NO: 1766048 NR Description: NAD+ dependent isocitrate dehydrogenase subunit 2
  misc_feature (57)..(406): Homolog of NCBI NO: 15227370 NR Description: putative NAD+ dependent isocitrate dehydrogenase
  misc_feature (72)..(406): Homolog of NCBI NO: 28974504 NR Description: NAD-dependent isocitrate dehydrogenase gamma
PCLGYRRWSLPQPSSSLSHSRSHPPWNPSGPARDHGAAVDPSPTPPSRPVTFPLHSSSRRRIPPHRHVHAPPGGRRSAGVTLIPGDGIGPLVTGAVRQVMEAMHAPVYFETYEVHGDMPTVPAEVIESIRRNKVCLKGGLATPVGGGVSSLNVQLRKELDLYAALVNCFNLPGLPTRHDNVDIVVIRENSEGEYSGLEHEVVPGVVESLKVITKFCSERIAKYAFEYAYLNNRKKVTAVHKANIMKLADGLFLESCREVAKKYPGIKYNEIIVDNCCMQLVAKPEQFDVMVTPNLYGNLVANVAAGIAGGTGVMPGGNVGQDHAIFEQGASAGNVGNEKIVEKKRANPVALLLSSAMMLRHLQFPSFADRLETAVKRVIAEGKYRTKDLGGTSTTQEVIDAVIAKLG

SEQ ID NO: 5369 - protein, 308 aa, Zea mays subsp. mays
  peptide (1)..(308): Ceres Seq. ID no. 12567032
  misc_feature (1)..(303): Pfam Name: Isocitrate/isopropylmalate dehydrogenase Pfam Description: Isocitrate/isopropylmalate dehydrogenase
  misc_feature (1)..(307): Homolog of NCBI NO: 3790188 NR Description: NAD-dependent isocitrate dehydrogenase [Nicotiana
  misc_feature (1)..(307): Homolog of NCBI NO: 28974498 NR Description: NAD-dependent isocitrate dehydrogenase beta
  misc_feature (1)..(307): Homolog of NCBI NO: 15236932 NR Description: NAD+ dependent isocitrate dehydrogenase subunit protein id: At4g35260.1, supported by cDNA: 12228., supported by gi_15146237, supported by cDNA: gi_16226886, supported by cDNA:
  misc_feature (1)..(307): Homolog of NCBI NO: 21537157 NR Description: NAD+ dependent isocitrate dehydrogenase subunit 1
  misc_feature (1)..(307): Homolog of NCBI NO: 28974502 NR Description: NAD-dependent isocitrate dehydrogenase beta
  misc_feature (1)..(307): Homolog of NCBI NO: 1766046 NR Description: NAD+ dependent isocitrate dehydrogenase subunit 1
  misc_feature (1)..(307): Homolog of NCBI NO: 15237075 NR Description: NAD+ dependent isocitrate dehydrogenase -like protein id: At4g35650.1 [Arabidopsis thaliana]
  misc_feature (1)..(307): Homolog of NCBI NO: 1766048 NR Description: NAD+ dependent isocitrate dehydrogenase subunit 2
  misc_feature (1)..(307): Homolog of NCBI NO: 15227370 NR Description: putative NAD+ dependent isocitrate dehydrogenase
  misc_feature (1)..(307): Homolog of NCBI NO: 28974504 NR Description: NAD-dependent isocitrate dehydrogenase gamma
MEAMHAPVYFETYEVHGDMPTVPAEVIESIRRNKVCLKGGLATPVGGGVSSLNVQLRKELDLYAALVNCFNLPGLPTRHDNVDIVVIRENSEGEYSGLEHEVVPGVVESLKVITKFCSERIAKYAFEYAYLNNRKKVTAVHKANIMKLADGLFLESCREVAKKYPGIKYNEIIVDNCCMQLVAKPEQFDVMVTPNLYGNLVANVAAGIAGGTGVMPGGNVGQDHAIFEQGASAGNVGNEKIVEKKRANPVALLLSSAMMLRHLQFPSFADRLETAVKRVIAEGKYRTKDLGGTSTTQEVIDAVIAKLG

SEQ ID NO: 5370 - protein, 305 aa, Zea mays subsp. mays
  peptide (1)..(305): Ceres Seq. ID no. 12567033
  misc_feature (1)..(300): Pfam Name: Isocitrate/isopropylmalate dehydrogenase Pfam Description: Isocitrate/isopropylmalate dehydrogenase
  misc_feature (1)..(304): Homolog of NCBI NO: 3790188 NR Description: NAD-dependent isocitrate dehydrogenase [Nicotiana
  misc_feature (1)..(304): Homolog of NCBI NO: 28974498 NR Description: NAD-dependent isocitrate dehydrogenase beta
  misc_feature (1)..(304): Homolog of NCBI NO: 15236932 NR Description: NAD+ dependent isocitrate dehydrogenase subunit protein id: At4g35260.1, supported by cDNA: 12228., supported by gi_15146237, supported by cDNA: gi_16226886, supported by cDNA:
  misc_feature (1)..(304): Homolog of NCBI NO: 21537157 NR Description: NAD+ dependent isocitrate dehydrogenase subunit 1
  misc_feature (1)..(304): Homolog of NCBI NO: 28974502 NR Description: NAD-dependent isocitrate dehydrogenase beta
  misc_feature (1)..(304): Homolog of NCBI NO: 1766046 NR Description: NAD+ dependent isocitrate dehydrogenase subunit 1
  misc_feature (1)..(304): Homolog of NCBI NO: 15237075 NR Description: NAD+ dependent isocitrate dehydrogenase -like protein id: At4g35650.1 [Arabidopsis thaliana]
  misc_feature (1)..(304): Homolog of NCBI NO: 1766048 NR Description: NAD+ dependent isocitrate dehydrogenase subunit 2
  misc_feature (1)..(304): Homolog of NCBI NO: 15227370 NR Description: putative NAD+ dependent isocitrate dehydrogenase
  misc_feature (1)..(304): Homolog of NCBI NO: 28974504 NR Description: NAD-dependent isocitrate dehydrogenase gamma
MHAPVYFETYEVHGDMPTVPAEVIESIRRNKVCLKGGLATPVGGGVSSLNVQLRKELDLYAALVNCFNLPGLPTRHDNVDIVVIRENSEGEYSGLEHEVVPGVVESLKVITKFCSERIAKYAFEYAYLNNRKKVTAVHKANIMKLADGLFLESCREVAKKYPGIKYNEIIVDNCCMQLVAKPEQFDVMVTPNLYGNLVANVAAGIAGGTGVMPGGNVGQDHAIFEQGASAGNVGNEKIVEKKRANPVALLLSSAMMLRHLQFPSFADRLETAVKRVIAEGKYRTKDLGGTSTTQEVIDAVIAKLG

SEQ ID NO: 5371 - DNA, 1487 bp, Zea mays subsp. mays
  misc_feature (1)..(1487): Ceres Seq. ID no. 13498628
  misc_feature: MA Experiment ID: 108515 Result: Up-regulated in Transcription
  misc_feature: MA Experiment 108515 PARAMETER Experiment Name: Zm_2mM_SA_P Parameter: Age (day) Value: 8
  misc_feature: MA Experiment 108515 PARAMETER Experiment Name: Zm_2mM_SA_P Parameter: Organism Value: Zea mays
  misc_feature: MA Experiment 108515 PARAMETER Experiment Name: Zm_2mM_SA_P Parameter: Plant Line Value: 35A19
  misc_feature: MA Experiment 108515 PARAMETER Experiment Name: Zm_2mM_SA_P Parameter: Timepoint (hr) Value: 12
  misc_feature: MA Experiment 108515 PARAMETER Experiment Name: Zm_2mM_SA_P Parameter: Tissue Value: Aerial
  misc_feature: MA Experiment 108515 PARAMETER Experiment Name: Zm_2mM_SA_P Parameter: Treatment Value: 2mM SA vs. No Treatment
  misc_feature: MA Experiment ID: 108527 Result: Up-regulated in Transcription
  misc_feature: MA Experiment 108527 PARAMETER Experiment Name: Zm_5mM_NO_P Parameter: Age (day) Value: 8
  misc_feature: MA Experiment 108527 PARAMETER Experiment Name: Zm_5mM_NO_P Parameter: Organism Value: Zea mays
  misc_feature: MA Experiment 108527 PARAMETER Experiment Name: Zm_5mM_NO_P Parameter: Plant Line Value: 35A19
  misc_feature: MA Experiment 108527 PARAMETER Experiment Name: Zm_5mM_NO_P Parameter: Timepoint (hr) Value: 6
  misc_feature: MA Experiment 108527 PARAMETER Experiment Name: Zm_5mM_NO_P Parameter: Tissue Value: Aerial
  misc_feature: MA Experiment 108527 PARAMETER Experiment Name: Zm_5mM_NO_P Parameter: Treatment Value: 5mM NO vs. No Treatment
  misc_feature: MA Experiment ID: 108559 Result: Up-regulated in Transcription
  misc_feature: MA Experiment 108559 PARAMETER Experiment Name: Zm_5mM_NO_P Parameter: Age (day) Value: 8
  misc_feature: MA Experiment 108559 PARAMETER Experiment Name: Zm_5mM_NO_P Parameter: Organism Value: Zea mays
  misc_feature: MA Experiment 108559 PARAMETER Experiment Name: Zm_5mM_NO_P Parameter: Plant Line Value: 35A19
  misc_feature: MA Experiment 108559 PARAMETER Experiment Name: Zm_5mM_NO_P Parameter: Timepoint (hr) Value: 12
  misc_feature: MA Experiment 108559 PARAMETER Experiment Name: Zm_5mM_NO_P Parameter: Tissue Value: Aerial
  misc_feature: MA Experiment 108559 PARAMETER Experiment Name: Zm_5mM_NO_P Parameter: Treatment Value: 5mM NO vs. No Treatment
  misc_feature: MA Experiment ID: 108689 Result: Up-regulated in Transcription
  misc_feature: MA Experiment 108689 PARAMETER Experiment Name: Zm_Drought_Roots_P Parameter: Age (day) Value: 9
  misc_feature: MA Experiment 108689 PARAMETER Experiment Name: Zm_Drought_Roots_P Parameter: Organism Value: Zea mays
  misc_feature: MA Experiment 108689 PARAMETER Experiment Name: Zm_Drought_Roots_P Parameter: Plant Line Value: 35A19
  misc_feature: MA Experiment 108689 PARAMETER Experiment Name: Zm_Drought_Roots_P Parameter: Timepoint (hr) Value: 24
  misc_feature: MA Experiment 108689 PARAMETER Experiment Name: Zm_Drought_Roots_P Parameter: Tissue Value: Roots
  misc_feature: MA Experiment 108689 PARAMETER Experiment Name: Zm_Drought_Roots_P Parameter: Treatment Value: Drought vs. No Drought
  misc_feature: MA Experiment ID: 20000477 Result: Up-regulated in Transcription
  misc_feature: MA Experiment 20000477 PARAMETER Experiment Name: Zm_5mM_SA_P Parameter: Age (day) Value: 10
  misc_feature: MA Experiment 20000477 PARAMETER Experiment Name: Zm_5mM_SA_P Parameter: Organism Value: Zea mays
  misc_feature: MA Experiment 20000477 PARAMETER Experiment Name: Zm_5mM_SA_P Parameter: Plant Line Value: 35A19
  misc_feature: MA Experiment 20000477 PARAMETER Experiment Name: Zm_5mM_SA_P Parameter: Timepoint (hr) Value: 48
  misc_feature: MA Experiment 20000477 PARAMETER Experiment Name: Zm_5mM_SA_P Parameter: Tissue Value: Aerial
  misc_feature: MA Experiment 20000477 PARAMETER Experiment Name: Zm_5mM_SA_P Parameter: Treatment Value: 5mM SA vs. No Treatment
  misc_feature: MA Experiment ID: 20000478 Result: Up-regulated in Transcription
  misc_feature: MA Experiment 20000478 PARAMETER Experiment Name: Zm_5mM_SA_P Parameter: Age (day) Value: 11
  misc_feature: MA Experiment 20000478 PARAMETER Experiment Name: Zm_5mM_SA_P Parameter: Organism Value: Zea mays
  misc_feature: MA Experiment 20000478 PARAMETER Experiment Name: Zm_5mM_SA_P Parameter: Plant Line Value: 35A19
  misc_feature: MA Experiment 20000478 PARAMETER Experiment Name: Zm_5mM_SA_P Parameter: Timepoint (hr) Value: 72
  misc_feature: MA Experiment 20000478 PARAMETER Experiment Name: Zm_5mM_SA_P Parameter: Tissue Value: Aerial
  misc_feature: MA Experiment 20000478 PARAMETER Experiment Name: Zm_5mM_SA_P Parameter: Treatment Value: 5mM SA vs. No Treatment
  misc_feature: MA Experiment ID: 20000534 Result: Up-regulated in Transcription
  misc_feature: MA Experiment 20000534 PARAMETER Experiment Name: Zm_Hybrid_Pollen_P Parameter: Age (day) Value: 8
  misc_feature: MA Experiment 20000534 PARAMETER Experiment Name: Zm_Hybrid_Pollen_P Parameter: Organism Value: Zea mays
  misc_feature: MA Experiment 20000534 PARAMETER Experiment Name: Zm_Hybrid_Pollen_P Parameter: Plant Line Value: 35A19
  misc_feature: MA Experiment 20000534 PARAMETER Experiment Name: Zm_Hybrid_Pollen_P Parameter: Tissue Value: Pollen vs. Aerial
  misc_feature: MA Experiment ID: 20001613 Result: Up-regulated in Transcription
  misc_feature: MA Experiment 20001613 PARAMETER Experiment Name: Zm_50ppm_KNO3_L-to-H_P Parameter: Age (day) Value: 20
  misc_feature: MA Experiment 20001613 PARAMETER Experiment Name: Zm_50ppm_KNO3_L-to-H_P Parameter: Organism Value: Zea mays
  misc_feature: MA Experiment 20001613 PARAMETER Experiment Name: Zm_50ppm_KNO3_L-to-H_P Parameter: Plant Line Value: 35A19
  misc_feature: MA Experiment 20001613 PARAMETER Experiment Name: Zm_50ppm_KNO3_L-to-H_P Parameter: Timepoint (hr) Value: 24
  misc_feature: MA Experiment 20001613 PARAMETER Experiment Name: Zm_50ppm_KNO3_L-to-H_P Parameter: Tissue Value: Roots
  misc_feature: MA Experiment 20001613 PARAMETER Experiment Name: Zm_50ppm_KNO3_L-to-H_P Parameter: Treatment Value: 50ppm KNO3 vs. 50ppm KCl
atcgtaaaacaactcgagtatccatctccaccttccctttctcctcctctctcccggattcccggcgacctcccttttccttccctcccgagtngcggccgcccgcccgcctccgtgatcgcaattcgcacctgcacgcgcggccccgacccctagtcctccccacccatggcgcggcgatccgcccctctcctgcgccgcctcgtctccgcctcctccccgcccgcgctgcagtccctcccggaccacgtcggcgtcctcgcgcggcgcacggtgacctacatgccccggcccggggacggcgcaccgcgcgccgtcacgctcatcccaggcgacggcatcggccccctcgtcacgggcgccgtgcggcaggtcatggaggcgatgcacgcgcccgtctacttcgagacctacgacgtccacggagacatgcccacgggtcccgccagccgtcatcgaatccatccgccgcaacaaggtctgcatcaagggcgggctcgccacgcccgtcggcggcggggtctcctccctcaacatgcagctgcgcaaggagctcgatctctacgcctcgctcgtccagtgctccaacctccccggtctgcccaccaggcacgagggtgtcgacatcgtcgtaatcagggagaacaccgagggcgagtactcggggctcgagcacgaggtcgtacccggggtcgttgagagcctcaaggtgatcacaaagttttgctctgagaggattgccaaatatgcattcgagtatgcttaccttaacaaccgaaagaaagtcactgcagtgcataaagcaaacattatgaagcttgccgatggtttgttcttggagtcttgccgtgaagttgcttcaaaatatcctggtattcagtacaatgaaatgattgttgacaactgctctatgcaacttgtttcaaagcctgaacaatttgatgtcatggttacgcctaatctttatggcaatttggtggctaacacagctgcaggtattgttggagggacgggcatcatgcctggaggcaatgtgggtcaggactacgccatctttgagcaaggcgcttctgcaggaaatgttgggaatgagaaccttgtggagcagaagaaagcaaaccctgtcgcgctgcttctgtcatctgctatgatgttgaggcacttgcagttcccgtcatttgcggaccggctcgagacggcagtgaagcgcgtcgttgctgaaggcacgtacagaacaaaggatctgggcggtagcagcaccacccaggaagttaccgatgctgtggttgccaatctggattagattccaggtgtacacggctaaaaaaaggctaattctttggggtgactagttgtctagtcttgactcctgagtgttatttatcttcttacatagattttagattgcttcacatcttcaagagggattacaagccacaaggtatcccttgtttcagattttctttagaaataatattgaggaaccc

SEQ ID NO: 5372 - protein, 255 aa, Zea mays subsp. mays
  peptide (1)..(255): Ceres Seq. ID no. 13498629
  misc_feature (1)..(250): Pfam Name: Isocitrate/isopropylmalate dehydrogenase Pfam Description: Isocitrate/isopropylmalate dehydrogenase
  misc_feature (1)..(255): Homolog of NCBI NO: 3790188 NR Description: NAD-dependent isocitrate dehydrogenase [Nicotiana
  misc_feature (1)..(255): Homolog of NCBI NO: 15236932 NR Description: isocitrate dehydrogenase [NAD+] subunit 1 thaliana] >gi|7431337|pir||T06131 isocitrate dehydrogenase (NAD)
  misc_feature (1)..(255): Homolog of NCBI NO: 21537157 NR Description: NAD+ dependent isocitrate dehydrogenase subunit 1
  misc_feature (1)..(255): Homolog of NCBI NO: 28974502 NR Description: NAD-dependent isocitrate dehydrogenase beta
  misc_feature (1)..(255): Homolog of NCBI NO: 28974498 NR Description: NAD-dependent isocitrate dehydrogenase beta
  misc_feature (1)..(255): Homolog of NCBI NO: 1766046 NR Description: NAD+ dependent isocitrate dehydrogenase subunit 1
  misc_feature (1)..(255): Homolog of NCBI NO: 15237075 NR Description: isocitrate dehydrogenase [NAD+], putative thaliana] >gi|7431336|pir||T04670 isocitrate dehydrogenase (NAD+)
  misc_feature (1)..(255): Homolog of NCBI NO: 15227370 NR Description: isocitrate dehydrogenase [NAD+] subunit 2
  misc_feature (1)..(255): Homolog of NCBI NO: 1766048 NR Description: NAD+ dependent isocitrate dehydrogenase subunit 2
  misc_feature (1)..(255): Homolog of NCBI NO: 28974504 NR Description: NAD-dependent isocitrate dehydrogenase gamma
MQLRKELDLYASLVQCSNLPGLPTRHEGVDIVVIRENTEGEYSGLEHEVVPGVVESLKVITKFCSERIAKYAFEYAYLNNRKKVTAVHKANIMKLADGLFLESCREVASKYPGIQYNEMIVDNCSMQLVSKPEQFDVMVTPNLYGNLVANTAAGIVGGTGIMPGGNVGQDYAIFEQGASAGNVGNENLVEQKKANPVALLLSSAMMLRHLQFPSFADRLETAVKRVVAEGTYRTKDLGGSSTTQEVTDAVVANLD

SEQ ID NO: 5373 - protein, 210 aa, Zea mays subsp. mays
  peptide (1)..(210): Ceres Seq. ID no. 13498630
  misc_feature (144)..(210): Homolog of NCBI NO: 13592175 NR Description: ppg3 [Leishmania major]
  misc_feature (147)..(210): Homolog of NCBI NO: 13592175 NR Description: ppg3 [Leishmania major]
  misc_feature (147)..(210): Homolog of NCBI NO: 13592175 NR Description: ppg3 [Leishmania major]
  misc_feature (147)..(210): Homolog of NCBI NO: 13592175 NR Description: ppg3 [Leishmania major]
  misc_feature (144)..(210): Homolog of NCBI NO: 13592175 NR Description: ppg3 [Leishmania major]
  misc_feature (144)..(210): Homolog of NCBI NO: 13592175 NR Description: ppg3 [Leishmania major]
  misc_feature (144)..(210): Homolog of NCBI NO: 13592175 NR Description: ppg3 [Leishmania major]
  misc_feature (144)..(210): Homolog of NCBI NO: 13592175 NR Description: ppg3 [Leishmania major]
  misc_feature (144)..(210): Homolog of NCBI NO: 13592175 NR Description: ppg3 [Leishmania major]
  misc_feature (31)..(31): Xaa is any aa, unknown or other
RKTTRVSISTFPFSSSLPDSRRPPFSFPPEXRPPARLRDRNSHLHARPRPLVLPTHGAAIRPSPAPPRLRLLPARAAVPPGPRRRPRAAHGDLHAPARGRRTARRHAHPRRRHRPPRHGRRAAGHGGDARARLLRDLRRPRRHAHGSRQPSSNPSAATRSASRAGSPRPSAAGSPPSTCSCARSSISTPRSSSAPTSPVCPPGTRVSTSS

SEQ ID NO: 5374 - protein, 176 aa, Zea mays subsp. mays
  peptide (1)..(176): Ceres Seq. ID no. 13498631
  misc_feature (1)..(92): Homolog of NCBI NO: 15227370 NR Description: isocitrate dehydrogenase [NAD+] subunit 2
  misc_feature (1)..(92): Homolog of NCBI NO: 1766048 NR Description: NAD+ dependent isocitrate dehydrogenase subunit 2
  misc_feature (34)..(92): Homolog of NCBI NO: 28974504 NR Description: NAD-dependent isocitrate dehydrogenase gamma
  misc_feature (1)..(92): Homolog of NCBI NO: 3790188 NR Description: NAD-dependent isocitrate dehydrogenase [Nicotiana
  misc_feature (1)..(92): Homolog of NCBI NO: 15236932 NR Description: isocitrate dehydrogenase [NAD+] subunit 1 thaliana] >gi|7431337|pir||T06131 isocitrate dehydrogenase (NAD)
  misc_feature (1)..(92): Homolog of NCBI NO: 21537157 NR Description: NAD+ dependent isocitrate dehydrogenase subunit 1
  misc_feature (1)..(93): Homolog of NCBI NO: 28974502 NR Description: NAD-dependent isocitrate dehydrogenase beta
  misc_feature (1)..(93): Homolog of NCBI NO: 28974498 NR Description: NAD-dependent isocitrate dehydrogenase beta
  misc_feature (1)..(92): Homolog of NCBI NO: 1766046 NR Description: NAD+ dependent isocitrate dehydrogenase subunit 1
  misc_feature (1)..(92): Homolog of NCBI NO: 15237075 NR Description: isocitrate dehydrogenase [NAD+], putative thaliana] >gi|7431336|pir||T04670 isocitrate dehydrogenase (NAD+)
MARRSAPLLRRLVSASSPPALQSLPDHVGVLARRTVTYMPRPGDGAPRAVTLIPGDGIGPLVTGAVRQVMEAMHAPVYFETYDVHGDMPTGPASRHRIHPPQQGLHQGRARHARRRRGLLPQHAAAQGARSLRLARPVLQPPRSAHQARGCRHRRNQGEHRGRVLGARARGRTRGR

SEQ ID NO: 5375 - DNA, 1916 bp, Zea mays subsp. mays
  misc_feature (1)..(1916): Ceres Seq. ID no. 12406774
  misc_feature: MA Experiment ID: 108523 Result: Down-regulated in Transcription
  misc_feature: MA Experiment 108523 PARAMETER Experiment Name: Zm_42deg_Heat_P Parameter: Age (day) Value: 8
  misc_feature: MA Experiment 108523 PARAMETER Experiment Name: Zm_42deg_Heat_P Parameter: Organism Value: Zea mays
  misc_feature: MA Experiment 108523 PARAMETER Experiment Name: Zm_42deg_Heat_P Parameter: Plant Line Value: 35A19
  misc_feature: MA Experiment 108523 PARAMETER Experiment Name: Zm_42deg_Heat_P Parameter: Temperature (deg C) Value: 42 vs. 22
  misc_feature: MA Experiment 108523 PARAMETER Experiment Name: Zm_42deg_Heat_P Parameter: Timepoint (hr) Value: 6
  misc_feature: MA Experiment 108523 PARAMETER Experiment Name: Zm_42deg_Heat_P Parameter: Tissue Value: Aerial
  misc_feature: MA Experiment ID: 108529 Result: Up-regulated in Transcription
  misc_feature: MA Experiment 108529 PARAMETER Experiment Name: Zm_Imbibed_Seeds_P Parameter: Age (day) Value: 5 vs. 2
  misc_feature: MA Experiment 108529 PARAMETER Experiment Name: Zm_Imbibed_Seeds_P Parameter: Organism Value: Zea mays
  misc_feature: MA Experiment 108529 PARAMETER Experiment Name: Zm_Imbibed_Seeds_P Parameter: Plant Line Value: 35A19
  misc_feature: MA Experiment 108529 PARAMETER Experiment Name: Zm_Imbibed_Seeds_P Parameter: Tissue Value: Roots vs. Embryo
  misc_feature: MA Experiment ID: 108543 Result: Up-regulated in Transcription
  misc_feature: MA Experiment ID: 108546 Result: Up-regulated in Transcription
  misc_feature: MA Experiment 108546 PARAMETER Experiment Name: Zm_Imbibed_Seeds_P Parameter: Age (day) Value: 3 vs. 2
  misc_feature: MA Experiment 108546 PARAMETER Experiment Name: Zm_Imbibed_Seeds_P Parameter: Organism Value: Zea mays
  misc_feature: MA Experiment 108546 PARAMETER Experiment Name: Zm_Imbibed_Seeds_P Parameter: Plant Line Value: 35A19
  misc_feature: MA Experiment 108546 PARAMETER Experiment Name: Zm_Imbibed_Seeds_P Parameter: Tissue Value: Roots vs. Embryo
  misc_feature: MA Experiment ID: 108689 Result: Up-regulated in Transcription
  misc_feature: MA Experiment 108689 PARAMETER Experiment Name: Zm_Drought_Roots_P Parameter: Age (day) Value: 9
  misc_feature: MA Experiment 108689 PARAMETER Experiment Name: Zm_Drought_Roots_P Parameter: Organism Value: Zea mays
  misc_feature: MA Experiment 108689 PARAMETER Experiment Name: Zm_Drought_Roots_P Parameter: Plant Line Value: 35A19
  misc_feature: MA Experiment 108689 PARAMETER Experiment Name: Zm_Drought_Roots_P Parameter: Timepoint (hr) Value: 24
  misc_feature: MA Experiment 108689 PARAMETER Experiment Name: Zm_Drought_Roots_P Parameter: Tissue Value: Roots
  misc_feature: MA Experiment 108689 PARAMETER Experiment Name: Zm_Drought_Roots_P Parameter: Treatment Value: Drought vs. No Drought
  misc_feature: MA Experiment ID: 20000108 Result: Down-regulated in Transcription
  misc_feature: MA Experiment 20000108 PARAMETER Experiment Name: Zm_Root-Tips_P Parameter: Age (day) Value: 12
  misc_feature: MA Experiment 20000108 PARAMETER Experiment Name: Zm_Root-Tips_P Parameter: Organism Value: Zea mays
  misc_feature: MA Experiment 20000108 PARAMETER Experiment Name: Zm_Root-Tips_P Parameter: Tissue Value: Root tips vs. Root mid region    35
  misc_feature: MA Experiment 20000108 PARAMETER Experiment Name: Zm_Root-Tips_P Parameter: Tissue Value: Root tips vs. Root mid region   Sequence Listing-Misc Features (4)
  misc_feature: MA Experiment ID: 20000479 Result: Up-regulated in Transcription
  misc_feature: MA Experiment 20000479 PARAMETER Experiment Name: Zm_Drought_P Parameter: Age (day) Value: 10
  misc_feature: MA Experiment 20000479 PARAMETER Experiment Name: Zm_Drought_P Parameter: Organism Value: Zea mays
  misc_feature: MA Experiment 20000479 PARAMETER Experiment Name: Zm_Drought_P Parameter: Plant Line Value: 35A19
  misc_feature: MA Experiment 20000479 PARAMETER Experiment Name: Zm_Drought_P Parameter: Timepoint (hr) Value: 48
  misc_feature: MA Experiment 20000479 PARAMETER Experiment Name: Zm_Drought_P Parameter: Tissue Value: Aerial
  misc_feature: MA Experiment 20000479 PARAMETER Experiment Name: Zm_Drought_P Parameter: Treatment Value: Drought vs. No Drought
  misc_feature: MA Experiment ID: 20000535 Result: Down-regulated in Transcription
  misc_feature: MA Experiment 20000535 PARAMETER Experiment Name: Zm_Hybrid_Seed_Dev_P Parameter: DAP Value: 30 vs. 12
  misc_feature: MA Experiment 20000535 PARAMETER Experiment Name: Zm_Hybrid_Seed_Dev_P Parameter: Organism Value: Zea mays
  misc_feature: MA Experiment 20000535 PARAMETER Experiment Name: Zm_Hybrid_Seed_Dev_P Parameter: Plant Line Value: 35A19
  misc_feature: MA Experiment 20000535 PARAMETER Experiment Name: Zm_Hybrid_Seed_Dev_P Parameter: Tissue Value: Embryo vs. Unfert Floret
aaaaatcttgcacacgcaaaccgcagccaagcaagcgttcccctccctgtgatcgcgatggggtccaccgagaagcaggagccggaggcgtcgccggagatcatcttccggtcgaagctcccggacatcgccatcaccaacacccacccgctgcaccgctactgcttcgagcggctccccgaggtgggcgagaggccctgcctcatcgacggcggcacgggcgccgtgctcacgtacgccgaggtggaccgcctgacccggcgcctggccgcggcgctccggcgcgcaccgctggggctcgggcgcggctcggtggccatgaaccttatgctcaactcggcggagttcgtgctctccttcttcgccgcgtcgcgcgtgggcgccgcggtcaccaccgccaacccgatgtcgacgccgcacgagatcgccgggcagatcgcggcctccggcgccaccgttgtgttcaccgagtccatggccgcggacaagctccccgccatgggcgacaagctcacggtcgtcctcatcgacgcgcgccgcgacgggtgcctccacttctgggacgacgtcatggccagcgtccccgacgaggaggctggcggcggcggcggcggcgagcaagacttggacttcgaccccgacgacgtggtggcgctgccctactcgtccggcacgacggggctgcccaagggcgtgatgctgacgcaccgcagcctgagcacgagcgtggcgcagcaggtggacggcgacaaccccaacatcggcctgaccgccgccgacgtggtcctgtgctcgctccccatgttccacatctactcgctcaacaccatcctgatgtgcgggctgcgcgtgggcgccgccatcgtggtggtgcgccgcttcgacctgcgcaggatgatggagctggtggagcgccaccggatcaccgtcgccccgctggtgccgcccatcgtggtcggccgtggccaagagcgacgagggccgcggcgcacgacctgtcgtcggtcaggatggtgctctccggcgccgcgcccatggggaaggacatcgaggacgcgttcgtggccaagctccccggcgccgtgctcggacaggggtacggcatgacggaggccgggccggtgctgtccatgtgcctggcgttcgccaaggagccgttcagggtgaagtcgggcgcgtgcgggacggtggtgcgcaacgccgagctgaagatcgtggacccggacaccggcaggtccctcgcccgcaacctgcccggggagatctgcatcaggggccagcagatcatgaaaggttacctgaacaacccggaggcgacgaggaacagcatcgacgccggcgggtggctgcacacgggcgacgtcggctttgtggacgacgacgacgagatcttcatcgtcgacaggctcaaggagatcatcaagtacaagggcctccaggtggcccccgccgagctggaggcgctgctcatcacccacccaggcatcgccgacgccgccgtcgtcgggaaacaagtggagccggagatcggggagatcccggtggccttcgtagccagggccaaagggtgcgacgacgggctcaccgaggacgacgtgaagcagtttgtggccaaggaggtggtctactacaagaaggtccgcgaggtggtcttcgtcgacaggatccccaaggccccgtcgggcaagatactgcgcaaggagctcaggaagcggcttcagcttcagcagcaccagcaccagcaagcggtgtgatgtacatcatatttggggtgacgtactgtgctccgtgtttttggtctagtttggcggtgggtgatggtgattaattgtctacctcataatgttcattttgttttcagacgtaatttccatcagtgtgcgcattaaaaatctaatgcagtttcattctgttct

SEQ ID NO: 5376 - protein, 583 aa, Zea mays subsp. mays
  peptide (1)..(583): Ceres Seq. ID no. 12406775
  misc_feature (323)..(500): Pfam Name: AMP-binding enzyme Pfam Description: AMP-binding enzyme
  misc_feature (323)..(576): Homolog of NCBI NO: 112802 NR Description: 4-coumarate--CoA ligase 1 (4CL 1)
  misc_feature (323)..(572): Homolog of NCBI NO: 7188339 NR Description: 4-coumarate--CoA ligase 4CL3 [Lolium perenne]
  misc_feature (323)..(572): Homolog of NCBI NO: 7188337 NR Description: 4-coumarate--CoA ligase 4CL2 [Lolium perenne]
  misc_feature (330)..(572): Homolog of NCBI NO: 9651915 NR Description: 4-coumarate:coA ligase 2 [Rubus idaeus]
  misc_feature (330)..(572): Homolog of NCBI NO: 398965 NR Description: 4-coumarate--CoA ligase 2 (4CL 2)
  misc_feature (330)..(572): Homolog of NCBI NO: 398963 NR Description: 4-coumarate--CoA ligase 1 (4CL 1)
  misc_feature (330)..(572): Homolog of NCBI NO: 5163399 NR Description: 4-coumarate:coenzyme A ligase [Solanum tuberosum]
  misc_feature (330)..(572): Homolog of NCBI NO: 7437854 NR Description: 4-coumarate-CoA ligase (EC 6.2.1.12) 1
  misc_feature (329)..(572): Homolog of NCBI NO: 12229631 NR Description: 4-coumarate--CoA ligase 1 (4CL 1)
  misc_feature (323)..(572): Homolog of NCBI NO: 15218002 NR Description: 4-coumarate:CoA ligase 1; protein id: supported by cDNA: gi_20466561, supported by cDNA: gi_609339
KSCTRKPQPSKRSPPCDRDGVHREAGAGGVAGDHLPVEAPGHRHHQHPPAAPLLLRAAPRGGREALPHRRRHGRRAHVRRGGPPDPAPGRGAPARTAGARARLGGHEPYAQLGGVRALLLRRVARGRRGHHRQPDVDAARDRRADRGLRRHRCVHRVHGRGQAPRHGRQAHGRPHRRAPRRVPPLLGRRHGQRPRRGGWRRRRRRARLGLRPRRRGGAALLVRHDGAAQGRDADAPQPEHERGAAGGRRQPQHRPDRRRRGPVLAPHVPHLLAQHHPDVRAARGRRHRGGAPLRPAQDDGAGGAPPDHRRPAGAAHRGRPWPRATRAAAHDLSSVRMVLSGAAPMGKDIEDAFVAKLPGAVLGQGYGMTEAGPVLSMCLAFAKEPFRVKSGACGTVVRNAELKIVDPDTGRSLARNLPGEICIRGQQIMKGYLNNPEATRNSIDAGGWLHTGDVGFVDDDDEIFIVDRLKEIIKYKGLQVAPAELEALLITHPGIADAAVVGKQVEPEIGEIPVAFVARAKGCDDGLTEDDVKQFVAKEVVYYKKVREVVFVDRIPKAPSGKILRKELRKRLQLQQHQHQQAV

SEQ ID NO: 5377 - protein, 368 aa, Zea mays subsp. mays
  peptide (1)..(368): Ceres Seq. ID no. 12406776
  misc_feature (78)..(319): Pfam Name: AMP-binding enzyme Pfam Description: AMP-binding enzyme
  misc_feature (20)..(319): Homolog of NCBI NO: 112802 NR Description: 4-coumarate--CoA ligase 1 (4CL 1)
  misc_feature (20)..(319): Homolog of NCBI NO: 7188339 NR Description: 4-coumarate--CoA ligase 4CL3 [Lolium perenne]
  misc_feature (20)..(319): Homolog of NCBI NO: 7188337 NR Description: 4-coumarate--CoA ligase 4CL2 [Lolium perenne]
  misc_feature (33)..(319): Homolog of NCBI NO: 9651915 NR Description: 4-coumarate:coA ligase 2 [Rubus idaeus]
  misc_feature (27)..(319): Homolog of NCBI NO: 398965 NR Description: 4-coumarate--CoA ligase 2 (4CL 2)
  misc_feature (27)..(319): Homolog of NCBI NO: 398963 NR Description: 4-coumarate--CoA ligase 1 (4CL 1)
  misc_feature (27)..(319): Homolog of NCBI NO: 5163399 NR Description: 4-coumarate:coenzyme A ligase [Solanum tuberosum]
  misc_feature (29)..(319): Homolog of NCBI NO: 7437854 NR Description: 4-coumarate-CoA ligase (EC 6.2.1.12) 1
  misc_feature (27)..(319): Homolog of NCBI NO: 12229631 NR Description: 4-coumarate--CoA ligase 1 (4CL 1)
  misc_feature (24)..(319): Homolog of NCBI NO: 15218002 NR Description: 4-coumarate:CoA ligase 1; protein id: supported by cDNA: gi_20466561, supported by cDNA: gi_609339
KNLAHANRSQASVPLPVIAMGSTEKQEPEASPEIIFRSKLPDIAITNTHPLHRYCFERLPEVGERPCLIDGGTGAVLTYAEVDRLTRRLAAALRRAPLGLGRGSVAMNLMLNSAEFVLSFFAASRVGAAVTTANPMSTPHEIAGQIAASGATVVFTESMAADKLPAMGDKLTVVLIDARRDGCLHFWDDVMASVPDEEAGGGGGGEQDLDFDPDDVVALPYSSGTTGLPKGVMLTHRSLSTSVAQQVDGDNPNIGLTAADVVLCSLPMFHIYSLNTILMCGLRVGAAIVVVRRFDLRRMMELVERHRITVAPLVPPIVVGRGQERRGPRRTTCRRSGWCSPAPRPWGRTSRTRSWPSSPAPCSDRGTA

SEQ ID NO: 5378 - protein, 349 aa, Zea mays subsp. mays
  peptide (1)..(349): Ceres Seq. ID no. 12406777
  misc_feature (59)..(300): Pfam Name: AMP-binding enzyme Pfam Description: AMP-binding enzyme
  misc_feature (1)..(300): Homolog of NCBI NO: 112802 NR Description: 4-coumarate--CoA ligase 1 (4CL 1)
  misc_feature (1)..(300): Homolog of NCBI NO: 7188339 NR Description: 4-coumarate--CoA ligase 4CL3 [Lolium perenne]
  misc_feature (1)..(300): Homolog of NCBI NO: 7188337 NR Description: 4-coumarate--CoA ligase 4CL2 [Lolium perenne]
  misc_feature (14)..(300): Homolog of NCBI NO: 9651915 NR Description: 4-coumarate:coA ligase 2 [Rubus idaeus]
  misc_feature (8)..(300): Homolog of NCBI NO: 398965 NR Description: 4-coumarate--CoA ligase 2 (4CL 2)
  misc_feature (8)..(300): Homolog of NCBI NO: 398963 NR Description: 4-coumarate--CoA ligase 1 (4CL 1)
  misc_feature (8)..(300): Homolog of NCBI NO: 5163399 NR Description: 4-coumarate:coenzyme A ligase [Solanum tuberosum]
  misc_feature (10)..(300): Homolog of NCBI NO: 7437854 NR Description: 4-coumarate-CoA ligase (EC 6.2.1.12) 1
  misc_feature (8)..(300): Homolog of NCBI NO: 12229631 NR Description: 4-coumarate--CoA ligase 1 (4CL 1)
  misc_feature (5)..(300): Homolog of NCBI NO: 15218002 NR Description: 4-coumarate:CoA ligase 1; protein id: supported by cDNA: gi_20466561, supported by cDNA: gi_609339
MGSTEKQEPEASPEIIFRSKLPDIAITNTHPLHRYCFERLPEVGERPCLIDGGTGAVLTYAEVDRLTRRLAAALRRAPLGLGRGSVAMNLMLNSAEFVLSFFAASRVGAAVTTANPMSTPHEIAGQIAASGATVVFTESMAADKLPAMGDKLTVVLIDARRDGCLHFWDDVMASVPDEEAGGGGGGEQDLDFDPDDVVALPYSSGTTGLPKGVMLTHRSLSTSVAQQVDGDNPNIGLTAADVVLCSLPMFHIYSLNTILMCGLRVGAAIVVVRRFDLRRMMELVERHRITVAPLVPPIVVGRGQERRGPRRTTCRRSGWCSPAPRPWGRTSRTRSWPSSPAPCSDRGTA

SEQ ID NO: 5379 - DNA, 1366 bp, Zea mays subsp. mays
  misc_feature (1)..(1366): Ceres Seq. ID no. 12409557
  misc_feature: MA Experiment ID: 20000492 Result: Down-regulated in Transcription
  misc_feature: MA Experiment 20000492 PARAMETER Experiment Name: Zm_Hybrid_Seed_Dev_P Parameter: DAP Value: 12
  misc_feature: MA Experiment 20000492 PARAMETER Experiment Name: Zm_Hybrid_Seed_Dev_P Parameter: Organism Value: Zea mays
  misc_feature: MA Experiment 20000492 PARAMETER Experiment Name: Zm_Hybrid_Seed_Dev_P Parameter: Plant Line Value: 35A19
  misc_feature: MA Experiment 20000492 PARAMETER Experiment Name: Zm_Hybrid_Seed_Dev_P Parameter: Tissue Value: Fert Kernel vs. Unfert Floret
aaatgagcgccagctgtgcgccacagtaccccaaccgaccctgccggcgacggcgttcataaattgggctagggcaaaaactgattcgcgccgccacctctagagagaactgtagatccctgtcatccaatcacccaccatgcaatacctcaccgatgttgctcgctccaaggacctgctcaaggttgtaggccattcggtgatcaaggcgatgtgcgatggggagttcctcatgtcgaggaaatgggccgtcggtggccacgattgggaggtccacttgcgtcccaaggatcactcggagggccacgagcgcccggtgacgctgaggctcgtcttgatctccgaagcgcgcggcggcgacgtcaaggccaagctcagctgccgcctggttgatccgaccgggaggctgaagccgtcgaaggagaatagcaaatcgcataagttctacaagtccggcgattactccggtgcaatccaggtgacgggaagagaggatctggagaagtctggctacctggtggacgattcctacaccgtggagtgcagcatcacggtgctaaaaaaagcgccggcgcggaatactgcggctgcggctgcggcgacggccatggatcgcgatgctgcgatgctgccgtccctcgaactgcaccggcacttgggcgaacttctgcagaaggggacgggcgcggacgtcacgttccatgtgtccggcgagaagttcgccgcgcacaaggccatccttgcctcgaggtcgccggtgttcatggcggagctgtttgggggaatgaaggaggaggcgtcccggcacatcgaggtgaaggacataaagcccgcggcgttcaaggccgtgcttcgcttcatctacactggcacggcgccggaactggacaagaagggcgacggcgggacgtcgttggcgcagcatctgcttgccggcgcggacaggtacggcctggacatgctcaaacttatctgcgtgggctggctcgcggaccgcatcaccgtcgacacggtggcgaccacactggcgctagcggagcagcatggctgctcgcagctcaaggctagctgcatcgagttcatcgcgggatatcttgacgccgtcctggagacagaggggtacaagcacctggaagcaagctgcccctcggtgctcactgatatcctcaaggctacgctgcgaccaaccaattgaagcgtcgagcgggatgactccatcttcatgtgaacgatcagttacactagttgctacattctttatctttcatccacttctgattctggaatcttgatgcagtaattctggccttggcaacatgttcagaatcattgcttctctatttcagattatattttccagttttgc

SEQ ID NO: 5380 - protein, 351 aa, Zea mays subsp. mays
  peptide (1)..(351): Ceres Seq. ID no. 12409558
  misc_feature (173)..(279): Pfam Name: BTB/POZ domain Pfam Description: BTB/POZ domain
  misc_feature (2)..(347): Homolog of NCBI NO: 38636861 NR Description: putative speckle-type POZ protein [Oryza sativa
  misc_feature (5)..(346): Homolog of NCBI NO: 38636858 NR Description: zinc finger POZ domain protein-like [Oryza sativa
  misc_feature (15)..(343): Homolog of NCBI NO: 32488782 NR Description: OSJNBb0060E08.3 [Oryza sativa (japonica
  misc_feature (13)..(343): Homolog of NCBI NO: 37534534 NR Description: putative speckle-type protein [Oryza sativa
  misc_feature (4)..(349): Homolog of NCBI NO: 37534574 NR Description: putative speckle-type protein [Oryza sativa
  misc_feature (1)..(348): Homolog of NCBI NO: 18397497 NR Description: expressed protein; protein id: At3g06190.1, by cDNA: gi_15028068, supported by cDNA: gi_20259304 [Arabidopsis >gi|6862923|gb|AAF30312.1|AC018907_12 unknown protein
  misc_feature (113)..(343): Homolog of NCBI NO: 37534590 NR Description: putative speckle-type protein [Oryza sativa
  misc_feature (13)..(66): Homolog of NCBI NO: 37534590 NR Description: putative speckle-type protein [Oryza sativa
  misc_feature (1)..(344): Homolog of NCBI NO: 23617108 NR Description: contains ESTs to Arabidopsis thaliana chromosome 5, At5g19000~unknown protein
  misc_feature (1)..(343): Homolog of NCBI NO: 37534588 NR Description: putative speckle-type protein [Oryza sativa
MQYLTDVARSKDLLKVVGHSVIKAMCDGEFLMSRKWAVGGHDWEVHLRPKDHSEGHERPVTLRLVLISEARGGDVKAKLSCRLVDPTGRLKPSKENSKSHKFYKSGDYSGAIQVTGREDLEKSGYLVDDSYTVECSITVLKKAPARNTAAAAAATAMDRDAAMLPSLELHRHLGELLQKGTGADVTFHVSGEKFAAHKAILASRSPVFMAELFGGMKEEASRHIEVKDIKPAAFKAVLRFIYTGTAPELDKKGDGGTSLAQHLLAGADRYGLDMLKLICVGWLADRITVDTVATTLALAEQHGCSQLKASCIEFIAGYLDAVLETEGYKHLEASCPSVLTDILKATLRPTN

SEQ ID NO: 5381 - protein, 327 aa, Zea mays subsp. mays
  peptide (1)..(327): Ceres Seq. ID no. 12409559
  misc_feature (149)..(255): Pfam Name: BTB/POZ domain Pfam Description: BTB/POZ domain
  misc_feature (1)..(323): Homolog of NCBI NO: 38636861 NR Description: putative speckle-type POZ protein [Oryza sativa
  misc_feature (1)..(322): Homolog of NCBI NO: 38636858 NR Description: zinc finger POZ domain protein-like [Oryza sativa
  misc_feature (1)..(319): Homolog of NCBI NO: 32488782 NR Description: OSJNBb0060E08.3 [Oryza sativa (japonica
  misc_feature (1)..(319): Homolog of NCBI NO: 37534534 NR Description: putative speckle-type protein [Oryza sativa
  misc_feature (1)..(325): Homolog of NCBI NO: 37534574 NR Description: putative speckle-type protein [Oryza sativa
  misc_feature (1)..(324): Homolog of NCBI NO: 18397497 NR Description: expressed protein; protein id: At3g06190.1, by cDNA: gi_15028068, supported by cDNA: gi_20259304 [Arabidopsis >gi|6862923|gb|AAF30312.1|AC018907_12 unknown protein
  misc_feature (89)..(319): Homolog of NCBI NO: 37534590 NR Description: putative speckle-type protein [Oryza sativa
  misc_feature (1)..(42): Homolog of NCBI NO: 37534590 NR Description: putative speckle-type protein [Oryza sativa
  misc_feature (1)..(320): Homolog of NCBI NO: 23617108 NR Description: contains ESTs to Arabidopsis thaliana chromosome 5, At5g19000~unknown protein
  misc_feature (1)..(319): Homolog of NCBI NO: 37534588 NR Description: putative speckle-type protein [Oryza sativa
MCDGEFLMSRKWAVGGHDWEVHLRPKDHSEGHERPVTLRLVLISEARGGDVKAKLSCRLVDPTGRLKPSKENSKSHKFYKSGDYSGAIQVTGREDLEKSGYLVDDSYTVECSITVLKKAPARNTAAAAAATAMDRDAAMLPSLELHRHLGELLQKGTGADVTFHVSGEKFAAHKAILASRSPVFMAELFGGMKEEASRHIEVKDIKPAAFKAVLRFIYTGTAPELDKKGDGGTSLAQHLLAGADRYGLDMLKLICVGWLADRITVDTVATTLALAEQHGCSQLKASCIEFIAGYLDAVLETEGYKHLEASCPSVLTDILKATLRPTN

SEQ ID NO: 5382 - protein, 320 aa, Zea mays subsp. mays
  peptide (1)..(320): Ceres Seq. ID no. 12409560
  misc_feature (142)..(248): Pfam Name: BTB/POZ domain Pfam Description: BTB/POZ domain
  misc_feature (1)..(316): Homolog of NCBI NO: 38636861 NR Description: putative speckle-type POZ protein [Oryza sativa
  misc_feature (1)..(315): Homolog of NCBI NO: 38636858 NR Description: zinc finger POZ domain protein-like [Oryza sativa
  misc_feature (1)..(312): Homolog of NCBI NO: 32488782 NR Description: OSJNBb0060E08.3 [Oryza sativa (japonica
  misc_feature (1)..(312): Homolog of NCBI NO: 37534534 NR Description: putative speckle-type protein [Oryza sativa
  misc_feature (1)..(318): Homolog of NCBI NO: 37534574 NR Description: putative speckle-type protein [Oryza sativa
  misc_feature (1)..(317): Homolog of NCBI NO: 18397497 NR Description: expressed protein; protein id: At3g06190.1, by cDNA: gi_15028068, supported by cDNA: gi_20259304 [Arabidopsis >gi|6862923|gb|AAF30312.1|AC018907_12 unknown protein
  misc_feature (82)..(312): Homolog of NCBI NO: 37534590 NR Description: putative speckle-type protein [Oryza sativa
  misc_feature (1)..(35): Homolog of NCBI NO: 37534590 NR Description: putative speckle-type protein [Oryza sativa
  misc_feature (1)..(313): Homolog of NCBI NO: 23617108 NR Description: contains ESTs to Arabidopsis thaliana chromosome 5, At5g19000~unknown protein
  misc_feature (1)..(312): Homolog of NCBI NO: 37534588 NR Description: putative speckle-type protein [Oryza sativa
MSRKWAVGGHDWEVHLRPKDHSEGHERPVTLRLVLISEARGGDVKAKLSCRLVDPTGRLKPSKENSKSHKFYKSGDYSGAIQVTGREDLEKSGYLVDDSYTVECSITVLKKAPARNTAAAAAATAMDRDAAMLPSLELHRHLGELLQKGTGADVTFHVSGEKFAAHKAILASRSPVFMAELFGGMKEEASRHIEVKDIKPAAFKAVLRFIYTGTAPELDKKGDGGTSLAQHLLAGADRYGLDMLKLICVGWLADRITVDTVATTLALAEQHGCSQLKASCIEFIAGYLDAVLETEGYKHLEASCPSVLTDILKATLRPTN

SEQ ID NO: 5383 - DNA, 1106 bp, Zea mays subsp. mays
  misc_feature (1)..(1106): Ceres Seq. ID no. 12409553
  misc_feature: MA Experiment ID: 108535 Result: Up-regulated in Transcription
  misc_feature: MA Experiment 108535 PARAMETER Experiment Name: Zm_Meristem_P Parameter: Age (day) Value: 8
  misc_feature: MA Experiment 108535 PARAMETER Experiment Name: Zm_Meristem_P Parameter: Organism Value: Zea mays
  misc_feature: MA Experiment 108535 PARAMETER Experiment Name: Zm_Meristem_P Parameter: Plant Line Value: 35A19
  misc_feature: MA Experiment 108535 PARAMETER Experiment Name: Zm_Meristem_P Parameter: Tissue Value: Root Meristem vs. Above Root Meristem
  misc_feature: MA Experiment ID: 108543 Result: Up-regulated in Transcription
  misc_feature: MA Experiment ID: 20000535 Result: Up-regulated in Transcription
  misc_feature: MA Experiment 20000535 PARAMETER Experiment Name: Zm_Hybrid_Seed_Dev_P Parameter: DAP Value: 30 vs. 12
  misc_feature: MA Experiment 20000535 PARAMETER Experiment Name: Zm_Hybrid_Seed_Dev_P Parameter: Organism Value: Zea mays
  misc_feature: MA Experiment 20000535 PARAMETER Experiment Name: Zm_Hybrid_Seed_Dev_P Parameter: Plant Line Value: 35A19
  misc_feature: MA Experiment 20000535 PARAMETER Experiment Name: Zm_Hybrid_Seed_Dev_P Parameter: Tissue Value: Embryo vs. Unfert Floret
aaaaatttcgaactcgtattaacggtcggcggtgggtgtggagcgggacggggcggcgagatcacgacgagatggagactgacatctcttcatgcggaggcggcggcgcccaacagggggtataggacctgtggaggtgcaagcggcgacggcagcactgcggcggtcagaggtgttccacgtcttgaaggagctcgtaggcttcgtcctctacatgcaccaccagatcccctcggttttgccgagtcttgaaaatgaatttgcaagtttaaaggaggaaatgacagaaatggcattacaaccagctgaactcaaaccatctgatcggagaaagtacaacacacgaaaaacggaggttagacgtagaataaagaagcacgagaagttgatgaatggcatctctaccttactctgttctcttcagcacgcacttgatgaagtttctagcattgaaggagttgtcctgatacttggaggaagccttgtacggcccctatttgtttatgacattacaatttctcatggtatctttggtccaggaagtgccaaagaacatgctctaaccaagttagcccaatctgtttctcggaaggctatccgtgctcttgtatcacgtggagctgggagtctgtcctacacaggacctagcaagttgtttttgttggtaagatgctccagtacattaaagctaccactggatttcctgccaaagcttgattttcgttacagcaaaaaggttgtacctcttcaaatgcatataaagtgcagtaaatcagggtgttcagggcataaccagcaccatatgcctcttgttgattccccatgttacttcagaatcttctctttcagatgttatttggttccagtgcaagcatacaataagaggtttaccaggcaaggcgtcactagaagggtgatgtgttcatgatatcaaagtttacccaacatgtctttgttgttgtagcgagtaatataacatatatgtacagtagatgatgcttattactttgatgaattgtagcgagtaatatcaaatcagttactacgtaccttgtgtaaagcaacttttgctagttttcaagcaaattaatccgatgttcggttgg

SEQ ID NO: 5384 - protein, 278 aa, Zea mays subsp. mays
  peptide (1)..(278): Ceres Seq. ID no. 12409554
  misc_feature (14)..(255): Homolog of NCBI NO: 15218734 NR Description: hypothetical protein; protein id: At1g03180.1
MRRRRRPTGGIGPVEVQAATAALRRSEVFHVLKELVGFVLYMHHQIPSVLPSLENEFASLKEEMTEMALQPAELKPSDRRKYNTRKTEVRRRIKKHEKLMNGISTLLCSLQHALDEVSSIEGVVLILGGSLVRPLFVYDITISHGIFGPGSAKEHALTKLAQSVSRKAIRALVSRGAGSLSYTGPSKLFLLVRCSSTLKLPLDFLPKLDFRYSKKVVPLQMHIKCSKSGCSGHNQHHMPLVDSPCYFRIFSFRCYLVPVQAYNKRFTRQGVTRRVMCS

SEQ ID NO: 5385 - protein, 237 aa, Zea mays subsp. mays
  peptide (1)..(237): Ceres Seq. ID no. 12409555
  misc_feature (1)..(214): Homolog of NCBI NO: 15218734 NR Description: hypothetical protein; protein id: At1g03180.1
MHHQIPSVLPSLENEFASLKEEMTEMALQPAELKPSDRRKYNTRKTEVRRRIKKHEKLMNGISTLLCSLQHALDEVSSIEGVVLILGGSLVRPLFVYDITISHGIFGPGSAKEHALTKLAQSVSRKAIRALVSRGAGSLSYTGPSKLFLLVRCSSTLKLPLDFLPKLDFRYSKKVVPLQMHIKCSKSGCSGHNQHHMPLVDSPCYFRIFSFRCYLVPVQAYNKRFTRQGVTRRVMCS

SEQ ID NO: 5386 - protein, 215 aa, Zea mays subsp. mays
  peptide (1)..(215): Ceres Seq. ID no. 12409556
  misc_feature (1)..(192): Homolog of NCBI NO: 15218734 NR Description: hypothetical protein; protein id: At1g03180.1
MTEMALQPAELKPSDRRKYNTRKTEVRRRIKKHEKLMNGISTLLCSLQHALDEVSSIEGVVLILGGSLVRPLFVYDITISHGIFGPGSAKEHALTKLAQSVSRKAIRALVSRGAGSLSYTGPSKLFLLVRCSSTLKLPLDFLPKLDFRYSKKVVPLQMHIKCSKSGCSGHNQHHMPLVDSPCYFRIFSFRCYLVPVQAYNKRFTRQGVTRRVMCS

SEQ ID NO: 5387 - DNA, 1616 bp, Zea mays subsp. mays
  misc_feature (1)..(1616): Ceres Seq. ID no. 12369186
  misc_feature: MA Experiment ID: 108543 Result: Down-regulated in Transcription
  misc_feature: MA Experiment ID: 108544 Result: Down-regulated in Transcription
  misc_feature: MA Experiment ID: 20000487 Result: Up-regulated in Transcription
  misc_feature: MA Experiment 20000487 PARAMETER Experiment Name: Zm_50mM_NH4NO3_L_to_H_P Parameter: Organism Value: Zea mays
  misc_feature: MA Experiment 20000487 PARAMETER Experiment Name: Zm_50mM_NH4NO3_L_to_H_P Parameter: Timepoint (hr) Value: 4
  misc_feature: MA Experiment 20000487 PARAMETER Experiment Name: Zm_50mM_NH4NO3_L_to_H_P Parameter: Tissue Value: Leaves
  misc_feature: MA Experiment 20000487 PARAMETER Experiment Name: Zm_50mM_NH4NO3_L_to_H_P Parameter: Treatment Value: 50mM NH4NO3 vs. 100mM Mannitol
  misc_feature: MA Experiment ID: 20000626 Result: Up-regulated in Transcription
  misc_feature: MA Experiment 20000626 PARAMETER Experiment Name: Zm_Herbicide-Treatments_P Parameter: Timepoint (hr) Value: 12
  misc_feature: MA Experiment 20000626 PARAMETER Experiment Name: Zm_Herbicide-Treatments_P Parameter: Tissue Value: Aerial
  misc_feature: MA Experiment 20000626 PARAMETER Experiment Name: Zm_Herbicide-Treatments_P Parameter: Treatment Value: Roundup vs. No Treatment
acacaatcgaccaccgtctctgttctcccctcacttgaggcctccccacacgccgccgcattcggacgctcgcctcccaaaaccccacgaagagatgcatctgccgccgctgcggcgtgtaccggcggcgctgctagtgccggcgcgcggcctcctcgaggcgcgcgtgccttgggtgcgagaacgggccctcgaccacgtcgtggagcgggagcgccacctggtgccgtttctccttgccaaggacgtgctcctcgccgccacgccgccgccgcacgccgtgccgctgcactcgctgccctccacaatccctttcccgttccgcccgctgcgcttcctgcggctctacccctcggcgttcgcgctctcgccgcaccccatcgaggtctccccgacgccccggctctcggcgctccacgccgccgaggcgcaggccgtcgacgccaccgtccccgacgcggctgaccgtctgcttcggctgctcatgctcgccccctctcgcgcgctcccgctccgcctcgtcgcgcgcctccggctcgacctcggcctcgcgtaccgacttccaacgctcgctgctccccaactacccggattacttcgcgctctccccggacggcagcctcctcgagctcgtctgctacaggaaggatctcgccgtgtcgtcgatgcagtcctacgcgcagcgcaccggcggctacaaggtcggcgacgcggtcgccttcccactctcgttccccagaggattcgagcttgacaagaaggtgcgcaaatggttagacgagtggcagaggctgccgtacatttcgccctatgaggatgggtcgcacctaacgccaaggagtgacataacggagaagaggaccgtggcggtgctgcacgaggtcctgagtctcacggttgggaagaagatggagaaggaggtgttggtcaagcttggggaggcgctgcggttgccaccaggattcaggaaggtggtggctaagcaccctgggattttctacatatcgcacaagctgaggacacagacggtagttctcagggaatcataccggaggcatatgcttgtggacaagcaccccatgatggggataaggtatcagtatatgcatttgatgcatatggggaaggaggaagttggaaagggcaagggcaaagatcgaaggagtagtcgcagtgaacaaatcatcggggaagagtttggtgccacagtggatgatgatgaaaatgaggagtatgatgatgaagacgacgtggctgaagatgacatggaagtgggtgttgcttccgaggatcaggacagtgacgacgatgttgatgaggatataaaggaacaaatttcttattgattttttgagttgggaagtggcaaccgcacttcaagtggtggtgctcgtacatctctttgttggactgcatgaatgtgcagggaacacagaaatacagatgtacaatcaatcctggtgaccggtagaaaccctattagaagatagagcatgtttttgtttatcacacagtgaagtacttagtgacactcaagcgtatcctctattgttgacatgcttagtgacttgttgtatcatggtggcttcacctaagctattcatctaagggttgac

SEQ ID NO: 5388 - protein, 250 aa, Zea mays subsp. mays
  peptide (1)..(250): Ceres Seq. ID no. 12369187
  misc_feature (58)..(205): Pfam Name: Plant specific of unknown function (DUF860) Pfam Description: Plant specific of unknown function (DUF860)
  misc_feature (52)..(205): Homolog of NCBI NO: 15217597 NR Description: hypothetical protein; protein id: At1g71850.1
  misc_feature (52)..(205): Homolog of NCBI NO: 3413424 NR Description: hypothetical protein [Arabidopsis thaliana]
  misc_feature (50)..(185): Homolog of NCBI NO: 15238875 NR Description: putative protein; protein id: At5g48040.1 thaliana] >gi|10177755|dbj|BAB11068.1|
  misc_feature (45)..(210): Homolog of NCBI NO: 34894384 NR Description: unnamed protein product [Oryza sativa (japonica group)] >gi|8468041|dbj|BAA96641.1| unnamed protein product
  misc_feature (40)..(213): Homolog of NCBI NO: 37535960 NR Description: hypothetical protein [Oryza sativa (japonica group)] >gi|15144302|gb|AAK84443.1| hypothetical protein [Oryza
  misc_feature (60)..(220): Homolog of NCBI NO: 15221480 NR Description: hypothetical protein; protein id: At1g06440.1 thaliana] >gi|6692684|gb|AAF24818.1|AC007592_11 F12K11.21
HNRPPSLFSPHLRPPHTPPHSDARLPKPHEEMHLPPLRRVPAALLVPARGLLEARVPWVRERALDHVVERERHLVPFLLAKDVLLAATPPPHAVPLHSLPSTIPFPFRPLRFLRLYPSAFALSPHPIEVSPTPRLSALHAAEAQAVDATVPDAADRLLRLLMLAPSRALPLRLVARLRLDLGLAYRLPTLAAPQLPGLLRALPGRQPPRARLLQEGSRRVVDAVLRAAHRRLQGRRRGRLPTLVPQRIRA

SEQ ID NO: 5389 - protein, 226 aa, Zea mays subsp. mays
  peptide (1)..(226): Ceres Seq. ID no. 12369188
  misc_feature (1)..(156): Pfam Name: Plant specific of unknown function (DUF860) Pfam Description: Plant specific of unknown function (DUF860)
  misc_feature (1)..(219): Homolog of NCBI NO: 15217597 NR Description: hypothetical protein; protein id: At1g71850.1
  misc_feature (1)..(219): Homolog of NCBI NO: 3413424 NR Description: hypothetical protein [Arabidopsis thaliana]
  misc_feature (1)..(192): Homolog of NCBI NO: 15238875 NR Description: putative protein; protein id: At5g48040.1 thaliana] >gi|10177755|dbj|BAB11068.1|
  misc_feature (1)..(206): Homolog of NCBI NO: 34894384 NR Description: unnamed protein product [Oryza sativa (japonica group)] >gi|8468041|dbj|BAA96641.1| unnamed protein product
  misc_feature (1)..(174): Homolog of NCBI NO: 15233788 NR Description: putative protein; protein id: At4g24320.1
  misc_feature (1)..(198): Homolog of NCBI NO: 11282335 NR Description: hypothetical protein F14P22.110 - Arabidopsis >gi|6735369|emb|CAB68190.1| putative protein [Arabidopsis
  misc_feature (1)..(198): Homolog of NCBI NO: 18410975 NR Description: putative protein; protein id: At3g58520.1, by cDNA: 112338., supported by cDNA: gi_15810015 [Arabidopsis >gi|15810016|gb|AAL06935.1| AT3g58520/F14P22_110 [Arabidopsis
  misc_feature (1)..(198): Homolog of NCBI NO: 21536812 NR Description: unknown [Arabidopsis thaliana]
  misc_feature (1)..(170): Homolog of NCBI NO: 37535960 NR Description: hypothetical protein [Oryza sativa (japonica group)] >gi|15144302|gb|AAK84443.1| hypothetical protein [Oryza
  misc_feature (18)..(172): Homolog of NCBI NO: 15221480 NR Description: hypothetical protein; protein id: At1g06440.1 thaliana] >gi|6692684|gb|AAF24818.1|AC007592_11 F12K11.21
MQSYAQRTGGYKVGDAVAFPLSFPRGFELDKKVRKWLDEWQRLPYISPYEDGSHLTPRSDITEKRTVAVLHEVLSLTVGKKMEKEVLVKLGEALRLPPGFRKVVAKHPGIFYISHKLRTQTVVLRESYRRHMLVDKHPMMGIRYQYMHLMHMGKEEVGKGKGKDRRSSRSEQIIGEEFGATVDDDENEEYDDEDDVAEDDMEVGVASEDQDSDDDVDEDIKEQISY

SEQ ID NO: 5390 - protein, 219 aa, Zea mays subsp. mays
  peptide (1)..(219): Ceres Seq. ID no. 12369189
  misc_feature (27)..(174): Pfam Name: Plant specific of unknown function (DUF860) Pfam Description: Plant specific of unknown function (DUF860)
  misc_feature (21)..(174): Homolog of NCBI NO: 15217597 NR Description: hypothetical protein; protein id: At1g71850.1
  misc_feature (21)..(174): Homolog of NCBI NO: 3413424 NR Description: hypothetical protein [Arabidopsis thaliana]
  misc_feature (19)..(154): Homolog of NCBI NO: 15238875 NR Description: putative protein; protein id: At5g48040.1 thaliana] >gi|10177755|dbj|BAB11068.1|
  misc_feature (14)..(179): Homolog of NCBI NO: 34894384 NR Description: unnamed protein product [Oryza sativa (japonica group)] >gi|8468041|dbj|BAA96641.1| unnamed protein product
  misc_feature (9)..(182): Homolog of NCBI NO: 37535960 NR Description: hypothetical protein [Oryza sativa (japonica group)] >gi|15144302|gb|AAK84443.1| hypothetical protein [Oryza
  misc_feature (29)..(189): Homolog of NCBI NO: 15221480 NR Description: hypothetical protein; protein id: At1g06440.1 thaliana] >gi|6692684|gb|AAF24818.1|AC007592_11 F12K11.21
MHLPPLRRVPAALLVPARGLLEARVPWVRERALDHVVERERHLVPFLLAKDVLLAATPPPHAVPLHSLPSTIPFPFRPLRFLRLYPSAFALSPHPIEVSPTPRLSALHAAEAQAVDATVPDAADRLLRLLMLAPSRALPLRLVARLRLDLGLAYRLPTLAAPQLPGLLRALPGRQPPRARLLQEGSRRVVDAVLRAAHRRLQGRRRGRLPTLVPQRIRA

SEQ ID NO: 5391 - DNA, 1689 bp, Zea mays subsp. mays
  misc_feature (1)..(1689): Ceres Seq. ID no. 13498301
  misc_feature: MA Experiment ID: 108529 Result: Up-regulated in Transcription
  misc_feature: MA Experiment 108529 PARAMETER Experiment Name: Zm_Imbibed_Seeds_P Parameter: Age (day) Value: 5 vs. 2
  misc_feature: MA Experiment 108529 PARAMETER Experiment Name: Zm_Imbibed_Seeds_P Parameter: Organism Value: Zea mays
  misc_feature: MA Experiment 108529 PARAMETER Experiment Name: Zm_Imbibed_Seeds_P Parameter: Plant Line Value: 35A19
  misc_feature: MA Experiment 108529 PARAMETER Experiment Name: Zm_Imbibed_Seeds_P Parameter: Tissue Value: Roots vs. Embryo
  misc_feature: MA Experiment ID: 108534 Result: Down-regulated in Transcription
  misc_feature: MA Experiment 108534 PARAMETER Experiment Name: Zm_4deg_Cold_P Parameter: Age (hr) Value: 8
  misc_feature: MA Experiment 108534 PARAMETER Experiment Name: Zm_4deg_Cold_P Parameter: Organism Value: Zea mays
  misc_feature: MA Experiment 108534 PARAMETER Experiment Name: Zm_4deg_Cold_P Parameter: Plant Line Value: 35A19
  misc_feature: MA Experiment 108534 PARAMETER Experiment Name: Zm_4deg_Cold_P Parameter: Temperature (deg C) Value: 4 vs. 22
  misc_feature: MA Experiment 108534 PARAMETER Experiment Name: Zm_4deg_Cold_P Parameter: Timepoint (hr) Value: 6
  misc_feature: MA Experiment 108534 PARAMETER Experiment Name: Zm_4deg_Cold_P Parameter: Tissue Value: Aerial
  misc_feature: MA Experiment ID: 108545 Result: Down-regulated in Transcription
  misc_feature: MA Experiment 108545 PARAMETER Experiment Name: Zm_Imbibed_Seeds_P Parameter: Age (day) Value: 3 vs. 2
  misc_feature: MA Experiment 108545 PARAMETER Experiment Name: Zm_Imbibed_Seeds_P Parameter: Organism Value: Zea mays
  misc_feature: MA Experiment 108545 PARAMETER Experiment Name: Zm_Imbibed_Seeds_P Parameter: Plant Line Value: 35A19
  misc_feature: MA Experiment 108545 PARAMETER Experiment Name: Zm_Imbibed_Seeds_P Parameter: Tissue Value: Aerial vs. Embryo
  misc_feature: MA Experiment ID: 108546 Result: Up-regulated in Transcription
  misc_feature: MA Experiment 108546 PARAMETER Experiment Name: Zm_Imbibed_Seeds_P Parameter: Age (day) Value: 3 vs. 2
  misc_feature: MA Experiment 108546 PARAMETER Experiment Name: Zm_Imbibed_Seeds_P Parameter: Organism Value: Zea mays
  misc_feature: MA Experiment 108546 PARAMETER Experiment Name: Zm_Imbibed_Seeds_P Parameter: Plant Line Value: 35A19
  misc_feature: MA Experiment 108546 PARAMETER Experiment Name: Zm_Imbibed_Seeds_P Parameter: Tissue Value: Roots vs. Embryo
  misc_feature: MA Experiment ID: 20000492 Result: Down-regulated in Transcription
  misc_feature: MA Experiment 20000492 PARAMETER Experiment Name: Zm_Hybrid_Seed_Dev_P Parameter: DAP Value: 12
  misc_feature: MA Experiment 20000492 PARAMETER Experiment Name: Zm_Hybrid_Seed_Dev_P Parameter: Organism Value: Zea mays
  misc_feature: MA Experiment 20000492 PARAMETER Experiment Name: Zm_Hybrid_Seed_Dev_P Parameter: Plant Line Value: 35A19
  misc_feature: MA Experiment 20000492 PARAMETER Experiment Name: Zm_Hybrid_Seed_Dev_P Parameter: Tissue Value: Fert Kernel vs. Unfert Floret
  misc_feature: MA Experiment ID: 20000534 Result: Down-regulated in Transcription
  misc_feature: MA Experiment 20000534 PARAMETER Experiment Name: Zm_Hybrid_Pollen_P Parameter: Age (day) Value: 8
  misc_feature: MA Experiment 20000534 PARAMETER Experiment Name: Zm_Hybrid_Pollen_P Parameter: Organism Value: Zea mays
  misc_feature: MA Experiment 20000534 PARAMETER Experiment Name: Zm_Hybrid_Pollen_P Parameter: Plant Line Value: 35A19
  misc_feature: MA Experiment 20000534 PARAMETER Experiment Name: Zm_Hybrid_Pollen_P Parameter: Tissue Value: Pollen vs. Aerial
acagttgttgaaccttgagactactagctagagagacaaatatccaggccgaangagaagaggtctgagcgaggagacgacgcccgcgccatggcaggcgccagcnccaccaacggcggaggcaacggcggaggcgggaaggtggtcagcatgccgctgcagtacttctgcgtgctggcggcggtggtggtggccgtgatggtgctgtcgctgtcgttcatgtcgccggcggccatggtggccgtccgccagaacctcagctccgtggcggccgcccccggtggcagcagcaacagcaccggcggcggcgccggagcgggaggcgccgccggcctggccgaggcgtcaccgccggcgggctggaaggagaaggagcaggcgcggcggccgcccgtggtgctgttcaacttcggcgactccaactccgacaccggaggcgtggcggcggccggcgggatacggatcatgccgccggagggccgcacctacttccaccaccccacgggccggctctccgacggccgcgtcatcatcgactttatctgtgagagtctgggcacgcgtgaactgaacccatacctcaggggaattggttcggactacagcaacggcgtcaacttcgccatggcaggctcgacggtgacccacggcgtctctccctactccttgaacgtccaggtcgaccagttcggtctacttcaggcacaggtccccttgagatgttcgaacgaggactggaaggcccggtgagcaaggaggggtttgagagcgctctgtacatgatggacatcggccacaacgacatggttggtgtggcgcacacaccgtccgatcagtgggacaagaagatcacagagatcgtcggcgaggtcagacaagccatctcgatcctgtacgacaacggagcgaggaagttctggatccacggcacgggcgccctggggtgcctgccggcgctggtggtgcaggagacgaagggcgagcaggacaagcacggctgcctcgccggcgtcaacagggccgccaaggcgttcaacaggaagctcagccagctctgcgacgacctccgcttccacctcaagggcgccaccgtcgtctacaccgacatgttcgccatcaagtacgacttcgtcgccaaccacaccaaatacgggatcgagtggccgttcatggtgtgctgtggcaacggcgggccgccgtacaacatgaagcagggaagacccggctgtggcgacctgtgcccaccggaggcgaaggtggtcagctgggatggcgtgcacttcacggatttcggcagcggccttgctgccaagcttgcgatgagcggggagtactccaagcccagggtgaagctggcaagcttgatccatggcggatccaagaaaacgtcagactcttgatgcggaccattgaccgagtcgtgacctttggatccacatctatggaatggaagatgggtagcggtgaagaattggagggatatcttgcaccaggctgtttcttgacgaagattgactccttgtacacactacacagaactactacagaaggcaaagtagcactgggaatgctcagttacaagcttaagttaatttgctgtctttttattttgggattttgtgctgcagagtacagagattttgtaccttgatgtacgtgtaactatttatgatagttcttacaagctcc

SEQ ID NO: 5392 - protein, 226 aa, Zea mays subsp. mays
  peptide (1)..(226): Ceres Seq. ID no. 13498302
  misc_feature (1)..(197): Pfam Name: GDSL-like Lipase/Acylhydrolase Pfam Description: GDSL-like Lipase/Acylhydrolase
  misc_feature (1)..(217): Homolog of NCBI NO: 34894838 NR Description: putative lipase homolog [Oryza sativa (japonica group)] >gi|13365800|dbj|BAB39238.1| putative lipase homolog
  misc_feature (1)..(210): Homolog of NCBI NO: 34894866 NR Description: putative lipase homolog [Oryza sativa (japonica group)] >gi|14164537|dbj|BAB55786.1| putative lipase homolog
  misc_feature (10)..(208): Homolog of NCBI NO: 15217506 NR Description: GDSL-motif lipase/hydrolase protein [Arabidopsis
  misc_feature (10)..(208): Homolog of NCBI NO: 15223585 NR Description: GDSL-motif lipase/hydrolase protein [Arabidopsis
  misc_feature (1)..(211): Homolog of NCBI NO: 34894844 NR Description: putative lipase homolog [Oryza sativa (japonica group)] >gi|13365803|dbj|BAB39241.1| putative lipase homolog
  misc_feature (10)..(189): Homolog of NCBI NO: 25336281 NR Description: lipase-like protein Lip-4 [imported] - thaliana (fragment) >gi|3220021|gb|AAC23651.1| lipase homolog
  misc_feature (15)..(217): Homolog of NCBI NO: 30909057 NR Description: ENSP-like protein [Hevea brasiliensis]
  misc_feature (1)..(208): Homolog of NCBI NO: 25405771 NR Description: hypothetical protein T22H22.20 [imported] - thaliana >gi|3776573|gb|AAC64890.1| Similar to nodulins and homolog F14J9.5 gi|3482914 from Arabidopsis thaliana BAC
  misc_feature (12)..(212): Homolog of NCBI NO: 15241404 NR Description: GDSL-motif lipase/hydrolase protein [Arabidopsis
  misc_feature (10)..(212): Homolog of NCBI NO: 25457244 NR Description: early nodule-specific protein ENOD8 [imported] -
MFERGLEGPVSKEGFESALYMMDIGHNDMVGVAHTPSDQWDKKITEIVGEVRQAISILYDNGARKFWIHGTGALGCLPALVVQETKGEQDKHGCLAGVNRAAKAFNRKLSQLCDDLRFHLKGATVVYTDMFAIKYDFVANHTKYGIEWPFMVCCGNGGPPYNMKQGRPGCGDLCPPEAKVVSWDGVHFTDFGSGLAAKLAMSGEYSKPRVKLASLIHGGSKKTSDS

SEQ ID NO: 5393 - protein, 219 aa, Zea mays subsp. mays
  peptide (1)..(219): Ceres Seq. ID no. 13498303
  misc_feature (104)..(200): Pfam Name: GDSL-like Lipase/Acylhydrolase Pfam Description: GDSL-like Lipase/Acylhydrolase
  misc_feature (11)..(200): Homolog of NCBI NO: 34894838 NR Description: putative lipase homolog [Oryza sativa (japonica group)] >gi|13365800|dbj|BAB39238.1| putative lipase homolog
  misc_feature (48)..(200): Homolog of NCBI NO: 34894866 NR Description: putative lipase homolog [Oryza sativa (japonica group)] >gi|14164537|dbj|BAB55786.1| putative lipase homolog
  misc_feature (100)..(200): Homolog of NCBI NO: 15217506 NR Description: GDSL-motif lipase/hydrolase protein [Arabidopsis
  misc_feature (99)..(217): Homolog of NCBI NO: 15223585 NR Description: GDSL-motif lipase/hydrolase protein [Arabidopsis
  misc_feature (153)..(200): Homolog of NCBI NO: 34894844 NR Description: putative lipase homolog [Oryza sativa (japonica group)] >gi|13365803|dbj|BAB39241.1| putative lipase homolog
  misc_feature (108)..(217): Homolog of NCBI NO: 25336281 NR Description: lipase-like protein Lip-4 [imported] - thaliana (fragment) >gi|3220021|gb|AAC23651.1| lipase homolog
  misc_feature (104)..(200): Homolog of NCBI NO: 30909057 NR Description: ENSP-like protein [Hevea brasiliensis]
  misc_feature (101)..(200): Homolog of NCBI NO: 25405771 NR Description: hypothetical protein T22H22.20 [imported] - thaliana >gi|3776573|gb|AAC64890.1| Similar to nodulins and homolog F14J9.5 gi|3482914 from Arabidopsis thaliana BAC
  misc_feature (104)..(209): Homolog of NCBI NO: 15241404 NR Description: GDSL-motif lipase/hydrolase protein [Arabidopsis
  misc_feature (104)..(200): Homolog of NCBI NO: 25457244 NR Description: early nodule-specific protein ENOD8 [imported] -
  misc_feature (6)..(6): Xaa is any aa, unknown or other
MAGASXTNGGGNGGGGKVVSMPLQYFCVLAAVVVAVMVLSLSFMSPAAMVAVRQNLSSVAAAPGGSSNSTGGGAGAGGAAGLAEASPPAGWKEKEQARRPPVVLFNFGDSNSDTGGVAAAGGIRIMPPEGRTYFHHPTGRLSDGRVIIDFICESLGTRELNPYLRGIGSDYSNGVNFAMAGSTVTHGVSPYSLNVQVDQFGLLQAQVPLRCSNEDWKAR

SEQ ID NO: 5394 - protein, 206 aa, Zea mays subsp. mays
  peptide (1)..(206): Ceres Seq. ID no. 13498304
  misc_feature (1)..(177): Pfam Name: GDSL-like Lipase/Acylhydrolase Pfam Description: GDSL-like Lipase/Acylhydrolase
  misc_feature (1)..(188): Homolog of NCBI NO: 15223585 NR Description: GDSL-motif lipase/hydrolase protein [Arabidopsis
  misc_feature (1)..(191): Homolog of NCBI NO: 34894844 NR Description: putative lipase homolog [Oryza sativa (japonica group)] >gi|13365803|dbj|BAB39241.1| putative lipase homolog
  misc_feature (1)..(169): Homolog of NCBI NO: 25336281 NR Description: lipase-like protein Lip-4 [imported] - thaliana (fragment) >gi|3220021|gb|AAC23651.1| lipase homolog
  misc_feature (1)..(197): Homolog of NCBI NO: 30909057 NR Description: ENSP-like protein [Hevea brasiliensis]
  misc_feature (1)..(190): Homolog of NCBI NO: 34894866 NR Description: putative lipase homolog [Oryza sativa (japonica group)] >gi|14164537|dbj|BAB55786.1| putative lipase homolog
  misc_feature (1)..(188): Homolog of NCBI NO: 15217506 NR Description: GDSL-motif lipase/hydrolase protein [Arabidopsis
  misc_feature (1)..(197): Homolog of NCBI NO: 34894838 NR Description: putative lipase homolog [Oryza sativa (japonica group)] >gi|13365800|dbj|BAB39238.1| putative lipase homolog
  misc_feature (1)..(188): Homolog of NCBI NO: 25405771 NR Description: hypothetical protein T22H22.20 [imported] - thaliana >gi|3776573|gb|AAC64890.1| Similar to nodulins and homolog F14J9.5 gi|3482914 from Arabidopsis thaliana BAC
  misc_feature (1)..(192): Homolog of NCBI NO: 15241404 NR Description: GDSL-motif lipase/hydrolase protein [Arabidopsis
  misc_feature (1)..(192): Homolog of NCBI NO: 25457244 NR Description: early nodule-specific protein ENOD8 [imported] -
MMDIGHNDMVGVAHTPSDQWDKKITEIVGEVRQAISILYDNGARKFWIHGTGALGCLPALVVQETKGEQDKHGCLAGVNRAAKAFNRKLSQLCDDLRFHLKGATVVYTDMFAIKYDFVANHTKYGIEWPFMVCCGNGGPPYNMKQGRPGCGDLCPPEAKVVSWDGVHFTDFGSGLAAKLAMSGEYSKPRVKLASLIHGGSKKTSDS

SEQ ID NO: 5395 - DNA, 1168 bp, Zea mays subsp. mays
  misc_feature (1)..(1168): Ceres Seq. ID no. 12357881
  misc_feature: MA Experiment ID: 108527 Result: Down-regulated in Transcription
  misc_feature: MA Experiment 108527 PARAMETER Experiment Name: Zm_5mM_NO_P Parameter: Age (day) Value: 8
  misc_feature: MA Experiment 108527 PARAMETER Experiment Name: Zm_5mM_NO_P Parameter: Organism Value: Zea mays
  misc_feature: MA Experiment 108527 PARAMETER Experiment Name: Zm_5mM_NO_P Parameter: Plant Line Value: 35A19
  misc_feature: MA Experiment 108527 PARAMETER Experiment Name: Zm_5mM_NO_P Parameter: Timepoint (hr) Value: 6
  misc_feature: MA Experiment 108527 PARAMETER Experiment Name: Zm_5mM_NO_P Parameter: Tissue Value: Aerial
  misc_feature: MA Experiment 108527 PARAMETER Experiment Name: Zm_5mM_NO_P Parameter: Treatment Value: 5mM NO vs. No Treatment
  misc_feature: MA Experiment ID: 108528 Result: Up-regulated in Transcription
  misc_feature: MA Experiment 108528 PARAMETER Experiment Name: Zm_Imbibed_Seeds_P Parameter: Age (day) Value: 5 vs. 2
  misc_feature: MA Experiment 108528 PARAMETER Experiment Name: Zm_Imbibed_Seeds_P Parameter: Organism Value: Zea mays
  misc_feature: MA Experiment 108528 PARAMETER Experiment Name: Zm_Imbibed_Seeds_P Parameter: Plant Line Value: 35A19
  misc_feature: MA Experiment 108528 PARAMETER Experiment Name: Zm_Imbibed_Seeds_P Parameter: Tissue Value: Aerial vs. Embryo
  misc_feature: MA Experiment ID: 108530 Result: Up-regulated in Transcription
  misc_feature: MA Experiment 108530 PARAMETER Experiment Name: Zm_Imbibed_Seeds_P Parameter: Age (day) Value: 6 vs. 2
  misc_feature: MA Experiment 108530 PARAMETER Experiment Name: Zm_Imbibed_Seeds_P Parameter: Organism Value: Zea mays
  misc_feature: MA Experiment 108530 PARAMETER Experiment Name: Zm_Imbibed_Seeds_P Parameter: Plant Line Value: 35A19
  misc_feature: MA Experiment 108530 PARAMETER Experiment Name: Zm_Imbibed_Seeds_P Parameter: Tissue Value: Aerial vs. Embryo
  misc_feature: MA Experiment ID: 108536 Result: Down-regulated in Transcription
  misc_feature: MA Experiment 108536 PARAMETER Experiment Name: Zm_Meristem_P Parameter: Age (day) Value: 8
  misc_feature: MA Experiment 108536 PARAMETER Experiment Name: Zm_Meristem_P Parameter: Organism Value: Zea mays
  misc_feature: MA Experiment 108536 PARAMETER Experiment Name: Zm_Meristem_P Parameter: Plant Line Value: 35A19
  misc_feature: MA Experiment 108536 PARAMETER Experiment Name: Zm_Meristem_P Parameter: Tissue Value: Shoot Meristem vs. Above Shoot Meristem
  misc_feature: MA Experiment ID: 108543 Result: Down-regulated in Transcription
  misc_feature: MA Experiment ID: 108545 Result: Up-regulated in Transcription
  misc_feature: MA Experiment 108545 PARAMETER Experiment Name: Zm_Imbibed_Seeds_P Parameter: Age (day) Value: 3 vs. 2
  misc_feature: MA Experiment 108545 PARAMETER Experiment Name: Zm_Imbibed_Seeds_P Parameter: Organism Value: Zea mays
  misc_feature: MA Experiment 108545 PARAMETER Experiment Name: Zm_Imbibed_Seeds_P Parameter: Plant Line Value: 35A19
  misc_feature: MA Experiment 108545 PARAMETER Experiment Name: Zm_Imbibed_Seeds_P Parameter: Tissue Value: Aerial vs. Embryo
  misc_feature: MA Experiment ID: 108547 Result: Up-regulated in Transcription
  misc_feature: MA Experiment 108547 PARAMETER Experiment Name: Zm_Imbibed_Seeds_P Parameter: Age (day) Value: 4 vs. 2
  misc_feature: MA Experiment 108547 PARAMETER Experiment Name: Zm_Imbibed_Seeds_P Parameter: Organism Value: Zea mays
  misc_feature: MA Experiment 108547 PARAMETER Experiment Name: Zm_Imbibed_Seeds_P Parameter: Plant Line Value: 35A19
  misc_feature: MA Experiment 108547 PARAMETER Experiment Name: Zm_Imbibed_Seeds_P Parameter: Tissue Value: Aerial vs. Embryo
  misc_feature: MA Experiment ID: 108556 Result: Down-regulated in Transcription
  misc_feature: MA Experiment 108556 PARAMETER Experiment Name: Zm_Drought_P Parameter: Age (day) Value: 9
  misc_feature: MA Experiment 108556 PARAMETER Experiment Name: Zm_Drought_P Parameter: Organism Value: Zea mays
  misc_feature: MA Experiment 108556 PARAMETER Experiment Name: Zm_Drought_P Parameter: Plant Line Value: 35A19
  misc_feature: MA Experiment 108556 PARAMETER Experiment Name: Zm_Drought_P Parameter: Timepoint (hr) Value: 24
  misc_feature: MA Experiment 108556 PARAMETER Experiment Name: Zm_Drought_P Parameter: Tissue Value: Aerial
  misc_feature: MA Experiment 108556 PARAMETER Experiment Name: Zm_Drought_P Parameter: Treatment Value: Drought vs. No Drought
  misc_feature: MA Experiment ID: 108559 Result: Down-regulated in Transcription
  misc_feature: MA Experiment 108559 PARAMETER Experiment Name: Zm_5mM_NO_P Parameter: Age (day) Value: 8
  misc_feature: MA Experiment 108559 PARAMETER Experiment Name: Zm_5mM_NO_P Parameter: Organism Value: Zea mays
  misc_feature: MA Experiment 108559 PARAMETER Experiment Name: Zm_5mM_NO_P Parameter: Plant Line Value: 35A19
  misc_feature: MA Experiment 108559 PARAMETER Experiment Name: Zm_5mM_NO_P Parameter: Timepoint (hr) Value: 12
  misc_feature: MA Experiment 108559 PARAMETER Experiment Name: Zm_5mM_NO_P Parameter: Tissue Value: Aerial
  misc_feature: MA Experiment 108559 PARAMETER Experiment Name: Zm_5mM_NO_P Parameter: Treatment Value: 5mM NO vs. No Treatment
  misc_feature: MA Experiment ID: 20000535 Result: Down-regulated in Transcription
  misc_feature: MA Experiment 20000535 PARAMETER Experiment Name: Zm_Hybrid_Seed_Dev_P Parameter: DAP Value: 30 vs. 12
  misc_feature: MA Experiment 20000535 PARAMETER Experiment Name: Zm_Hybrid_Seed_Dev_P Parameter: Organism Value: Zea mays
  misc_feature: MA Experiment 20000535 PARAMETER Experiment Name: Zm_Hybrid_Seed_Dev_P Parameter: Plant Line Value: 35A19
  misc_feature: MA Experiment 20000535 PARAMETER Experiment Name: Zm_Hybrid_Seed_Dev_P Parameter: Tissue Value: Embryo vs. Unfert Floret
agaataggataggatagcccctgttcttctagcctgctagtctgctacactccacgtctctacctctaccgcacattttgctacgctccagctccatcgactatcgagtgcttgctggacgccggggccgggcaatggatccgggcagcgcggagatcgttttcgactgcgatttcttccggatatacagcgacggtcgcgtcgagcgtttcgccggcatggaaaccgtgcccgcgggcttcgacgccgacaccggcgtcacctcaaaagacgtggtcgtcgacgccgccaccggcatcgcgacgcggctctacctgccagccatccctacggccccgtcatctccccagtcggacggcaacggcaacggcaacggcagcgccacggcgaagcttcccatcctcgtcatcttccacggcggcggcttcgtcatcggctcaccggctgatcctggtttccaccgctacatgaactcgctggtcgctagcgcccgcgtcgtcgctgtctccgtcggctaccgcctcgcgcccgaaaacccgctccctgcagcctacaaggactcctggaccgcgctcaactgggctgtttccggcgcggacccgtggctgtccgcccacggtgacctcggccgcgtcttcgtggccggttacagcgccgggtcgaacatcgcccacaacatggccatcgccgcgggcgtcagaggcttgcgcgccgcggaaccaccacgagtagaaggcgtgatcctgctccacccttcgtttgccggtgaacagaggatggaagaagaggatgacagattctggcaagttaataagaggaggtggaaggccatcttccccggtgcgagagacgggctggacgatccgagaatcaacccggtcgtcgctggcgcgccgagcttggcgaagctggtgggcgagcggctgctcgtgtgcacggcgtcggaggacccgagggcaccgaggggccgggcatactgcgaggcggtgagggccagctgttggccgggaaaggtggagagcttcgaatcacaaaacgagggacacgggttcttcgtttccggccacggcagcacccaggccattgcgctgatggatcgagtggttggtttcattgttggccattaacttcgattgttcaaaataaatgaaattaagggttgtttgct

SEQ ID NO: 5396 - protein, 330 aa, Zea mays subsp. mays
  peptide (1)..(330): Ceres Seq. ID no. 12357882
  misc_feature (17)..(327): Homolog of NCBI NO: 38344841 NR Description: OSJNBa0064H22.22 [Oryza sativa (japonica
  misc_feature (14)..(328): Homolog of NCBI NO: 15222791 NR Description: hypothetical protein; protein id: At1g49640.1
  misc_feature (5)..(329): Homolog of NCBI NO: 21537287 NR Description: putative esterase [Arabidopsis thaliana]
  misc_feature (5)..(329): Homolog of NCBI NO: 18402731 NR Description: expressed protein; protein id: At1g49650.1, by cDNA: 12638. [Arabidopsis thaliana]
  misc_feature (86)..(327): Homolog of NCBI NO: 15227669 NR Description: putative esterase; protein id: At2g03550.1
  misc_feature (86)..(327): Homolog of NCBI NO: 28393060 NR Description: putative esterase [Arabidopsis thaliana]
  misc_feature (8)..(71): Homolog of NCBI NO: 15227669 NR Description: putative esterase; protein id: At2g03550.1
  misc_feature (8)..(71): Homolog of NCBI NO: 28393060 NR Description: putative esterase [Arabidopsis thaliana]
  misc_feature (6)..(329): Homolog of NCBI NO: 18086341 NR Description: AT3g48690/T8P19_200 [Arabidopsis thaliana]
  misc_feature (6)..(329): Homolog of NCBI NO: 15228425 NR Description: putative protein; protein id: At3g48690.1, by cDNA: gi_18086340 [Arabidopsis thaliana]
MDPGSAEIVFDCDFFRIYSDGRVERFAGMETVPAGFDADTGVTSKDVVVDAATGIATRLYLPAIPTAPSSPQSDGNGNGNGSATAKLPILVIFHGGGFVIGSPADPGFHRYMNSLVASARVVAVSVGYRLAPENPLPAAYKDSWTALNWAVSGADPWLSAHGDLGRVFVAGYSAGSNIAHNMAIAAGVRGLRAAEPPRVEGVILLHPSFAGEQRMEEEDDRFWQVNKRRWKAIFPGARDGLDDPRINPVVAGAPSLAKLVGERLLVCTASEDPRAPRGRAYCEAVRASCWPGKVESFESQNEGHGFFVSGHGSTQAIALMDRVVGFIVGH

SEQ ID NO: 5397 - protein, 302 aa, Zea mays subsp. mays
  peptide (1)..(302): Ceres Seq. ID no. 12357883
  misc_feature (1)..(299): Homolog of NCBI NO: 38344841 NR Description: OSJNBa0064H22.22 [Oryza sativa (japonica
  misc_feature (1)..(300): Homolog of NCBI NO: 15222791 NR Description: hypothetical protein; protein id: At1g49640.1
  misc_feature (1)..(301): Homolog of NCBI NO: 21537287 NR Description: putative esterase [Arabidopsis thaliana]
  misc_feature (1)..(301): Homolog of NCBI NO: 18402731 NR Description: expressed protein; protein id: At1g49650.1, by cDNA: 12638. [Arabidopsis thaliana]
  misc_feature (58)..(299): Homolog of NCBI NO: 15227669 NR Description: putative esterase; protein id: At2g03550.1
  misc_feature (58)..(299): Homolog of NCBI NO: 28393060 NR Description: putative esterase [Arabidopsis thaliana]
  misc_feature (1)..(43): Homolog of NCBI NO: 15227669 NR Description: putative esterase; protein id: At2g03550.1
  misc_feature (1)..(43): Homolog of NCBI NO: 28393060 NR Description: putative esterase [Arabidopsis thaliana]
  misc_feature (1)..(301): Homolog of NCBI NO: 18086341 NR Description: AT3g48690/T8P19_200 [Arabidopsis thaliana]
  misc_feature (1)..(301): Homolog of NCBI NO: 15228425 NR Description: putative protein; protein id: At3g48690.1, by cDNA: gi_18086340 [Arabidopsis thaliana]
METVPAGFDADTGVTSKDVVVDAATGIATRLYLPAIPTAPSSPQSDGNGNGNGSATAKLPILVIFHGGGFVIGSPADPGFHRYMNSLVASARVVAVSVGYRLAPENPLPAAYKDSWTALNWAVSGADPWLSAHGDLGRVFVAGYSAGSNIAHNMAIAAGVRGLRAAEPPRVEGVILLHPSFAGEQRMEEEDDRFWQVNKRRWKAIFPGARDGLDDPRINPVVAGAPSLAKLVGERLLVCTASEDPRAPRGRAYCEAVRASCWPGKVESFESQNEGHGFFVSGHGSTQAIALMDRVVGFIVGH

SEQ ID NO: 5398 - protein, 219 aa, Zea mays subsp. mays
  peptide (1)..(219): Ceres Seq. ID no. 12357884
  misc_feature (1)..(216): Homolog of NCBI NO: 38344841 NR Description: OSJNBa0064H22.22 [Oryza sativa (japonica
  misc_feature (1)..(217): Homolog of NCBI NO: 15222791 NR Description: hypothetical protein; protein id: At1g49640.1
  misc_feature (1)..(218): Homolog of NCBI NO: 21537287 NR Description: putative esterase [Arabidopsis thaliana]
  misc_feature (1)..(218): Homolog of NCBI NO: 18402731 NR Description: expressed protein; protein id: At1g49650.1, by cDNA: 12638. [Arabidopsis thaliana]
  misc_feature (1)..(216): Homolog of NCBI NO: 15227669 NR Description: putative esterase; protein id: At2g03550.1
  misc_feature (1)..(216): Homolog of NCBI NO: 28393060 NR Description: putative esterase [Arabidopsis thaliana]
  misc_feature (1)..(218): Homolog of NCBI NO: 18086341 NR Description: AT3g48690/T8P19_200 [Arabidopsis thaliana]
  misc_feature (1)..(218): Homolog of NCBI NO: 15228425 NR Description: putative protein; protein id: At3g48690.1, by cDNA: gi_18086340 [Arabidopsis thaliana]
  misc_feature (1)..(216): Homolog of NCBI NO: 21536771 NR Description: unknown [Arabidopsis thaliana]
  misc_feature (1)..(216): Homolog of NCBI NO: 18401743 NR Description: expressed protein; protein id: At1g47480.1, by cDNA: 111056. [Arabidopsis thaliana] >gi|25405208|pir||A96515
MNSLVASARVVAVSVGYRLAPENPLPAAYKDSWTALNWAVSGADPWLSAHGDLGRVFVAGYSAGSNIAHNMAIAAGVRGLRAAEPPRVEGVILLHPSFAGEQRMEEEDDRFWQVNKRRWKAIFPGARDGLDDPRINPVVAGAPSLAKLVGERLLVCTASEDPRAPRGRAYCEAVRASCWPGKVESFESQNEGHGFFVSGHGSTQAIALMDRVVGFIVGH

SEQ ID NO: 5399 - DNA, 1610 bp, Zea mays subsp. mays
  misc_feature (1)..(1610): Ceres Seq. ID no. 12406770
  misc_feature: MA Experiment ID: 108527 Result: Down-regulated in Transcription
  misc_feature: MA Experiment 108527 PARAMETER Experiment Name: Zm_5mM_NO_P Parameter: Age (day) Value: 8
  misc_feature: MA Experiment 108527 PARAMETER Experiment Name: Zm_5mM_NO_P Parameter: Organism Value: Zea mays
  misc_feature: MA Experiment 108527 PARAMETER Experiment Name: Zm_5mM_NO_P Parameter: Plant Line Value: 35A19
  misc_feature: MA Experiment 108527 PARAMETER Experiment Name: Zm_5mM_NO_P Parameter: Timepoint (hr) Value: 6
  misc_feature: MA Experiment 108527 PARAMETER Experiment Name: Zm_5mM_NO_P Parameter: Tissue Value: Aerial
  misc_feature: MA Experiment 108527 PARAMETER Experiment Name: Zm_5mM_NO_P Parameter: Treatment Value: 5mM NO vs. No Treatment
  misc_feature: MA Experiment ID: 108529 Result: Down-regulated in Transcription
  misc_feature: MA Experiment 108529 PARAMETER Experiment Name: Zm_Imbibed_Seeds_P Parameter: Age (day) Value: 5 vs. 2
  misc_feature: MA Experiment 108529 PARAMETER Experiment Name: Zm_Imbibed_Seeds_P Parameter: Organism Value: Zea mays
  misc_feature: MA Experiment 108529 PARAMETER Experiment Name: Zm_Imbibed_Seeds_P Parameter: Plant Line Value: 35A19
  misc_feature: MA Experiment 108529 PARAMETER Experiment Name: Zm_Imbibed_Seeds_P Parameter: Tissue Value: Roots vs. Embryo
  misc_feature: MA Experiment ID: 108536 Result: Down-regulated in Transcription
  misc_feature: MA Experiment 108536 PARAMETER Experiment Name: Zm_Meristem_P Parameter: Age (day) Value: 8
  misc_feature: MA Experiment 108536 PARAMETER Experiment Name: Zm_Meristem_P Parameter: Organism Value: Zea mays
  misc_feature: MA Experiment 108536 PARAMETER Experiment Name: Zm_Meristem_P Parameter: Plant Line Value: 35A19
  misc_feature: MA Experiment 108536 PARAMETER Experiment Name: Zm_Meristem_P Parameter: Tissue Value: Shoot Meristem vs. Above Shoot Meristem
  misc_feature: MA Experiment ID: 108543 Result: Up-regulated in Transcription
  misc_feature: MA Experiment ID: 108544 Result: Down-regulated in Transcription
  misc_feature: MA Experiment ID: 108556 Result: Down-regulated in Transcription
  misc_feature: MA Experiment 108556 PARAMETER Experiment Name: Zm_Drought_P Parameter: Age (day) Value: 9
  misc_feature: MA Experiment 108556 PARAMETER Experiment Name: Zm_Drought_P Parameter: Organism Value: Zea mays
  misc_feature: MA Experiment 108556 PARAMETER Experiment Name: Zm_Drought_P Parameter: Plant Line Value: 35A19
  misc_feature: MA Experiment 108556 PARAMETER Experiment Name: Zm_Drought_P Parameter: Timepoint (hr) Value: 24
  misc_feature: MA Experiment 108556 PARAMETER Experiment Name: Zm_Drought_P Parameter: Tissue Value: Aerial
  misc_feature: MA Experiment 108556 PARAMETER Experiment Name: Zm_Drought_P Parameter: Treatment Value: Drought vs. No Drought
  misc_feature: MA Experiment ID: 108559 Result: Down-regulated in Transcription
  misc_feature: MA Experiment 108559 PARAMETER Experiment Name: Zm_5mM_NO_P Parameter: Age (day) Value: 8
  misc_feature: MA Experiment 108559 PARAMETER Experiment Name: Zm_5mM_NO_P Parameter: Organism Value: Zea mays
  misc_feature: MA Experiment 108559 PARAMETER Experiment Name: Zm_5mM_NO_P Parameter: Plant Line Value: 35A19
  misc_feature: MA Experiment 108559 PARAMETER Experiment Name: Zm_5mM_NO_P Parameter: Timepoint (hr) Value: 12
  misc_feature: MA Experiment 108559 PARAMETER Experiment Name: Zm_5mM_NO_P Parameter: Tissue Value: Aerial
  misc_feature: MA Experiment 108559 PARAMETER Experiment Name: Zm_5mM_NO_P Parameter: Treatment Value: 5mM NO vs. No Treatment
  misc_feature: MA Experiment ID: 108597 Result: Down-regulated in Transcription
  misc_feature: MA Experiment 108597 PARAMETER Experiment Name: Zm_100uM_ABA_P Parameter: Age (day) Value: 9
  misc_feature: MA Experiment 108597 PARAMETER Experiment Name: Zm_100uM_ABA_P Parameter: Organism Value: Zea mays
  misc_feature: MA Experiment 108597 PARAMETER Experiment Name: Zm_100uM_ABA_P Parameter: Plant Line Value: 35A19
  misc_feature: MA Experiment 108597 PARAMETER Experiment Name: Zm_100uM_ABA_P Parameter: Timepoint (hr) Value: 24
  misc_feature: MA Experiment 108597 PARAMETER Experiment Name: Zm_100uM_ABA_P Parameter: Tissue Value: Aerial
  misc_feature: MA Experiment 108597 PARAMETER Experiment Name: Zm_100uM_ABA_P Parameter: Treatment Value: 100uM ABA vs. No Treatment
  misc_feature: MA Experiment ID: 108689 Result: Down-regulated in Transcription
  misc_feature: MA Experiment 108689 PARAMETER Experiment Name: Zm_Drought_Roots_P Parameter: Age (day) Value: 9
  misc_feature: MA Experiment 108689 PARAMETER Experiment Name: Zm_Drought_Roots_P Parameter: Organism Value: Zea mays
  misc_feature: MA Experiment 108689 PARAMETER Experiment Name: Zm_Drought_Roots_P Parameter: Plant Line Value: 35A19
  misc_feature: MA Experiment 108689 PARAMETER Experiment Name: Zm_Drought_Roots_P Parameter: Timepoint (hr) Value: 24
  misc_feature: MA Experiment 108689 PARAMETER Experiment Name: Zm_Drought_Roots_P Parameter: Tissue Value: Roots
  misc_feature: MA Experiment 108689 PARAMETER Experiment Name: Zm_Drought_Roots_P Parameter: Treatment Value: Drought vs. No Drought
  misc_feature: MA Experiment ID: 20000108 Result: Up-regulated in Transcription
  misc_feature: MA Experiment 20000108 PARAMETER Experiment Name: Zm_Root-Tips_P Parameter: Age (day) Value: 12
  misc_feature: MA Experiment 20000108 PARAMETER Experiment Name: Zm_Root-Tips_P Parameter: Organism Value: Zea mays
  misc_feature: MA Experiment 20000108 PARAMETER Experiment Name: Zm_Root-Tips_P Parameter: Tissue Value: Root tips vs. Root mid region    35
  misc_feature: MA Experiment 20000108 PARAMETER Experiment Name: Zm_Root-Tips_P Parameter: Tissue Value: Root tips vs. Root mid region   Sequence Listing-Misc Features (4)
  misc_feature: MA Experiment ID: 20000477 Result: Down-regulated in Transcription
  misc_feature: MA Experiment 20000477 PARAMETER Experiment Name: Zm_5mM_SA_P Parameter: Age (day) Value: 10
  misc_feature: MA Experiment 20000477 PARAMETER Experiment Name: Zm_5mM_SA_P Parameter: Organism Value: Zea mays
  misc_feature: MA Experiment 20000477 PARAMETER Experiment Name: Zm_5mM_SA_P Parameter: Plant Line Value: 35A19
  misc_feature: MA Experiment 20000477 PARAMETER Experiment Name: Zm_5mM_SA_P Parameter: Timepoint (hr) Value: 48
  misc_feature: MA Experiment 20000477 PARAMETER Experiment Name: Zm_5mM_SA_P Parameter: Tissue Value: Aerial
  misc_feature: MA Experiment 20000477 PARAMETER Experiment Name: Zm_5mM_SA_P Parameter: Treatment Value: 5mM SA vs. No Treatment
  misc_feature: MA Experiment ID: 20000478 Result: Down-regulated in Transcription
  misc_feature: MA Experiment 20000478 PARAMETER Experiment Name: Zm_5mM_SA_P Parameter: Age (day) Value: 11
  misc_feature: MA Experiment 20000478 PARAMETER Experiment Name: Zm_5mM_SA_P Parameter: Organism Value: Zea mays
  misc_feature: MA Experiment 20000478 PARAMETER Experiment Name: Zm_5mM_SA_P Parameter: Plant Line Value: 35A19
  misc_feature: MA Experiment 20000478 PARAMETER Experiment Name: Zm_5mM_SA_P Parameter: Timepoint (hr) Value: 72
  misc_feature: MA Experiment 20000478 PARAMETER Experiment Name: Zm_5mM_SA_P Parameter: Tissue Value: Aerial
  misc_feature: MA Experiment 20000478 PARAMETER Experiment Name: Zm_5mM_SA_P Parameter: Treatment Value: 5mM SA vs. No Treatment
  misc_feature: MA Experiment ID: 20000479 Result: Down-regulated in Transcription
  misc_feature: MA Experiment 20000479 PARAMETER Experiment Name: Zm_Drought_P Parameter: Age (day) Value: 10
  misc_feature: MA Experiment 20000479 PARAMETER Experiment Name: Zm_Drought_P Parameter: Organism Value: Zea mays
  misc_feature: MA Experiment 20000479 PARAMETER Experiment Name: Zm_Drought_P Parameter: Plant Line Value: 35A19
  misc_feature: MA Experiment 20000479 PARAMETER Experiment Name: Zm_Drought_P Parameter: Timepoint (hr) Value: 48
  misc_feature: MA Experiment 20000479 PARAMETER Experiment Name: Zm_Drought_P Parameter: Tissue Value: Aerial
  misc_feature: MA Experiment 20000479 PARAMETER Experiment Name: Zm_Drought_P Parameter: Treatment Value: Drought vs. No Drought
  misc_feature: MA Experiment ID: 20000480 Result: Down-regulated in Transcription
  misc_feature: MA Experiment 20000480 PARAMETER Experiment Name: Zm_Drought_P Parameter: Age (day) Value: 11
  misc_feature: MA Experiment 20000480 PARAMETER Experiment Name: Zm_Drought_P Parameter: Organism Value: Zea mays
  misc_feature: MA Experiment 20000480 PARAMETER Experiment Name: Zm_Drought_P Parameter: Plant Line Value: 35A19
  misc_feature: MA Experiment 20000480 PARAMETER Experiment Name: Zm_Drought_P Parameter: Timepoint (hr) Value: 72
  misc_feature: MA Experiment 20000480 PARAMETER Experiment Name: Zm_Drought_P Parameter: Tissue Value: Aerial
  misc_feature: MA Experiment 20000480 PARAMETER Experiment Name: Zm_Drought_P Parameter: Treatment Value: Drought vs. No Drought
  misc_feature: MA Experiment ID: 20000488 Result: Down-regulated in Transcription
  misc_feature: MA Experiment 20000488 PARAMETER Experiment Name: Zm_50mM_NH4NO3_L_to_H_P Parameter: Organism Value: Zea mays
  misc_feature: MA Experiment 20000488 PARAMETER Experiment Name: Zm_50mM_NH4NO3_L_to_H_P Parameter: Timepoint (hr) Value: 8
  misc_feature: MA Experiment 20000488 PARAMETER Experiment Name: Zm_50mM_NH4NO3_L_to_H_P Parameter: Tissue Value: Leaves
  misc_feature: MA Experiment 20000488 PARAMETER Experiment Name: Zm_50mM_NH4NO3_L_to_H_P Parameter: Treatment Value: 50mM NH4NO3 vs. 100mM Mannitol
  misc_feature: MA Experiment ID: 20000533 Result: Down-regulated in Transcription
  misc_feature: MA Experiment 20000533 PARAMETER Experiment Name: Zm_0.001percent_MeJA_P Parameter: Age (day) Value: 11
  misc_feature: MA Experiment 20000533 PARAMETER Experiment Name: Zm_0.001percent_MeJA_P Parameter: Organism Value: Zea mays
  misc_feature: MA Experiment 20000533 PARAMETER Experiment Name: Zm_0.001percent_MeJA_P Parameter: Plant Line Value: 35A19
  misc_feature: MA Experiment 20000533 PARAMETER Experiment Name: Zm_0.001percent_MeJA_P Parameter: Timepoint (hr) Value: 72
  misc_feature: MA Experiment 20000533 PARAMETER Experiment Name: Zm_0.001percent_MeJA_P Parameter: Tissue Value: Aerial
  misc_feature: MA Experiment 20000533 PARAMETER Experiment Name: Zm_0.001percent_MeJA_P Parameter: Treatment Value: 0.001percent MeJA vs. No Treatment
  misc_feature: MA Experiment ID: 20000535 Result: Up-regulated in Transcription
  misc_feature: MA Experiment 20000535 PARAMETER Experiment Name: Zm_Hybrid_Seed_Dev_P Parameter: DAP Value: 30 vs. 12
  misc_feature: MA Experiment 20000535 PARAMETER Experiment Name: Zm_Hybrid_Seed_Dev_P Parameter: Organism Value: Zea mays
  misc_feature: MA Experiment 20000535 PARAMETER Experiment Name: Zm_Hybrid_Seed_Dev_P Parameter: Plant Line Value: 35A19
  misc_feature: MA Experiment 20000535 PARAMETER Experiment Name: Zm_Hybrid_Seed_Dev_P Parameter: Tissue Value: Embryo vs. Unfert Floret
  misc_feature: MA Experiment ID: 20000626 Result: Down-regulated in Transcription
  misc_feature: MA Experiment 20000626 PARAMETER Experiment Name: Zm_Herbicide-Treatments_P Parameter: Timepoint (hr) Value: 12
  misc_feature: MA Experiment 20000626 PARAMETER Experiment Name: Zm_Herbicide-Treatments_P Parameter: Tissue Value: Aerial
  misc_feature: MA Experiment 20000626 PARAMETER Experiment Name: Zm_Herbicide-Treatments_P Parameter: Treatment Value: Roundup vs. No Treatment
acgatcccactctccccgctcacctcaaggagtcaaggtgcaaagctaagcttagctcattgctcaagcttccgtctctttctctctgcgagactgcacactgccaccacgcgcaatggcggcattccaccatttgttgccggccttgctccttctactcctgctcccttccacccctgaggcgacgtcctcggcgctgcttggcatcagctacggtcgcgttggcaacaacctccctgcagctacatcagtgccgcagattgtggcttccctgggcgtcggccgcgtccgactctacgatgctgacagcaccaccattcgcgccttcgccaacacgggcgtcgagctcgtcgtcggcgtccctgacgagtgcctcgccactgtctccaccccgacgggcgccgcctcctgggtccgctccaacatttcccctgcgctcccggccacaaagatcgccttcctcacagtcggcaacgaggtgctcaccggcgtcaacagctcctcgctgtccaggtacctccttccggcgatgcggtgcctccacgacgcgcttgcgcaggccggcctggacaagcaggtcgccgtgaccacggcgcacaacctcggcgtgctggccacgtcgtacccgccgtcgtcggcgtacttccgcaaggacctcctcccgatgctctgccccattctcgacttccacgcgcgcgcgggctcgccgttccttgttaatgcgtacccctacttcgcctacgccgaggaacccaccggcgtggagctcgagtacgcgctgctggaacccggccatgccggtgtcgccgacccggggaccgggctgcactacaccaacatgctcgcagcgcaggtggatgcggtgtaccacgccatcgccgcagccaacagcgcggcggcgcgggccgcgcaggtgcgcgtgtctgagaccgggtggccgtcggcgggggacgccaacgagaccggcgccacgccgcagaacgcggcgaggtacaacggcaacgtgatgcggctcgtggcccaggggaagggcacgccgctgcggccggcggcgccgctgcgcgtctacatgttcgcgctcttcaacgagaacatgaagcccgggcccaacgtcggagcgcaactacgggctcttcaagcccgacggaacgccggcgtacgagctttcctaccgcctcccgctggacaacaccacctcctcctcttccgccggtggcagcattaccggcggtggtgggtacaatggccacggctacgggtcgtcggacaacggcggatactacagcatctcggccgccgccaaggtgacaccgggttggtggacatggccacaggtagctgtggcaccatgtgtggctgtactggccatggcattgtgaccattagcagagatcaagtggtacctgcctggacttggtggatggaagcctctggcttctgatggagtcagaagcagcgtatggtgtgggtcagtgaactgctgttctagagaaacgcattgctcgtggtgatccacttcctctctctctatgttgtttcccttttctccacgttgttgtaactgaggtgtccttgtaatcagtggtgaacaaatggactagacaattgtc

SEQ ID NO: 5400 - protein, 441 aa, Zea mays subsp. mays
  peptide (1)..(441): Ceres Seq. ID no. 12406771
  misc_feature (29)..(331): Pfam Name: Glycosyl hydrolases family 17 Pfam Description: Glycosyl hydrolases family 17
  misc_feature (8)..(331): Homolog of NCBI NO: 37531294 NR Description: putative beta-1,3-glucanase [Oryza sativa
  misc_feature (11)..(331): Homolog of NCBI NO: 6006371 NR Description: Similar to hypothetical protein - potato (S31196)
  misc_feature (1)..(331): Homolog of NCBI NO: 25316443 NR Description: CDS protein F9L11.6 [imported] - Arabidopsis
  misc_feature (1)..(331): Homolog of NCBI NO: 30692765 NR Description: glycosyl hydrolase family 17 [Arabidopsis
  misc_feature (12)..(332): Homolog of NCBI NO: 419789 NR Description: hypothetical protein - potato
  misc_feature (12)..(331): Homolog of NCBI NO: 15238298 NR Description: glycosyl hydrolase family 17; protein id: supported by cDNA: 11988., supported by cDNA: gi_15451219
  misc_feature (1)..(354): Homolog of NCBI NO: 38346337 NR Description: OSJNBa0073L04.8 [Oryza sativa (japonica
  misc_feature (12)..(331): Homolog of NCBI NO: 34908492 NR Description: putative beta-1,3-glucanase [Oryza sativa
  misc_feature (12)..(353): Homolog of NCBI NO: 18401444 NR Description: glycosyl hydrolase family 17; protein id: supported by cDNA: 1126., supported by cDNA: gi_17473571,
  misc_feature (12)..(353): Homolog of NCBI NO: 25316425 NR Description: probable beta-1,3-glucanase [imported] -
MAAFHHLLPALLLLLLLPSTPEATSSALLGISYGRVGNNLPAATSVPQIVASLGVGRVRLYDADSTTIRAFANTGVELVVGVPDECLATVSTPTGAASWVRSNISPALPATKIAFLTVGNEVLTGVNSSSLSRYLLPAMRCLHDALAQAGLDKQVAVTTAHNLGVLATSYPPSSAYFRKDLLPMLCPILDFHARAGSPFLVNAYPYFAYAEEPTGVELEYALLEPGHAGVADPGTGLHYTNMLAAQVDAVYHAIAAANSAAARAAQVRVSETGWPSAGDANETGATPQNAARYNGNVMRLVAQGKGTPLRPAAPLRVYMFALFNENMKPGPNVGAQLRALQARRNAGVRAFLPPPAGQHHLLLFRRWQHYRRWWVQWPRLRVVGQRRILQHLGRRQGDTGLVDMATGSCGTMCGCTGHGIVTISRDQVVPAWTWWMEASGF

SEQ ID NO: 5401 - protein, 303 aa, Zea mays subsp. mays
  peptide (1)..(303): Ceres Seq. ID no. 12406772
  misc_feature (1)..(193): Pfam Name: Glycosyl hydrolases family 17 Pfam Description: Glycosyl hydrolases family 17
  misc_feature (1)..(193): Homolog of NCBI NO: 37531294 NR Description: putative beta-1,3-glucanase [Oryza sativa
  misc_feature (1)..(193): Homolog of NCBI NO: 6006371 NR Description: Similar to hypothetical protein - potato (S31196)
  misc_feature (1)..(193): Homolog of NCBI NO: 25316443 NR Description: CDS protein F9L11.6 [imported] - Arabidopsis
  misc_feature (1)..(193): Homolog of NCBI NO: 30692765 NR Description: glycosyl hydrolase family 17 [Arabidopsis
  misc_feature (1)..(194): Homolog of NCBI NO: 419789 NR Description: hypothetical protein - potato
  misc_feature (1)..(193): Homolog of NCBI NO: 15238298 NR Description: glycosyl hydrolase family 17; protein id: supported by cDNA: 11988., supported by cDNA: gi_15451219
  misc_feature (1)..(216): Homolog of NCBI NO: 38346337 NR Description: OSJNBa0073L04.8 [Oryza sativa (japonica
  misc_feature (1)..(193): Homolog of NCBI NO: 34908492 NR Description: putative beta-1,3-glucanase [Oryza sativa
  misc_feature (1)..(215): Homolog of NCBI NO: 18401444 NR Description: glycosyl hydrolase family 17; protein id: supported by cDNA: 1126., supported by cDNA: gi_17473571,
  misc_feature (1)..(215): Homolog of NCBI NO: 25316425 NR Description: probable beta-1,3-glucanase [imported] -
MRCLHDALAQAGLDKQVAVTTAHNLGVLATSYPPSSAYFRKDLLPMLCPILDFHARAGSPFLVNAYPYFAYAEEPTGVELEYALLEPGHAGVADPGTGLHYTNMLAAQVDAVYHAIAAANSAAARAAQVRVSETGWPSAGDANETGATPQNAARYNGNVMRLVAQGKGTPLRPAAPLRVYMFALFNENMKPGPNVGAQLRALQARRNAGVRAFLPPPAGQHHLLLFRRWQHYRRWWVQWPRLRVVGQRRILQHLGRRQGDTGLVDMATGSCGTMCGCTGHGIVTISRDQVVPAWTWWMEASGF

SEQ ID NO: 5402 - protein, 258 aa, Zea mays subsp. mays
  peptide (1)..(258): Ceres Seq. ID no. 12406773
  misc_feature (1)..(148): Pfam Name: Glycosyl hydrolases family 17 Pfam Description: Glycosyl hydrolases family 17
  misc_feature (1)..(148): Homolog of NCBI NO: 37531294 NR Description: putative beta-1,3-glucanase [Oryza sativa
  misc_feature (1)..(148): Homolog of NCBI NO: 6006371 NR Description: Similar to hypothetical protein - potato (S31196)
  misc_feature (1)..(148): Homolog of NCBI NO: 25316443 NR Description: CDS protein F9L11.6 [imported] - Arabidopsis
  misc_feature (1)..(148): Homolog of NCBI NO: 30692765 NR Description: glycosyl hydrolase family 17 [Arabidopsis
  misc_feature (1)..(149): Homolog of NCBI NO: 419789 NR Description: hypothetical protein - potato
  misc_feature (1)..(148): Homolog of NCBI NO: 15238298 NR Description: glycosyl hydrolase family 17; protein id: supported by cDNA: 11988., supported by cDNA: gi_15451219
  misc_feature (1)..(171): Homolog of NCBI NO: 38346337 NR Description: OSJNBa0073L04.8 [Oryza sativa (japonica
  misc_feature (1)..(148): Homolog of NCBI NO: 34908492 NR Description: putative beta-1,3-glucanase [Oryza sativa
  misc_feature (1)..(170): Homolog of NCBI NO: 18401444 NR Description: glycosyl hydrolase family 17; protein id: supported by cDNA: 1126., supported by cDNA: gi_17473571,
  misc_feature (1)..(170): Homolog of NCBI NO: 25316425 NR Description: probable beta-1,3-glucanase [imported] -
MLCPILDFHARAGSPFLVNAYPYFAYAEEPTGVELEYALLEPGHAGVADPGTGLHYTNMLAAQVDAVYHAIAAANSAAARAAQVRVSETGWPSAGDANETGATPQNAARYNGNVMRLVAQGKGTPLRPAAPLRVYMFALFNENMKPGPNVGAQLRALQARRNAGVRAFLPPPAGQHHLLLFRRWQHYRRWWVQWPRLRVVGQRRILQHLGRRQGDTGLVDMATGSCGTMCGCTGHGIVTISRDQVVPAWTWWMEASGF

SEQ ID NO: 5403 - DNA, 1247 bp, Zea mays subsp. mays
  misc_feature (1)..(1247): Ceres Seq. ID no. 12406931
  misc_feature: MA Experiment ID: 108522 Result: Up-regulated in Transcription
  misc_feature: MA Experiment 108522 PARAMETER Experiment Name: Zm_42deg_Heat_P Parameter: Age (day) Value: 8
  misc_feature: MA Experiment 108522 PARAMETER Experiment Name: Zm_42deg_Heat_P Parameter: Organism Value: Zea mays
  misc_feature: MA Experiment 108522 PARAMETER Experiment Name: Zm_42deg_Heat_P Parameter: Plant Line Value: 35A19
  misc_feature: MA Experiment 108522 PARAMETER Experiment Name: Zm_42deg_Heat_P Parameter: Temperature (deg C) Value: 42 vs. 22
  misc_feature: MA Experiment 108522 PARAMETER Experiment Name: Zm_42deg_Heat_P Parameter: Timepoint (hr) Value: 1
  misc_feature: MA Experiment 108522 PARAMETER Experiment Name: Zm_42deg_Heat_P Parameter: Tissue Value: Aerial
  misc_feature: MA Experiment ID: 108526 Result: Up-regulated in Transcription
  misc_feature: MA Experiment 108526 PARAMETER Experiment Name: Zm_5mM_NO_P Parameter: Age (day) Value: 8
  misc_feature: MA Experiment 108526 PARAMETER Experiment Name: Zm_5mM_NO_P Parameter: Organism Value: Zea mays
  misc_feature: MA Experiment 108526 PARAMETER Experiment Name: Zm_5mM_NO_P Parameter: Plant Line Value: 35A19
  misc_feature: MA Experiment 108526 PARAMETER Experiment Name: Zm_5mM_NO_P Parameter: Timepoint (hr) Value: 1
  misc_feature: MA Experiment 108526 PARAMETER Experiment Name: Zm_5mM_NO_P Parameter: Tissue Value: Aerial
  misc_feature: MA Experiment 108526 PARAMETER Experiment Name: Zm_5mM_NO_P Parameter: Treatment Value: 5mM NO vs. No Treatment
  misc_feature: MA Experiment ID: 108527 Result: Up-regulated in Transcription
  misc_feature: MA Experiment 108527 PARAMETER Experiment Name: Zm_5mM_NO_P Parameter: Age (day) Value: 8
  misc_feature: MA Experiment 108527 PARAMETER Experiment Name: Zm_5mM_NO_P Parameter: Organism Value: Zea mays
  misc_feature: MA Experiment 108527 PARAMETER Experiment Name: Zm_5mM_NO_P Parameter: Plant Line Value: 35A19
  misc_feature: MA Experiment 108527 PARAMETER Experiment Name: Zm_5mM_NO_P Parameter: Timepoint (hr) Value: 6
  misc_feature: MA Experiment 108527 PARAMETER Experiment Name: Zm_5mM_NO_P Parameter: Tissue Value: Aerial
  misc_feature: MA Experiment 108527 PARAMETER Experiment Name: Zm_5mM_NO_P Parameter: Treatment Value: 5mM NO vs. No Treatment
  misc_feature: MA Experiment ID: 108542 Result: Up-regulated in Transcription
  misc_feature: MA Experiment 108542 PARAMETER Experiment Name: Zm_150mM_NaCl_P Parameter: Age (day) Value: 8
  misc_feature: MA Experiment 108542 PARAMETER Experiment Name: Zm_150mM_NaCl_P Parameter: Organism Value: Zea mays
  misc_feature: MA Experiment 108542 PARAMETER Experiment Name: Zm_150mM_NaCl_P Parameter: Plant Line Value: 35A19
  misc_feature: MA Experiment 108542 PARAMETER Experiment Name: Zm_150mM_NaCl_P Parameter: Timepoint (hr) Value: 6
  misc_feature: MA Experiment 108542 PARAMETER Experiment Name: Zm_150mM_NaCl_P Parameter: Tissue Value: Aerial
  misc_feature: MA Experiment 108542 PARAMETER Experiment Name: Zm_150mM_NaCl_P Parameter: Treatment Value: 150mM NaCl vs. No Treatment
  misc_feature: MA Experiment ID: 108556 Result: Up-regulated in Transcription
  misc_feature: MA Experiment 108556 PARAMETER Experiment Name: Zm_Drought_P Parameter: Age (day) Value: 9
  misc_feature: MA Experiment 108556 PARAMETER Experiment Name: Zm_Drought_P Parameter: Organism Value: Zea mays
  misc_feature: MA Experiment 108556 PARAMETER Experiment Name: Zm_Drought_P Parameter: Plant Line Value: 35A19
  misc_feature: MA Experiment 108556 PARAMETER Experiment Name: Zm_Drought_P Parameter: Timepoint (hr) Value: 24
  misc_feature: MA Experiment 108556 PARAMETER Experiment Name: Zm_Drought_P Parameter: Tissue Value: Aerial
  misc_feature: MA Experiment 108556 PARAMETER Experiment Name: Zm_Drought_P Parameter: Treatment Value: Drought vs. No Drought
  misc_feature: MA Experiment ID: 108559 Result: Up-regulated in Transcription
  misc_feature: MA Experiment 108559 PARAMETER Experiment Name: Zm_5mM_NO_P Parameter: Age (day) Value: 8
  misc_feature: MA Experiment 108559 PARAMETER Experiment Name: Zm_5mM_NO_P Parameter: Organism Value: Zea mays
  misc_feature: MA Experiment 108559 PARAMETER Experiment Name: Zm_5mM_NO_P Parameter: Plant Line Value: 35A19
  misc_feature: MA Experiment 108559 PARAMETER Experiment Name: Zm_5mM_NO_P Parameter: Timepoint (hr) Value: 12
  misc_feature: MA Experiment 108559 PARAMETER Experiment Name: Zm_5mM_NO_P Parameter: Tissue Value: Aerial
  misc_feature: MA Experiment 108559 PARAMETER Experiment Name: Zm_5mM_NO_P Parameter: Treatment Value: 5mM NO vs. No Treatment
  misc_feature: MA Experiment ID: 20000479 Result: Up-regulated in Transcription
  misc_feature: MA Experiment 20000479 PARAMETER Experiment Name: Zm_Drought_P Parameter: Age (day) Value: 10
  misc_feature: MA Experiment 20000479 PARAMETER Experiment Name: Zm_Drought_P Parameter: Organism Value: Zea mays
  misc_feature: MA Experiment 20000479 PARAMETER Experiment Name: Zm_Drought_P Parameter: Plant Line Value: 35A19
  misc_feature: MA Experiment 20000479 PARAMETER Experiment Name: Zm_Drought_P Parameter: Timepoint (hr) Value: 48
  misc_feature: MA Experiment 20000479 PARAMETER Experiment Name: Zm_Drought_P Parameter: Tissue Value: Aerial
  misc_feature: MA Experiment 20000479 PARAMETER Experiment Name: Zm_Drought_P Parameter: Treatment Value: Drought vs. No Drought
  misc_feature: MA Experiment ID: 20000480 Result: Up-regulated in Transcription
  misc_feature: MA Experiment 20000480 PARAMETER Experiment Name: Zm_Drought_P Parameter: Age (day) Value: 11
  misc_feature: MA Experiment 20000480 PARAMETER Experiment Name: Zm_Drought_P Parameter: Organism Value: Zea mays
  misc_feature: MA Experiment 20000480 PARAMETER Experiment Name: Zm_Drought_P Parameter: Plant Line Value: 35A19
  misc_feature: MA Experiment 20000480 PARAMETER Experiment Name: Zm_Drought_P Parameter: Timepoint (hr) Value: 72
  misc_feature: MA Experiment 20000480 PARAMETER Experiment Name: Zm_Drought_P Parameter: Tissue Value: Aerial
  misc_feature: MA Experiment 20000480 PARAMETER Experiment Name: Zm_Drought_P Parameter: Treatment Value: Drought vs. No Drought
  misc_feature: MA Experiment ID: 20000626 Result: Up-regulated in Transcription
  misc_feature: MA Experiment 20000626 PARAMETER Experiment Name: Zm_Herbicide-Treatments_P Parameter: Timepoint (hr) Value: 12
  misc_feature: MA Experiment 20000626 PARAMETER Experiment Name: Zm_Herbicide-Treatments_P Parameter: Tissue Value: Aerial
  misc_feature: MA Experiment 20000626 PARAMETER Experiment Name: Zm_Herbicide-Treatments_P Parameter: Treatment Value: Roundup vs. No Treatment
  misc_feature: MA Experiment ID: 20000627 Result: Up-regulated in Transcription
  misc_feature: MA Experiment 20000627 PARAMETER Experiment Name: Zm_Herbicide-Treatments_P Parameter: Timepoint (hr) Value: 12
  misc_feature: MA Experiment 20000627 PARAMETER Experiment Name: Zm_Herbicide-Treatments_P Parameter: Tissue Value: Aerial
  misc_feature: MA Experiment 20000627 PARAMETER Experiment Name: Zm_Herbicide-Treatments_P Parameter: Treatment Value: Finale vs. No Treatment
  misc_feature: MA Experiment ID: 20001612 Result: Up-regulated in Transcription
  misc_feature: MA Experiment 20001612 PARAMETER Experiment Name: Zm_50ppm_KNO3_L-to-H_P Parameter: Age (day) Value: 19
  misc_feature: MA Experiment 20001612 PARAMETER Experiment Name: Zm_50ppm_KNO3_L-to-H_P Parameter: Organism Value: Zea mays
  misc_feature: MA Experiment 20001612 PARAMETER Experiment Name: Zm_50ppm_KNO3_L-to-H_P Parameter: Plant Line Value: 35A19
  misc_feature: MA Experiment 20001612 PARAMETER Experiment Name: Zm_50ppm_KNO3_L-to-H_P Parameter: Timepoint (hr) Value: 8
  misc_feature: MA Experiment 20001612 PARAMETER Experiment Name: Zm_50ppm_KNO3_L-to-H_P Parameter: Tissue Value: Roots
  misc_feature: MA Experiment 20001612 PARAMETER Experiment Name: Zm_50ppm_KNO3_L-to-H_P Parameter: Treatment Value: 50ppm KNO3 vs. 50ppm KCl
tcgtttcgcgtcctagcccaggacaagttccctttttcttctcccaagtctgcgactaggaggcgacgggccgacgggccaagtttcctttctcttctcagtctgcgactggcggcggcgaccatcacgcacaagccttcgttgctacctgcgctccgccaattcggtgaattgcagtctaagcaaagggaaaaggaaggatcttttctccagacttggtaattttggacgacaagatgcacttccttgcatcatttcatgtccctacaggttttgtattatctgatttttcgggatggatgccaaaaggttcctgcatctggtcgaggagaagaaaagaagggtcctcgagaagaaagaagccccactaaagtgggagcagaagctagaaacagcagctaaggccaaggttgatgcagaagcaaaggtgaagaagctaaattcaagaaagcacaggaggagaggagatttgtcctcagactctgatagtgactatggcagcgatgttgatcgaaaacacttgaagaggaagaaccgcagaaggaacaagaagcatgagcattctgactctgatgatgccaggagacgcaatcgtagatctagaaggagcaccgactcaagtgatgagagcaacagtgaatacgagaccaggtctgaagaagaacgtccaaggaagaagcgctcgcacagaagaaggcatcaccggcactcttcaaagtcagactctgaaaactacagcagtgatgaggaacaacggagacctgccaaggaccattctcagagccgcaggcggcaccatcggtcatctgatgatgactcagacaaggacaaggtcaagtcaagacatgggaagggtctgagatctcgtgacgaggatgcaagagcagatttcaacagcaataagcatctcaggagccaatccttggaggagtcatcagatgatagagatgctgatgaatctgagaagatgaggaatggcaaaaggtctcacaagaatggcggccaccgtcaccatcaccatcgacaccaccatgaatgacatagtaactctgcagaacctaatgacaggaggcaagtactgaaagatggccagaggggcccttgaaggtgacagcgcatactgaagatatcccagcaaggtcgagttaattgtccttattaaggacatgaagatcatttttttttcgttcctgatgttctcagataattattgtattgctgacaacatttctttgatttgtgaatat

SEQ ID NO: 5404 - protein, 247 aa, Zea mays subsp. mays
  peptide (1)..(247): Ceres Seq. ID no. 12406932
  misc_feature (11)..(227): Pfam Name: Caldesmon Pfam Description: Caldesmon
  misc_feature (1)..(247): Homolog of NCBI NO: 34895374 NR Description: P0698A04.25 [Oryza sativa (japonica
  misc_feature (1)..(235): Homolog of NCBI NO: 18379151 NR Description: expressed protein; protein id: At2g01100.1, by cDNA: 39741., supported by cDNA: gi_18086560 [Arabidopsis >gi|25410880|pir||F84420 hypothetical protein At2g01100
  misc_feature (10)..(247): Homolog of NCBI NO: 15218071 NR Description: DEAD/DEAH box RNA helicase, putative; protein id: [Arabidopsis thaliana] >gi|25518759|pir||H86341 hypothetical
  misc_feature (12)..(231): Homolog of NCBI NO: 39594465 NR Description: Hypothetical protein CBG19125 [Caenorhabditis
  misc_feature (28)..(247): Homolog of NCBI NO: 12834839 NR Description: unnamed protein product [Mus musculus]
  misc_feature (11)..(247): Homolog of NCBI NO: 39586156 NR Description: Hypothetical protein CBG15274 [Caenorhabditis
  misc_feature (11)..(247): Homolog of NCBI NO: 24580684 NR Description: CG2839-PA [Drosophila melanogaster]
  misc_feature (28)..(247): Homolog of NCBI NO: 30794464 NR Description: RIKEN cDNA 1110021E09 [Mus musculus] RIKEN cDNA 1110021E09 [Mus musculus] >gi|30354152|gb|AAH52077.1|
  misc_feature (27)..(247): Homolog of NCBI NO: 12834839 NR Description: unnamed protein product [Mus musculus]
  misc_feature (4)..(247): Homolog of NCBI NO: 28485813 NR Description: similar to matrin cyclophilin (matrin-cyp)
MDAKRFLHLVEEKKRRVLEKKEAPLKWEQKLETAAKAKVDAEAKVKKLNSRKHRRRGDLSSDSDSDYGSDVDRKHLKRKNRRRNKKHEHSDSDDARRRNRRSRRSTDSSDESNSEYETRSEEERPRKKRSHRRRHHRHSSKSDSENYSSDEEQRRPAKDHSQSRRRHHRSSDDDSDKDKVKSRHGKGLRSRDEDARADFNSNKHLRSQSLEESSDDRDADESEKMRNGKRSHKNGGHRHHHHRHHHE

SEQ ID NO: 5405 - DNA, 1380 bp, Zea mays subsp. mays
  misc_feature (1)..(1380): Ceres Seq. ID no. 12404892
  misc_feature: MA Experiment ID: 108527 Result: Down-regulated in Transcription
  misc_feature: MA Experiment 108527 PARAMETER Experiment Name: Zm_5mM_NO_P Parameter: Age (day) Value: 8
  misc_feature: MA Experiment 108527 PARAMETER Experiment Name: Zm_5mM_NO_P Parameter: Organism Value: Zea mays
  misc_feature: MA Experiment 108527 PARAMETER Experiment Name: Zm_5mM_NO_P Parameter: Plant Line Value: 35A19
  misc_feature: MA Experiment 108527 PARAMETER Experiment Name: Zm_5mM_NO_P Parameter: Timepoint (hr) Value: 6
  misc_feature: MA Experiment 108527 PARAMETER Experiment Name: Zm_5mM_NO_P Parameter: Tissue Value: Aerial
  misc_feature: MA Experiment 108527 PARAMETER Experiment Name: Zm_5mM_NO_P Parameter: Treatment Value: 5mM NO vs. No Treatment
  misc_feature: MA Experiment ID: 108528 Result: Up-regulated in Transcription
  misc_feature: MA Experiment 108528 PARAMETER Experiment Name: Zm_Imbibed_Seeds_P Parameter: Age (day) Value: 5 vs. 2
  misc_feature: MA Experiment 108528 PARAMETER Experiment Name: Zm_Imbibed_Seeds_P Parameter: Organism Value: Zea mays
  misc_feature: MA Experiment 108528 PARAMETER Experiment Name: Zm_Imbibed_Seeds_P Parameter: Plant Line Value: 35A19
  misc_feature: MA Experiment 108528 PARAMETER Experiment Name: Zm_Imbibed_Seeds_P Parameter: Tissue Value: Aerial vs. Embryo
  misc_feature: MA Experiment ID: 108530 Result: Up-regulated in Transcription
  misc_feature: MA Experiment 108530 PARAMETER Experiment Name: Zm_Imbibed_Seeds_P Parameter: Age (day) Value: 6 vs. 2
  misc_feature: MA Experiment 108530 PARAMETER Experiment Name: Zm_Imbibed_Seeds_P Parameter: Organism Value: Zea mays
  misc_feature: MA Experiment 108530 PARAMETER Experiment Name: Zm_Imbibed_Seeds_P Parameter: Plant Line Value: 35A19
  misc_feature: MA Experiment 108530 PARAMETER Experiment Name: Zm_Imbibed_Seeds_P Parameter: Tissue Value: Aerial vs. Embryo
  misc_feature: MA Experiment ID: 108543 Result: Down-regulated in Transcription
  misc_feature: MA Experiment ID: 108545 Result: Up-regulated in Transcription
  misc_feature: MA Experiment 108545 PARAMETER Experiment Name: Zm_Imbibed_Seeds_P Parameter: Age (day) Value: 3 vs. 2
  misc_feature: MA Experiment 108545 PARAMETER Experiment Name: Zm_Imbibed_Seeds_P Parameter: Organism Value: Zea mays
  misc_feature: MA Experiment 108545 PARAMETER Experiment Name: Zm_Imbibed_Seeds_P Parameter: Plant Line Value: 35A19
  misc_feature: MA Experiment 108545 PARAMETER Experiment Name: Zm_Imbibed_Seeds_P Parameter: Tissue Value: Aerial vs. Embryo
  misc_feature: MA Experiment ID: 108547 Result: Up-regulated in Transcription
  misc_feature: MA Experiment 108547 PARAMETER Experiment Name: Zm_Imbibed_Seeds_P Parameter: Age (day) Value: 4 vs. 2
  misc_feature: MA Experiment 108547 PARAMETER Experiment Name: Zm_Imbibed_Seeds_P Parameter: Organism Value: Zea mays
  misc_feature: MA Experiment 108547 PARAMETER Experiment Name: Zm_Imbibed_Seeds_P Parameter: Plant Line Value: 35A19
  misc_feature: MA Experiment 108547 PARAMETER Experiment Name: Zm_Imbibed_Seeds_P Parameter: Tissue Value: Aerial vs. Embryo
  misc_feature: MA Experiment ID: 108559 Result: Down-regulated in Transcription
  misc_feature: MA Experiment 108559 PARAMETER Experiment Name: Zm_5mM_NO_P Parameter: Age (day) Value: 8
  misc_feature: MA Experiment 108559 PARAMETER Experiment Name: Zm_5mM_NO_P Parameter: Organism Value: Zea mays
  misc_feature: MA Experiment 108559 PARAMETER Experiment Name: Zm_5mM_NO_P Parameter: Plant Line Value: 35A19
  misc_feature: MA Experiment 108559 PARAMETER Experiment Name: Zm_5mM_NO_P Parameter: Timepoint (hr) Value: 12
  misc_feature: MA Experiment 108559 PARAMETER Experiment Name: Zm_5mM_NO_P Parameter: Tissue Value: Aerial
  misc_feature: MA Experiment 108559 PARAMETER Experiment Name: Zm_5mM_NO_P Parameter: Treatment Value: 5mM NO vs. No Treatment
  misc_feature: MA Experiment ID: 20000477 Result: Down-regulated in Transcription
  misc_feature: MA Experiment 20000477 PARAMETER Experiment Name: Zm_5mM_SA_P Parameter: Age (day) Value: 10
  misc_feature: MA Experiment 20000477 PARAMETER Experiment Name: Zm_5mM_SA_P Parameter: Organism Value: Zea mays
  misc_feature: MA Experiment 20000477 PARAMETER Experiment Name: Zm_5mM_SA_P Parameter: Plant Line Value: 35A19
  misc_feature: MA Experiment 20000477 PARAMETER Experiment Name: Zm_5mM_SA_P Parameter: Timepoint (hr) Value: 48
  misc_feature: MA Experiment 20000477 PARAMETER Experiment Name: Zm_5mM_SA_P Parameter: Tissue Value: Aerial
  misc_feature: MA Experiment 20000477 PARAMETER Experiment Name: Zm_5mM_SA_P Parameter: Treatment Value: 5mM SA vs. No Treatment
  misc_feature: MA Experiment ID: 20000478 Result: Down-regulated in Transcription
  misc_feature: MA Experiment 20000478 PARAMETER Experiment Name: Zm_5mM_SA_P Parameter: Age (day) Value: 11
  misc_feature: MA Experiment 20000478 PARAMETER Experiment Name: Zm_5mM_SA_P Parameter: Organism Value: Zea mays
  misc_feature: MA Experiment 20000478 PARAMETER Experiment Name: Zm_5mM_SA_P Parameter: Plant Line Value: 35A19
  misc_feature: MA Experiment 20000478 PARAMETER Experiment Name: Zm_5mM_SA_P Parameter: Timepoint (hr) Value: 72
  misc_feature: MA Experiment 20000478 PARAMETER Experiment Name: Zm_5mM_SA_P Parameter: Tissue Value: Aerial
  misc_feature: MA Experiment 20000478 PARAMETER Experiment Name: Zm_5mM_SA_P Parameter: Treatment Value: 5mM SA vs. No Treatment
  misc_feature: MA Experiment ID: 20000480 Result: Down-regulated in Transcription
  misc_feature: MA Experiment 20000480 PARAMETER Experiment Name: Zm_Drought_P Parameter: Age (day) Value: 11
  misc_feature: MA Experiment 20000480 PARAMETER Experiment Name: Zm_Drought_P Parameter: Organism Value: Zea mays
  misc_feature: MA Experiment 20000480 PARAMETER Experiment Name: Zm_Drought_P Parameter: Plant Line Value: 35A19
  misc_feature: MA Experiment 20000480 PARAMETER Experiment Name: Zm_Drought_P Parameter: Timepoint (hr) Value: 72
  misc_feature: MA Experiment 20000480 PARAMETER Experiment Name: Zm_Drought_P Parameter: Tissue Value: Aerial
  misc_feature: MA Experiment 20000480 PARAMETER Experiment Name: Zm_Drought_P Parameter: Treatment Value: Drought vs. No Drought
  misc_feature: MA Experiment ID: 20000492 Result: Up-regulated in Transcription
  misc_feature: MA Experiment 20000492 PARAMETER Experiment Name: Zm_Hybrid_Seed_Dev_P Parameter: DAP Value: 12
  misc_feature: MA Experiment 20000492 PARAMETER Experiment Name: Zm_Hybrid_Seed_Dev_P Parameter: Organism Value: Zea mays
  misc_feature: MA Experiment 20000492 PARAMETER Experiment Name: Zm_Hybrid_Seed_Dev_P Parameter: Plant Line Value: 35A19
  misc_feature: MA Experiment 20000492 PARAMETER Experiment Name: Zm_Hybrid_Seed_Dev_P Parameter: Tissue Value: Fert Kernel vs. Unfert Floret
atcgttcaccgaaccggtgcttctccgtgcatatatatataagcncgcgaccccggccgggcggcatcacagcacagcagtgcgccgtcattcattcatcgctgccatggcttcccctgtcctgctcgtcgccgcgctctgctgtctctgcgcgctgctcggagcggcgggggagccggcgaggggagcggcggcggaagcgtcggcactccgcagcaaggcggccacggaccccaacatggaggtgaagttcgacttcacgccgttcctgatccagtacaagagcggccgcgttgcaccggttcatgggcacgtcgttcgtcccggcgtccgtggacccgcgcaccggggtggcctccagggacgtggtcgtggaccacgggactggcctcgcggtgcggctgtaccggccgagccgccaagccgtcgccgccggcgtcggnngcaggctcaccgtgctggtgtacttccacggcggcgcgttcgtggtggagtcggcgttcgaccccgtgtaccacggctacctgaacgcgctgacggccaaggccggggtcatcgcggtgtcggtgaactaccgcctggcgccggagcacccgctcccggcggcgtacgaggacgcgtgggcggcgctggcgtgggtggtggcgaacgcgaacgcgcgacgcggcggggccggggccggggccggggacccctggctgtccaggcacggcgacgcgtcccgcctgttcctcgccggcgacagcgccggcggcaacatcgcgcagaacctggcgatgcgcgcggcggggcagcagcagaggatcagggggctggcgctgctggacccctacttcctggggcggtacgtgggcggggtcgcggcgcgcgcgtgggacttcatctgcgcgggaaggtacgggatggaccacccgtacgtggacccgatggcgctgnnggcggagnngctgcggcggctgccgtcgccgcgcgtgctgatgacggtntcggagcaggaccggctcggccccttccagcgcgcgtacgtggacgcgctccggggcagcgggtggcgcgggcgggcgcggctgtacgtgacgcccggcgagggccactgctacttcctcaacaacctcgcctcgcccaaggccgccatgcacatggccacgctcgccgcgttcatcaacggcagctgatagcttgtcggcagcgtggtagtgctgctcacccgatcgatcagccagccctctgtacgtagctatagtggtctgtctatctcactggtgagtggagacatctgtaaccaccataccgtatactgtattttgtcagtggccgcccgagagagaggtgtttagcatgcatgttatgtaatgtaatactacgcgcacgtttttgttc

SEQ ID NO: 5406 - protein, 411 aa, Zea mays subsp. mays
  peptide (1)..(411): Ceres Seq. ID no. 12404893
  misc_feature (96)..(409): Homolog of NCBI NO: 22959520 NR Description: hypothetical protein [Rhodobacter sphaeroides]
  misc_feature (108)..(364): Homolog of NCBI NO: 13562004 NR Description: major ampullate spidroin 2-like protein [Nephila
  misc_feature (258)..(372): Homolog of NCBI NO: 9625624 NR Description: nuclear antigen EBNA1 [Human herpesvirus 4]
  misc_feature (178)..(230): Homolog of NCBI NO: 9625624 NR Description: nuclear antigen EBNA1 [Human herpesvirus 4]
  misc_feature (258)..(358): Homolog of NCBI NO: 9625624 NR Description: nuclear antigen EBNA1 [Human herpesvirus 4]
  misc_feature (14)..(307): Homolog of NCBI NO: 19553189 NR Description: translation initiation factor 2 [Corynebacterium ATCC 13032] >gi|21324755|dbj|BAB99378.1| Translation initiation
  misc_feature (258)..(356): Homolog of NCBI NO: 9625624 NR Description: nuclear antigen EBNA1 [Human herpesvirus 4]
  misc_feature (15)..(15): Xaa is any aa, unknown or other
  misc_feature (148)..(148): Xaa is any aa, unknown or other
  misc_feature (312)..(312): Xaa is any aa, unknown or other
  misc_feature (315)..(315): Xaa is any aa, unknown or other
  misc_feature (329)..(329): Xaa is any aa, unknown or other
SFTEPVLLRAYIYKXATPAGRHHSTAVRRHSFIAAMASPVLLVAALCCLCALLGAAGEPARGAAAEASALRSKAATDPNMEVKFDFTPFLIQYKSGRVAPVHGHVVRPGVRGPAHRGGLQGRGRGPRDWPRGAAVPAEPPSRRRRRRXQAHRAGVLPRRRVRGGVGVRPRVPRLPERADGQGRGHRGVGELPPGAGAPAPGGVRGRVGGAGVGGGERERATRRGRGRGRGPLAVQARRRVPPVPRRRQRRRQHRAEPGDARGGAAAEDQGAGAAGPLLPGAVRGRGRGARVGLHLRGKVRDGPPVRGPDGAXGGXAAAAAVAARADDGXGAGPARPLPARVRGRAPGQRVARAGAAVRDARRGPLLLPQQPRLAQGRHAHGHARRVHQRQLIACRQRGSAAHPIDQPALCT

SEQ ID NO: 5407 - protein, 376 aa, Zea mays subsp. mays
  peptide (1)..(376): Ceres Seq. ID no. 12404894
  misc_feature (61)..(374): Homolog of NCBI NO: 22959520 NR Description: hypothetical protein [Rhodobacter sphaeroides]
  misc_feature (73)..(329): Homolog of NCBI NO: 13562004 NR Description: major ampullate spidroin 2-like protein [Nephila
  misc_feature (223)..(337): Homolog of NCBI NO: 9625624 NR Description: nuclear antigen EBNA1 [Human herpesvirus 4]
  misc_feature (143)..(195): Homolog of NCBI NO: 9625624 NR Description: nuclear antigen EBNA1 [Human herpesvirus 4]
  misc_feature (223)..(323): Homolog of NCBI NO: 9625624 NR Description: nuclear antigen EBNA1 [Human herpesvirus 4]
  misc_feature (1)..(272): Homolog of NCBI NO: 19553189 NR Description: translation initiation factor 2 [Corynebacterium ATCC 13032] >gi|21324755|dbj|BAB99378.1| Translation initiation
  misc_feature (223)..(321): Homolog of NCBI NO: 9625624 NR Description: nuclear antigen EBNA1 [Human herpesvirus 4]
  misc_feature (113)..(113): Xaa is any aa, unknown or other
  misc_feature (277)..(277): Xaa is any aa, unknown or other
  misc_feature (280)..(280): Xaa is any aa, unknown or other
  misc_feature (294)..(294): Xaa is any aa, unknown or other
MASPVLLVAALCCLCALLGAAGEPARGAAAEASALRSKAATDPNMEVKFDFTPFLIQYKSGRVAPVHGHVVRPGVRGPAHRGGLQGRGRGPRDWPRGAAVPAEPPSRRRRRRXQAHRAGVLPRRRVRGGVGVRPRVPRLPERADGQGRGHRGVGELPPGAGAPAPGGVRGRVGGAGVGGGERERATRRGRGRGRGPLAVQARRRVPPVPRRRQRRRQHRAEPGDARGGAAAEDQGAGAAGPLLPGAVRGRGRGARVGLHLRGKVRDGPPVRGPDGAXGGXAAAAAVAARADDGXGAGPARPLPARVRGRAPGQRVARAGAAVRDARRGPLLLPQQPRLAQGRHAHGHARRVHQRQLIACRQRGSAAHPIDQPALCT

SEQ ID NO: 5408 - protein, 332 aa, Zea mays subsp. mays
  peptide (1)..(332): Ceres Seq. ID no. 12404895
  misc_feature (17)..(330): Homolog of NCBI NO: 22959520 NR Description: hypothetical protein [Rhodobacter sphaeroides]
  misc_feature (29)..(285): Homolog of NCBI NO: 13562004 NR Description: major ampullate spidroin 2-like protein [Nephila
  misc_feature (179)..(293): Homolog of NCBI NO: 9625624 NR Description: nuclear antigen EBNA1 [Human herpesvirus 4]
  misc_feature (99)..(151): Homolog of NCBI NO: 9625624 NR Description: nuclear antigen EBNA1 [Human herpesvirus 4]
  misc_feature (179)..(279): Homolog of NCBI NO: 9625624 NR Description: nuclear antigen EBNA1 [Human herpesvirus 4]
  misc_feature (1)..(228): Homolog of NCBI NO: 19553189 NR Description: translation initiation factor 2 [Corynebacterium ATCC 13032] >gi|21324755|dbj|BAB99378.1| Translation initiation
  misc_feature (179)..(277): Homolog of NCBI NO: 9625624 NR Description: nuclear antigen EBNA1 [Human herpesvirus 4]
  misc_feature (69)..(69): Xaa is any aa, unknown or other
  misc_feature (233)..(233): Xaa is any aa, unknown or other
  misc_feature (236)..(236): Xaa is any aa, unknown or other
  misc_feature (250)..(250): Xaa is any aa, unknown or other
MEVKFDFTPFLIQYKSGRVAPVHGHVVRPGVRGPAHRGGLQGRGRGPRDWPRGAAVPAEPPSRRRRRRXQAHRAGVLPRRRVRGGVGVRPRVPRLPERADGQGRGHRGVGELPPGAGAPAPGGVRGRVGGAGVGGGERERATRRGRGRGRGPLAVQARRRVPPVPRRRQRRRQHRAEPGDARGGAAAEDQGAGAAGPLLPGAVRGRGRGARVGLHLRGKVRDGPPVRGPDGAXGGXAAAAAVAARADDGXGAGPARPLPARVRGRAPGQRVARAGAAVRDARRGPLLLPQQPRLAQGRHAHGHARRVHQRQLIACRQRGSAAHPIDQPALCT

SEQ ID NO: 5409 - protein, 289 aa, Zea mays subsp. mays
  peptide (1)..(289): Ceres Seq. ID no. 12404896
  misc_feature (33)..(94): Pfam Name: Carboxylesterase Pfam Description: Carboxylesterase
  misc_feature (1)..(287): Homolog of NCBI NO: 38344841 NR Description: OSJNBa0064H22.22 [Oryza sativa (japonica
  misc_feature (1)..(287): Homolog of NCBI NO: 34393323 NR Description: putative cell death associated protein [Oryza
  misc_feature (1)..(287): Homolog of NCBI NO: 18401743 NR Description: expressed protein; protein id: At1g47480.1, by cDNA: 111056. [Arabidopsis thaliana] >gi|25405208|pir||A96515
  misc_feature (1)..(287): Homolog of NCBI NO: 21536771 NR Description: unknown [Arabidopsis thaliana]
  misc_feature (1)..(287): Homolog of NCBI NO: 34393904 NR Description: putative cell death associated protein [Oryza
  misc_feature (1)..(288): Homolog of NCBI NO: 21537287 NR Description: putative esterase [Arabidopsis thaliana]
  misc_feature (1)..(288): Homolog of NCBI NO: 18402731 NR Description: expressed protein; protein id: At1g49650.1, by cDNA: 12638. [Arabidopsis thaliana]
  misc_feature (1)..(288): Homolog of NCBI NO: 15228426 NR Description: putative protein; protein id: At3g48700.1
  misc_feature (1)..(287): Homolog of NCBI NO: 34393975 NR Description: putative PrMC3 [Oryza sativa (japonica
  misc_feature (1)..(287): Homolog of NCBI NO: 15227669 NR Description: putative esterase; protein id: At2g03550.1
  misc_feature (46)..(46): Xaa is any aa, unknown or other
  misc_feature (47)..(47): Xaa is any aa, unknown or other
  misc_feature (211)..(211): Xaa is any aa, unknown or other
  misc_feature (214)..(214): Xaa is any aa, unknown or other
  misc_feature (227)..(227): Xaa is any aa, unknown or other
MGTSFVPASVDPRTGVASRDVVVDHGTGLAVRLYRPSRQAVAAGVXXRLTVLVYFHGGAFVVESAFDPVYHGYLNALTAKAGVIAVSVNYRLAPEHPLPAAYEDAWAALAWVVANANARRGGAGAGAGDPWLSRHGDASRLFLAGDSAGGNIAQNLAMRAAGQQQRIRGLALLDPYFLGRYVGGVAARAWDFICAGRYGMDHPYVDPMALXAEXLRRLPSPRVLMTXSEQDRLGPFQRAYVDALRGSGWRGRARLYVTPGEGHCYFLNNLASPKAAMHMATLAAFINGS

SEQ ID NO: 5410 - DNA, 1167 bp, Zea mays subsp. mays
  misc_feature (1)..(1167): Ceres Seq. ID no. 12355460
  misc_feature: MA Experiment ID: 108597 Result: Up-regulated in Transcription
  misc_feature: MA Experiment 108597 PARAMETER Experiment Name: Zm_100uM_ABA_P Parameter: Age (day) Value: 9
  misc_feature: MA Experiment 108597 PARAMETER Experiment Name: Zm_100uM_ABA_P Parameter: Organism Value: Zea mays
  misc_feature: MA Experiment 108597 PARAMETER Experiment Name: Zm_100uM_ABA_P Parameter: Plant Line Value: 35A19
  misc_feature: MA Experiment 108597 PARAMETER Experiment Name: Zm_100uM_ABA_P Parameter: Timepoint (hr) Value: 24
  misc_feature: MA Experiment 108597 PARAMETER Experiment Name: Zm_100uM_ABA_P Parameter: Tissue Value: Aerial
  misc_feature: MA Experiment 108597 PARAMETER Experiment Name: Zm_100uM_ABA_P Parameter: Treatment Value: 100uM ABA vs. No Treatment
aaaaggctgtcagctaaattcttcggaacccccgttgccagccggcgatcgcgccgtgggatctcatcgaggcgacgacggcgatgtcaagggaggcggcgaggacgaggagccgggtcctggtggttggcgccaccggccgcctcggtggaagcatcgctcgggccagcctcgccgcgggtcaccccaccttcgcgctcgttcggccccaccacttcgcacgccccgattcccccgtgcttgggccgctcgtagccgccggcgccactctgctccaggggtcactggaagattactcgagcctgctcgaggcggtgtgtcaggtggacgttgtcatctgcgcggtgtccacgaagcaggtgctcgagcagaagcctctgattcgggctataaaggaagctggatgcgtgaagagatttattccggcagaatttggagcagatccaacaaaggttcaaatttgtggcatggattatggcttctatgagaagaaaattgaaatccgtcattcaatagagagtgaaggcattcctcatacttacatatgctgcaacttctttatgcgctatttgcttccttcactggtgcaacctgggctagatgctcctcctagagatgaaatcaaaatatttggtgaaggaaatactaaaggtgtttttgttaaagagaatgatgttgctaaatttacaatatgcaccatagaggatcccagaacattgaacaagacgttgtatctgagacctccaggaaatgtcttctcaatgaatgaattggctgacctctgggagtcaaaactcaagaaatccctgaaaaggttatatgtaacagaagagcaacttcttaaagaaatccatgatgctccatttcccttgaagatggatttaatctttatatattcagcgtttgttaagggtgaccacacgtattttgaaattgacttgtcaatggaaggaactcaactgtatccccatgtaaattatacaacagtgaacgagtacttggatactctagtttaggatatttgttcggtttatatcttccttgtaataagtcaaaaataatgttttttttttgtttcgaatggagcattaaaagaaggggactgatggacacctatccatgtttgttctgacaagcgaatgtggtgatgatctgacaaattttttt

SEQ ID NO: 5411 - protein, 310 aa, Zea mays subsp. mays
  peptide (1)..(310): Ceres Seq. ID no. 12355461
  misc_feature (7)..(310): Pfam Name: Isoflavone reductase Pfam Description: Isoflavone reductase
  misc_feature (4)..(310): Homolog of NCBI NO: 15236146 NR Description: isoflavone reductase family; protein id:
  misc_feature (8)..(310): Homolog of NCBI NO: 38492949 NR Description: Chain A, Crystal Structures Of And Phenylcoumaran Benzylic Ether Reductases, And Their To Isoflavone Reductases >gi|38492950|pdb|1QYC|B Chain B, Crystal
  misc_feature (8)..(310): Homolog of NCBI NO: 3415126 NR Description: phenylcoumaran benzylic ether reductase [Pinus
  misc_feature (9)..(310): Homolog of NCBI NO: 10764491 NR Description: allergenic isoflavone reductase-like protein Bet
MSREAARTRSRVLVVGATGRLGGSIARASLAAGHPTFALVRPHHFARPDSPVLGPLVAAGATLLQGSLEDYSSLLEAVCQVDVVICAVSTKQVLEQKPLIRAIKEAGCVKRFIPAEFGADPTKVQICGMDYGFYEKKIEIRHSIESEGIPHTYICCNFFMRYLLPSLVQPGLDAPPRDEIKIFGEGNTKGVFVKENDVAKFTICTIEDPRTLNKTLYLRPPGNVFSMNELADLWESKLKKSLKRLYVTEEQLLKEIHDAPFPLKMDLIFIYSAFVKGDHTYFEIDLSMEGTQLYPHVNYTTVNEYLDTLV

SEQ ID NO: 5412 - protein, 182 aa, Zea mays subsp. mays
  peptide (1)..(182): Ceres Seq. ID no. 12355462
  misc_feature (1)..(182): Pfam Name: Isoflavone reductase Pfam Description: Isoflavone reductase
  misc_feature (1)..(182): Homolog of NCBI NO: 15236146 NR Description: isoflavone reductase family; protein id:
  misc_feature (1)..(182): Homolog of NCBI NO: 38492949 NR Description: Chain A, Crystal Structures Of And Phenylcoumaran Benzylic Ether Reductases, And Their To Isoflavone Reductases >gi|38492950|pdb|1QYC|B Chain B, Crystal
  misc_feature (1)..(182): Homolog of NCBI NO: 3415126 NR Description: phenylcoumaran benzylic ether reductase [Pinus
  misc_feature (1)..(182): Homolog of NCBI NO: 10764491 NR Description: allergenic isoflavone reductase-like protein Bet
MDYGFYEKKIEIRHSIESEGIPHTYICCNFFMRYLLPSLVQPGLDAPPRDEIKIFGEGNTKGVFVKENDVAKFTICTIEDPRTLNKTLYLRPPGNVFSMNELADLWESKLKKSLKRLYVTEEQLLKEIHDAPFPLKMDLIFIYSAFVKGDHTYFEIDLSMEGTQLYPHVNYTTVNEYLDTLV

SEQ ID NO: 5413 - protein, 161 aa, Zea mays subsp. mays
  peptide (1)..(161): Ceres Seq. ID no. 12355463
KGCQLNSSEPPLPAGDRAVGSHRGDDGDVKGGGEDEEPGPGGWRHRPPRWKHRSGQPRRGSPHLRARSAPPLRTPRFPRAWAARSRRRHSAPGVTGRLLEPARGGVSGGRCHLRGVHEAGARAEASDSGYKGSWMREEIYSGRIWSRSNKGSNLWHGLWLL

SEQ ID NO: 5414 - DNA, 1633 bp, Zea mays subsp. mays
  misc_feature (1)..(1633): Ceres Seq. ID no. 12406661
  misc_feature: MA Experiment ID: 108526 Result: Up-regulated in Transcription
  misc_feature: MA Experiment 108526 PARAMETER Experiment Name: Zm_5mM_NO_P Parameter: Age (day) Value: 8
  misc_feature: MA Experiment 108526 PARAMETER Experiment Name: Zm_5mM_NO_P Parameter: Organism Value: Zea mays
  misc_feature: MA Experiment 108526 PARAMETER Experiment Name: Zm_5mM_NO_P Parameter: Plant Line Value: 35A19
  misc_feature: MA Experiment 108526 PARAMETER Experiment Name: Zm_5mM_NO_P Parameter: Timepoint (hr) Value: 1
  misc_feature: MA Experiment 108526 PARAMETER Experiment Name: Zm_5mM_NO_P Parameter: Tissue Value: Aerial
  misc_feature: MA Experiment 108526 PARAMETER Experiment Name: Zm_5mM_NO_P Parameter: Treatment Value: 5mM NO vs. No Treatment
  misc_feature: MA Experiment ID: 108527 Result: Up-regulated in Transcription
  misc_feature: MA Experiment 108527 PARAMETER Experiment Name: Zm_5mM_NO_P Parameter: Age (day) Value: 8
  misc_feature: MA Experiment 108527 PARAMETER Experiment Name: Zm_5mM_NO_P Parameter: Organism Value: Zea mays
  misc_feature: MA Experiment 108527 PARAMETER Experiment Name: Zm_5mM_NO_P Parameter: Plant Line Value: 35A19
  misc_feature: MA Experiment 108527 PARAMETER Experiment Name: Zm_5mM_NO_P Parameter: Timepoint (hr) Value: 6
  misc_feature: MA Experiment 108527 PARAMETER Experiment Name: Zm_5mM_NO_P Parameter: Tissue Value: Aerial
  misc_feature: MA Experiment 108527 PARAMETER Experiment Name: Zm_5mM_NO_P Parameter: Treatment Value: 5mM NO vs. No Treatment
  misc_feature: MA Experiment ID: 108533 Result: Up-regulated in Transcription
  misc_feature: MA Experiment 108533 PARAMETER Experiment Name: Zm_4deg_Cold_P Parameter: Age (hr) Value: 8
  misc_feature: MA Experiment 108533 PARAMETER Experiment Name: Zm_4deg_Cold_P Parameter: Organism Value: Zea mays
  misc_feature: MA Experiment 108533 PARAMETER Experiment Name: Zm_4deg_Cold_P Parameter: Plant Line Value: 35A19
  misc_feature: MA Experiment 108533 PARAMETER Experiment Name: Zm_4deg_Cold_P Parameter: Temperature (deg C) Value: 4 vs. 22
  misc_feature: MA Experiment 108533 PARAMETER Experiment Name: Zm_4deg_Cold_P Parameter: Timepoint (hr) Value: 1
  misc_feature: MA Experiment 108533 PARAMETER Experiment Name: Zm_4deg_Cold_P Parameter: Tissue Value: Aerial
  misc_feature: MA Experiment ID: 108534 Result: Up-regulated in Transcription
  misc_feature: MA Experiment 108534 PARAMETER Experiment Name: Zm_4deg_Cold_P Parameter: Age (hr) Value: 8
  misc_feature: MA Experiment 108534 PARAMETER Experiment Name: Zm_4deg_Cold_P Parameter: Organism Value: Zea mays
  misc_feature: MA Experiment 108534 PARAMETER Experiment Name: Zm_4deg_Cold_P Parameter: Plant Line Value: 35A19
  misc_feature: MA Experiment 108534 PARAMETER Experiment Name: Zm_4deg_Cold_P Parameter: Temperature (deg C) Value: 4 vs. 22
  misc_feature: MA Experiment 108534 PARAMETER Experiment Name: Zm_4deg_Cold_P Parameter: Timepoint (hr) Value: 6
  misc_feature: MA Experiment 108534 PARAMETER Experiment Name: Zm_4deg_Cold_P Parameter: Tissue Value: Aerial
  misc_feature: MA Experiment ID: 20000108 Result: Down-regulated in Transcription
  misc_feature: MA Experiment 20000108 PARAMETER Experiment Name: Zm_Root-Tips_P Parameter: Age (day) Value: 12
  misc_feature: MA Experiment 20000108 PARAMETER Experiment Name: Zm_Root-Tips_P Parameter: Organism Value: Zea mays
  misc_feature: MA Experiment 20000108 PARAMETER Experiment Name: Zm_Root-Tips_P Parameter: Tissue Value: Root tips vs. Root mid region    35
  misc_feature: MA Experiment 20000108 PARAMETER Experiment Name: Zm_Root-Tips_P Parameter: Tissue Value: Root tips vs. Root mid region   Sequence Listing-Misc Features (4)
  misc_feature: MA Experiment ID: 20000627 Result: Up-regulated in Transcription
  misc_feature: MA Experiment 20000627 PARAMETER Experiment Name: Zm_Herbicide-Treatments_P Parameter: Timepoint (hr) Value: 12
  misc_feature: MA Experiment 20000627 PARAMETER Experiment Name: Zm_Herbicide-Treatments_P Parameter: Tissue Value: Aerial
  misc_feature: MA Experiment 20000627 PARAMETER Experiment Name: Zm_Herbicide-Treatments_P Parameter: Treatment Value: Finale vs. No Treatment
  misc_feature: MA Experiment ID: 20001608 Result: Down-regulated in Transcription
  misc_feature: MA Experiment 20001608 PARAMETER Experiment Name: Zm_50ppm_KNO3_L-to-H_P Parameter: Age (day) Value: 21
  misc_feature: MA Experiment 20001608 PARAMETER Experiment Name: Zm_50ppm_KNO3_L-to-H_P Parameter: Organism Value: Zea mays
  misc_feature: MA Experiment 20001608 PARAMETER Experiment Name: Zm_50ppm_KNO3_L-to-H_P Parameter: Plant Line Value: 35A19
  misc_feature: MA Experiment 20001608 PARAMETER Experiment Name: Zm_50ppm_KNO3_L-to-H_P Parameter: Timepoint (hr) Value: 48
  misc_feature: MA Experiment 20001608 PARAMETER Experiment Name: Zm_50ppm_KNO3_L-to-H_P Parameter: Tissue Value: Shoots
  misc_feature: MA Experiment 20001608 PARAMETER Experiment Name: Zm_50ppm_KNO3_L-to-H_P Parameter: Treatment Value: 50ppm KNO3 vs. 50ppm KCl
atcaccaaccctcctcctccttgcctaggtactcgcagcagcgtcggcaagcaaggttctcttctcgcgccgcccagatctgagcgctcccatggccatgccgtcctcccgctccccggcgcngccgccaacggcctcctcctcctactggtgctacatgtgcgaccgcttcgttcgcgccgccgcttcctcctcctcctcacccacttcgccgtcctcctcctcccccgcctgcccgtcctgcggcgggggcttcctcgaggagatgggcgcgccgccgccccgcgcccgccggccccgccgcgccgcccgccgcggcaccgactcccgcgcctcgcccttcaaccccgtcatcgttctccgccgctccccgcccgccgacgccgacgccgatggctcctcctctcccgccgccgccaccggcagcagcttacgagctgttctacgacgacggggcggggtcgggcctccgcccgctcccggagagcatgtcggacttcctcatgggctccggcttcgagcggctgctggagcagctggcccagatggaggccggcggcggtctggcggcgcgcgcccgcgacgcgccgccggcgtccaaggccgccgtggactccatgcccgcgctccgcgtcggcgccgcccacgtcgcggccgacgcgcactgcgccgtctgcaaggaggccttcgagctgggcgccgaggccagggagatgccctgcgcccacatctaccatgccgactgcatcctgccctggctcgcgctccgcaactcctgccccgtctgccgccacgagatgcccgccgacaacgccgccccgcgcgctgccgccgccgccgccgcggacgaggacgccagggtcggcctcaccatctggaggctccccggcggcgggttcgcggtcgggagattcgccggcgggccgaggcccgacgagagggagctccccgtggtgtacacggagatggaaagcgggttcaacttcaacagcggccacgcgcccaggcggatctcgtggggcgccaggcaggccgcggccacggacaggggcaccgtccgccgcttcctccgcagcgtcttcgcctgctttggacgcggccacgccccgtcggcggcggccgcgcgcgccatgcctgagctcaacgacgacgacgtggcgtctgaccacagcgccgccttcagccgtgggtccaggagccggagcaccagctggaggctcgaggacgggcgtgccgacgccatggtgcagagatgaccgccgtatactgtgtggaactgcttgtagtacagttacagtaacgctgccgaaaaagattgctgctttgtttcattcatgttgtatttaccgtactactgctagcctcctgcctactacttaggaagatttgaggttgtagaacagggcaaattggtgttagtacatattgtagtagtgaggaagggaaagagagcagcatctcgacctctctttgttagagagtttgcattgcagctgcaggtggggggtcaactgcgaactcaaacacttgttcttggcttggttggtggtaatattaggagcgaggtgatggatcaactgttcttttattatctttctttctgttcagttcattgtggcaggaaccatccttg

SEQ ID NO: 5415 - protein, 459 aa, Zea mays subsp. mays
  peptide (1)..(459): Ceres Seq. ID no. 12406662
  misc_feature (202)..(392): Pfam Name: Glycoprotein GG/GX Pfam Description: Glycoprotein GG/GX
  misc_feature (193)..(375): Homolog of NCBI NO: 20138131 NR Description: Vegetative cell wall protein gp1 precursor rich glycoprotein 1) >gi|12018147|gb|AAG45420.1|AF309494_1
  misc_feature (200)..(363): Homolog of NCBI NO: 20138131 NR Description: Vegetative cell wall protein gp1 precursor rich glycoprotein 1) >gi|12018147|gb|AAG45420.1|AF309494_1
  misc_feature (145)..(414): Homolog of NCBI NO: 30984464 NR Description: very large tegument protein [Cercopithecine
  misc_feature (193)..(414): Homolog of NCBI NO: 27375632 NR Description: blr0521 [Bradyrhizobium japonicum]
  misc_feature (193)..(414): Homolog of NCBI NO: 15805485 NR Description: hypothetical protein [Deinococcus radiodurans]
  misc_feature (193)..(363): Homolog of NCBI NO: 20138131 NR Description: Vegetative cell wall protein gp1 precursor rich glycoprotein 1) >gi|12018147|gb|AAG45420.1|AF309494_1
  misc_feature (200)..(397): Homolog of NCBI NO: 6523547 NR Description: hydroxyproline-rich glycoprotein DZ-HRGP [Volvox
  misc_feature (170)..(408): Homolog of NCBI NO: 22962211 NR Description: hypothetical protein [Rhodopseudomonas palustris]
  misc_feature (181)..(373): Homolog of NCBI NO: 6523547 NR Description: hydroxyproline-rich glycoprotein DZ-HRGP [Volvox
  misc_feature (200)..(377): Homolog of NCBI NO: 6523547 NR Description: hydroxyproline-rich glycoprotein DZ-HRGP [Volvox
  misc_feature (41)..(41): Xaa is any aa, unknown or other
ITNPPPPCLGTRSSVGKQGSLLAPPRSERSHGHAVLPLPGXAANGLLLLLVLHVRPLRSRRRFLLLLTHFAVLLLPRLPVLRRGLPRGDGRAAAPRPPAPPRRPPRHRLPRLALQPRHRSPPLPARRRRRRWLLLSRRRHRQQLTSCSTTTGRGRASARSRRACRTSSWAPASSGCWSSWPRWRPAAVWRRAPATRRRRPRPPWTPCPRSASAPPTSRPTRTAPSARRPSSWAPRPGRCPAPTSTMPTASCPGSRSATPAPSAATRCPPTTPPRALPPPPPRTRTPGSASPSGGSPAAGSRSGDSPAGRGPTRGSSPWCTRRWKAGSTSTAATRPGGSRGAPGRPRPRTGAPSAASSAASSPALDAATPRRRRPRAPCLSSTTTTWRLTTAPPSAVGPGAGAPAGGSRTGVPTPWCRDDRRILCGTACSTVTVTLPKKIAALFHSCCIYRTTASLLPTT

SEQ ID NO: 5416 - protein, 348 aa, Zea mays subsp. mays
  peptide (1)..(348): Ceres Seq. ID no. 12406663
  misc_feature (96)..(323): Pfam Name: HlyD family secretion protein Pfam Description: HlyD family secretion protein
  misc_feature (1)..(114): Homolog of NCBI NO: 14719329 NR Description: putative RING-H2 finger protein [Oryza sativa]
  misc_feature (15)..(91): Homolog of NCBI NO: 34902106 NR Description: unknown protein [Oryza sativa (japonica
  misc_feature (1)..(130): Homolog of NCBI NO: 37530772 NR Description: putative RING-H2 finger protein [Oryza sativa
  misc_feature (1)..(113): Homolog of NCBI NO: 13592175 NR Description: ppg3 [Leishmania major]
  misc_feature (1)..(113): Homolog of NCBI NO: 13592175 NR Description: ppg3 [Leishmania major]
  misc_feature (1)..(116): Homolog of NCBI NO: 13592175 NR Description: ppg3 [Leishmania major]
  misc_feature (11)..(11): Xaa is any aa, unknown or other
MAMPSSRSPAXPPTASSSYWCYMCDRFVRAAASSSSSPTSPSSSSPACPSCGGGFLEEMGAPPPRARRPRRAARRGTDSRASPFNPVIVLRRSPPADADADGSSSPAAATGSSLRAVLRRRGGVGPPPAPGEHVGLPHGLRLRAAAGAAGPDGGRRRSGGARPRRAAGVQGRRGLHARAPRRRRPRRGRRALRRLQGGLRAGRRGQGDALRPHLPCRLHPALARAPQLLPRLPPRDARRQRRPARCRRRRRGRGRQGRPHHLEAPRRRVRGREIRRRAEARREGAPRGVHGDGKRVQLQQRPRAQADLVGRQAGRGHGQGHRPPLPPQRLRLLWTRPRPVGGGRARHA

SEQ ID NO: 5417 - protein, 346 aa, Zea mays subsp. mays
  peptide (1)..(346): Ceres Seq. ID no. 12406664
  misc_feature (94)..(321): Pfam Name: HlyD family secretion protein Pfam Description: HlyD family secretion protein
  misc_feature (1)..(112): Homolog of NCBI NO: 14719329 NR Description: putative RING-H2 finger protein [Oryza sativa]
  misc_feature (13)..(89): Homolog of NCBI NO: 34902106 NR Description: unknown protein [Oryza sativa (japonica
  misc_feature (1)..(128): Homolog of NCBI NO: 37530772 NR Description: putative RING-H2 finger protein [Oryza sativa
  misc_feature (1)..(111): Homolog of NCBI NO: 13592175 NR Description: ppg3 [Leishmania major]
  misc_feature (1)..(111): Homolog of NCBI NO: 13592175 NR Description: ppg3 [Leishmania major]
  misc_feature (1)..(114): Homolog of NCBI NO: 13592175 NR Description: ppg3 [Leishmania major]
  misc_feature (9)..(9): Xaa is any aa, unknown or other
MPSSRSPAXPPTASSSYWCYMCDRFVRAAASSSSSPTSPSSSSPACPSCGGGFLEEMGAPPPRARRPRRAARRGTDSRASPFNPVIVLRRSPPADADADGSSSPAAATGSSLRAVLRRRGGVGPPPAPGEHVGLPHGLRLRAAAGAAGPDGGRRRSGGARPRRAAGVQGRRGLHARAPRRRRPRRGRRALRRLQGGLRAGRRGQGDALRPHLPCRLHPALARAPQLLPRLPPRDARRQRRPARCRRRRRGRGRQGRPHHLEAPRRRVRGREIRRRAEARREGAPRGVHGDGKRVQLQQRPRAQADLVGRQAGRGHGQGHRPPLPPQRLRLLWTRPRPVGGGRARHA

SEQ ID NO: 5418 - DNA, 454 bp, Zea mays subsp. mays
  misc_feature (1)..(454): Ceres Seq. ID no. 12346015
  misc_feature: MA Experiment ID: 108529 Result: Down-regulated in Transcription
  misc_feature: MA Experiment 108529 PARAMETER Experiment Name: Zm_Imbibed_Seeds_P Parameter: Age (day) Value: 5 vs. 2
  misc_feature: MA Experiment 108529 PARAMETER Experiment Name: Zm_Imbibed_Seeds_P Parameter: Organism Value: Zea mays
  misc_feature: MA Experiment 108529 PARAMETER Experiment Name: Zm_Imbibed_Seeds_P Parameter: Plant Line Value: 35A19
  misc_feature: MA Experiment 108529 PARAMETER Experiment Name: Zm_Imbibed_Seeds_P Parameter: Tissue Value: Roots vs. Embryo
  misc_feature: MA Experiment ID: 108530 Result: Down-regulated in Transcription
  misc_feature: MA Experiment 108530 PARAMETER Experiment Name: Zm_Imbibed_Seeds_P Parameter: Age (day) Value: 6 vs. 2
  misc_feature: MA Experiment 108530 PARAMETER Experiment Name: Zm_Imbibed_Seeds_P Parameter: Organism Value: Zea mays
  misc_feature: MA Experiment 108530 PARAMETER Experiment Name: Zm_Imbibed_Seeds_P Parameter: Plant Line Value: 35A19
  misc_feature: MA Experiment 108530 PARAMETER Experiment Name: Zm_Imbibed_Seeds_P Parameter: Tissue Value: Aerial vs. Embryo
  misc_feature: MA Experiment ID: 108535 Result: Up-regulated in Transcription
  misc_feature: MA Experiment 108535 PARAMETER Experiment Name: Zm_Meristem_P Parameter: Age (day) Value: 8
  misc_feature: MA Experiment 108535 PARAMETER Experiment Name: Zm_Meristem_P Parameter: Organism Value: Zea mays
  misc_feature: MA Experiment 108535 PARAMETER Experiment Name: Zm_Meristem_P Parameter: Plant Line Value: 35A19
  misc_feature: MA Experiment 108535 PARAMETER Experiment Name: Zm_Meristem_P Parameter: Tissue Value: Root Meristem vs. Above Root Meristem
  misc_feature: MA Experiment ID: 108544 Result: Down-regulated in Transcription
  misc_feature: MA Experiment ID: 20000487 Result: Up-regulated in Transcription
  misc_feature: MA Experiment 20000487 PARAMETER Experiment Name: Zm_50mM_NH4NO3_L_to_H_P Parameter: Organism Value: Zea mays
  misc_feature: MA Experiment 20000487 PARAMETER Experiment Name: Zm_50mM_NH4NO3_L_to_H_P Parameter: Timepoint (hr) Value: 4
  misc_feature: MA Experiment 20000487 PARAMETER Experiment Name: Zm_50mM_NH4NO3_L_to_H_P Parameter: Tissue Value: Leaves
  misc_feature: MA Experiment 20000487 PARAMETER Experiment Name: Zm_50mM_NH4NO3_L_to_H_P Parameter: Treatment Value: 50mM NH4NO3 vs. 100mM Mannitol
  misc_feature: MA Experiment ID: 20000488 Result: Up-regulated in Transcription
  misc_feature: MA Experiment 20000488 PARAMETER Experiment Name: Zm_50mM_NH4NO3_L_to_H_P Parameter: Organism Value: Zea mays
  misc_feature: MA Experiment 20000488 PARAMETER Experiment Name: Zm_50mM_NH4NO3_L_to_H_P Parameter: Timepoint (hr) Value: 8
  misc_feature: MA Experiment 20000488 PARAMETER Experiment Name: Zm_50mM_NH4NO3_L_to_H_P Parameter: Tissue Value: Leaves
  misc_feature: MA Experiment 20000488 PARAMETER Experiment Name: Zm_50mM_NH4NO3_L_to_H_P Parameter: Treatment Value: 50mM NH4NO3 vs. 100mM Mannitol
  misc_feature: MA Experiment ID: 20000492 Result: Up-regulated in Transcription
  misc_feature: MA Experiment 20000492 PARAMETER Experiment Name: Zm_Hybrid_Seed_Dev_P Parameter: DAP Value: 12
  misc_feature: MA Experiment 20000492 PARAMETER Experiment Name: Zm_Hybrid_Seed_Dev_P Parameter: Organism Value: Zea mays
  misc_feature: MA Experiment 20000492 PARAMETER Experiment Name: Zm_Hybrid_Seed_Dev_P Parameter: Plant Line Value: 35A19
  misc_feature: MA Experiment 20000492 PARAMETER Experiment Name: Zm_Hybrid_Seed_Dev_P Parameter: Tissue Value: Fert Kernel vs. Unfert Floret
  misc_feature: MA Experiment ID: 20000535 Result: Up-regulated in Transcription
  misc_feature: MA Experiment 20000535 PARAMETER Experiment Name: Zm_Hybrid_Seed_Dev_P Parameter: DAP Value: 30 vs. 12
  misc_feature: MA Experiment 20000535 PARAMETER Experiment Name: Zm_Hybrid_Seed_Dev_P Parameter: Organism Value: Zea mays
  misc_feature: MA Experiment 20000535 PARAMETER Experiment Name: Zm_Hybrid_Seed_Dev_P Parameter: Plant Line Value: 35A19
  misc_feature: MA Experiment 20000535 PARAMETER Experiment Name: Zm_Hybrid_Seed_Dev_P Parameter: Tissue Value: Embryo vs. Unfert Floret
  misc_feature: MA Experiment ID: 20000626 Result: Up-regulated in Transcription
  misc_feature: MA Experiment 20000626 PARAMETER Experiment Name: Zm_Herbicide-Treatments_P Parameter: Timepoint (hr) Value: 12
  misc_feature: MA Experiment 20000626 PARAMETER Experiment Name: Zm_Herbicide-Treatments_P Parameter: Tissue Value: Aerial
  misc_feature: MA Experiment 20000626 PARAMETER Experiment Name: Zm_Herbicide-Treatments_P Parameter: Treatment Value: Roundup vs. No Treatment
  misc_feature: MA Experiment ID: 20000632 Result: Down-regulated in Transcription
  misc_feature: MA Experiment 20000632 PARAMETER Experiment Name: Zm_Herbicide-Treatments_P Parameter: Timepoint (hr) Value: 4
  misc_feature: MA Experiment 20000632 PARAMETER Experiment Name: Zm_Herbicide-Treatments_P Parameter: Tissue Value: Aerial
  misc_feature: MA Experiment 20000632 PARAMETER Experiment Name: Zm_Herbicide-Treatments_P Parameter: Treatment Value: Glean vs. No Treatment
caaaagatgatactcagtcagatcgtgaggaggatgccagtaaacaagaggaggatgatgatgatgatattggtactgctctcatgtctcgcaagcagagaggcctttataaggctatgaagatgggcaaagaaaagaaaaaggagaaagttgagctactcaagaagagaaaaaagaacgcggattctggcgcttcttccaagaagcggcactgatgtgtcacaaatcttcatcgcattggtgtgtcatctctagtagaaatgttaccatgatcagctctgcgtgccaatcccccatgatgggtgggttgccttttgatatctgctatgtatgcttaagatgagttcaaggatatgtaacatgaaacttgaatagaaaagttttgatctgtcttacgaagcatttagactcgttattattgtgaaacttgaatagaaaagttttgacctgtctc

SEQ ID NO: 5419 - protein, 70 aa, Zea mays subsp. mays
  peptide (1)..(70): Ceres Seq. ID no. 12346016
  misc_feature (1)..(69): Homolog of NCBI NO: 28273368 NR Description: pescadillo-like protein [Oryza sativa (japonica
KDDTQSDREEDASKQEEDDDDDIGTALMSRKQRGLYKAMKMGKEKKKEKVELLKKRKKNADSGASSKKRH

SEQ ID NO: 5420 - protein, 43 aa, Zea mays subsp. mays
  peptide (1)..(43): Ceres Seq. ID no. 12346017
  misc_feature (1)..(42): Homolog of NCBI NO: 28273368 NR Description: pescadillo-like protein [Oryza sativa (japonica
MSRKQRGLYKAMKMGKEKKKEKVELLKKRKKNADSGASSKKRH

SEQ ID NO: 5421 - protein, 42 aa, Zea mays subsp. mays
  peptide (1)..(42): Ceres Seq. ID no. 12346018
MCHKSSSHWCVISSRNVTMISSACQSPMMGGLPFDICYVCLR

SEQ ID NO: 5422 - DNA, 1789 bp, Zea mays subsp. mays
  misc_feature (1)..(1789): Ceres Seq. ID no. 12405101
  misc_feature: MA Experiment ID: 108504 Result: Down-regulated in Transcription
  misc_feature: MA Experiment 108504 PARAMETER Experiment Name: Zm_Drought_P Parameter: Age (day) Value: 8
  misc_feature: MA Experiment 108504 PARAMETER Experiment Name: Zm_Drought_P Parameter: Organism Value: Zea mays
  misc_feature: MA Experiment 108504 PARAMETER Experiment Name: Zm_Drought_P Parameter: Plant Line Value: 35A19
  misc_feature: MA Experiment 108504 PARAMETER Experiment Name: Zm_Drought_P Parameter: Timepoint (hr) Value: 12
  misc_feature: MA Experiment 108504 PARAMETER Experiment Name: Zm_Drought_P Parameter: Tissue Value: Aerial
  misc_feature: MA Experiment 108504 PARAMETER Experiment Name: Zm_Drought_P Parameter: Treatment Value: Drought vs. No Drought
  misc_feature: MA Experiment ID: 108527 Result: Down-regulated in Transcription
  misc_feature: MA Experiment 108527 PARAMETER Experiment Name: Zm_5mM_NO_P Parameter: Age (day) Value: 8
  misc_feature: MA Experiment 108527 PARAMETER Experiment Name: Zm_5mM_NO_P Parameter: Organism Value: Zea mays
  misc_feature: MA Experiment 108527 PARAMETER Experiment Name: Zm_5mM_NO_P Parameter: Plant Line Value: 35A19
  misc_feature: MA Experiment 108527 PARAMETER Experiment Name: Zm_5mM_NO_P Parameter: Timepoint (hr) Value: 6
  misc_feature: MA Experiment 108527 PARAMETER Experiment Name: Zm_5mM_NO_P Parameter: Tissue Value: Aerial
  misc_feature: MA Experiment 108527 PARAMETER Experiment Name: Zm_5mM_NO_P Parameter: Treatment Value: 5mM NO vs. No Treatment
  misc_feature: MA Experiment ID: 108556 Result: Down-regulated in Transcription
  misc_feature: MA Experiment 108556 PARAMETER Experiment Name: Zm_Drought_P Parameter: Age (day) Value: 9
  misc_feature: MA Experiment 108556 PARAMETER Experiment Name: Zm_Drought_P Parameter: Organism Value: Zea mays
  misc_feature: MA Experiment 108556 PARAMETER Experiment Name: Zm_Drought_P Parameter: Plant Line Value: 35A19
  misc_feature: MA Experiment 108556 PARAMETER Experiment Name: Zm_Drought_P Parameter: Timepoint (hr) Value: 24
  misc_feature: MA Experiment 108556 PARAMETER Experiment Name: Zm_Drought_P Parameter: Tissue Value: Aerial
  misc_feature: MA Experiment 108556 PARAMETER Experiment Name: Zm_Drought_P Parameter: Treatment Value: Drought vs. No Drought
  misc_feature: MA Experiment ID: 108559 Result: Down-regulated in Transcription
  misc_feature: MA Experiment 108559 PARAMETER Experiment Name: Zm_5mM_NO_P Parameter: Age (day) Value: 8
  misc_feature: MA Experiment 108559 PARAMETER Experiment Name: Zm_5mM_NO_P Parameter: Organism Value: Zea mays
  misc_feature: MA Experiment 108559 PARAMETER Experiment Name: Zm_5mM_NO_P Parameter: Plant Line Value: 35A19
  misc_feature: MA Experiment 108559 PARAMETER Experiment Name: Zm_5mM_NO_P Parameter: Timepoint (hr) Value: 12
  misc_feature: MA Experiment 108559 PARAMETER Experiment Name: Zm_5mM_NO_P Parameter: Tissue Value: Aerial
  misc_feature: MA Experiment 108559 PARAMETER Experiment Name: Zm_5mM_NO_P Parameter: Treatment Value: 5mM NO vs. No Treatment
  misc_feature: MA Experiment ID: 20000477 Result: Down-regulated in Transcription
  misc_feature: MA Experiment 20000477 PARAMETER Experiment Name: Zm_5mM_SA_P Parameter: Age (day) Value: 10
  misc_feature: MA Experiment 20000477 PARAMETER Experiment Name: Zm_5mM_SA_P Parameter: Organism Value: Zea mays
  misc_feature: MA Experiment 20000477 PARAMETER Experiment Name: Zm_5mM_SA_P Parameter: Plant Line Value: 35A19
  misc_feature: MA Experiment 20000477 PARAMETER Experiment Name: Zm_5mM_SA_P Parameter: Timepoint (hr) Value: 48
  misc_feature: MA Experiment 20000477 PARAMETER Experiment Name: Zm_5mM_SA_P Parameter: Tissue Value: Aerial
  misc_feature: MA Experiment 20000477 PARAMETER Experiment Name: Zm_5mM_SA_P Parameter: Treatment Value: 5mM SA vs. No Treatment
  misc_feature: MA Experiment ID: 20000480 Result: Down-regulated in Transcription
  misc_feature: MA Experiment 20000480 PARAMETER Experiment Name: Zm_Drought_P Parameter: Age (day) Value: 11
  misc_feature: MA Experiment 20000480 PARAMETER Experiment Name: Zm_Drought_P Parameter: Organism Value: Zea mays
  misc_feature: MA Experiment 20000480 PARAMETER Experiment Name: Zm_Drought_P Parameter: Plant Line Value: 35A19
  misc_feature: MA Experiment 20000480 PARAMETER Experiment Name: Zm_Drought_P Parameter: Timepoint (hr) Value: 72
  misc_feature: MA Experiment 20000480 PARAMETER Experiment Name: Zm_Drought_P Parameter: Tissue Value: Aerial
  misc_feature: MA Experiment 20000480 PARAMETER Experiment Name: Zm_Drought_P Parameter: Treatment Value: Drought vs. No Drought
  misc_feature: MA Experiment ID: 20000535 Result: Down-regulated in Transcription
  misc_feature: MA Experiment 20000535 PARAMETER Experiment Name: Zm_Hybrid_Seed_Dev_P Parameter: DAP Value: 30 vs. 12
  misc_feature: MA Experiment 20000535 PARAMETER Experiment Name: Zm_Hybrid_Seed_Dev_P Parameter: Organism Value: Zea mays
  misc_feature: MA Experiment 20000535 PARAMETER Experiment Name: Zm_Hybrid_Seed_Dev_P Parameter: Plant Line Value: 35A19
  misc_feature: MA Experiment 20000535 PARAMETER Experiment Name: Zm_Hybrid_Seed_Dev_P Parameter: Tissue Value: Embryo vs. Unfert Floret
  misc_feature: MA Experiment ID: 20000626 Result: Down-regulated in Transcription
  misc_feature: MA Experiment 20000626 PARAMETER Experiment Name: Zm_Herbicide-Treatments_P Parameter: Timepoint (hr) Value: 12
  misc_feature: MA Experiment 20000626 PARAMETER Experiment Name: Zm_Herbicide-Treatments_P Parameter: Tissue Value: Aerial
  misc_feature: MA Experiment 20000626 PARAMETER Experiment Name: Zm_Herbicide-Treatments_P Parameter: Treatment Value: Roundup vs. No Treatment
attgccagccagctgcgcagtgcgcttgcctctgctgcgtataaagtttcttccttccttggccgcttctgcgctcgcctcccttctcctcccccatcctctcccttgtggttctagatccactcctccccgtgctcactgctcatccgcgaacaggttgagcggggacgccgtggaggggcgagggggagccagattgagccatggcctcctcctgggttcttgccctggttcttgcgctgtcggcaggcgcaagcctggcgcgtggctccgagccgtggtggaacgagacgcaggtgtacgccaccaccgccaactccggtggcggcaacggcgtcttcgtcggcctcacgctcatccagtcggcggcggccaagggagcggtgtgcttggatggaagcttaccaggttaccacctccacagagggtttggatcaggagcaaacagttggctcgtcaatctcgagggcggaggctggtgcaatgatcgcagcagctgtgtgttccgcaagggcagtcgtcgtggatcatcaaatcacatggagaggcaactccagtttacagggatattgagtaacaaacctgaagagaatcccgatttctacaactggaatagagtgaaggtccggtactgtgatggtggatctttcactggtgatggctctgatgcggctgcaggcctttatttccgaggtcagcgcatttggcaggccgctatggatgacctaatggcccaaggaatgcgttatgctaatcaggcccttctttctggatgctctgccggtggtgtttctaccatacttcactgtgatgaattccgtggactgttcccatcaaataccagagtcaaatgcttagctgatgctggaatgtttcttgacactgttgatgtttctggccgccgggaaatgagatcctttttcaatggtattgtgagattgcagggttctggaagaagcttgcctaggtcttgcacctcacacatggacaaaacctcgtgctttttcccccagaatgtgttgccaaccatccgaaccccaacttttgttttgaacactgcctatgacgtgtggcagcttcaacaaagtgtggcccctagaacagctgatccccaaggtctttggtcaaagtgtaggacgaaccatgccttctgtaatagcaaccagctccagtttttgcaagggttcaggaaccagatgcttgatgccgtgaggggtttctctgcatcaaggcaaaatggtctgttcatcaactcatgttttgctcattgccagagcgagagacaggatacttggtacgcgaacaactctccacgtcttggtaacaagaaaatcgctgacgctgtcggggactggttcttcgagagggggaatgccaagtacacagactgcccatacccttgcgatggcacttgccatcaccttgtgttcaggggagaccactaagatcattcttcagcaccaacaaattcatcagatggtacaaggatcaaaccccaatgggtacagaatggaaaacaaggtatagatacagataaggtgcaagtggtcggcttgcccatgtttgttcatcagtgagtcatatgattgatagtgcgaggacctcacccgcgaacgcgcggaggaggcctctgcattagattcacataccgtcatgatatcgaattttcattggaaaagtgtccatgattacgtaccagaacatttgagttacatactcatttcgtgtactgtattaataacactagaacgttacatattcatttgtcctgaagatcgtactacttggc

SEQ ID NO: 5423 - protein, 413 aa, Zea mays subsp. mays
  peptide (1)..(413): Ceres Seq. ID no. 12405102
  misc_feature (43)..(392): Pfam Name: Pectinacetylesterase Pfam Description: Pectinacetylesterase
  misc_feature (1)..(413): Homolog of NCBI NO: 34913332 NR Description: putative pectin acetylesterase precursor [Oryza
  misc_feature (43)..(410): Homolog of NCBI NO: 18397406 NR Description: pectinacetylesterase, putative; protein id: supported by cDNA: gi_15292826, supported by cDNA: gi_16226324, by cDNA: gi_20465792 [Arabidopsis thaliana]
  misc_feature (4)..(410): Homolog of NCBI NO: 25347293 NR Description: probable pectinacetylesterase precursor T8L23.6 - Arabidopsis thaliana >gi|12321351|gb|AAG50747.1|AC079733_15
  misc_feature (4)..(410): Homolog of NCBI NO: 30696158 NR Description: pectinacetylesterase, putative [Arabidopsis
  misc_feature (4)..(410): Homolog of NCBI NO: 21703105 NR Description: At1g57590/T8L23_6 [Arabidopsis thaliana]
  misc_feature (5)..(409): Homolog of NCBI NO: 28392968 NR Description: putative pectinacetylesterase [Arabidopsis >gi|28827554|gb|AAO50621.1| putative pectinacetylesterase
  misc_feature (1)..(410): Homolog of NCBI NO: 15226462 NR Description: pectinacetylesterase, putative; protein id: supported by cDNA: gi_15450606 [Arabidopsis thaliana]
  misc_feature (39)..(410): Homolog of NCBI NO: 7487997 NR Description: pectin acetylesterase homolog F21E10.11 - thaliana >gi|3047082|gb|AAC13595.1| similar to Vigna radiata
  misc_feature (43)..(256): Homolog of NCBI NO: 6714404 NR Description: putative pectinacetylesterase [Arabidopsis
  misc_feature (291)..(410): Homolog of NCBI NO: 6714404 NR Description: putative pectinacetylesterase [Arabidopsis
MASSWVLALVLALSAGASLARGSEPWWNETQVYATTANSGGGNGVFVGLTLIQSAAAKGAVCLDGSLPGYHLHRGFGSGANSWLVNLEGGGWCNDRSSCVFRKGSRRGSSNHMERQLQFTGILSNKPEENPDFYNWNRVKVRYCDGGSFTGDGSDAAAGLYFRGQRIWQAAMDDLMAQGMRYANQALLSGCSAGGVSTILHCDEFRGLFPSNTRVKCLADAGMFLDTVDVSGRREMRSFFNGIVRLQGSGRSLPRSCTSHMDKTSCFFPQNVLPTIRTPTFVLNTAYDVWQLQQSVAPRTADPQGLWSKCRTNHAFCNSNQLQFLQGFRNQMLDAVRGFSASRQNGLFINSCFAHCQSERQDTWYANNSPRLGNKKIADAVGDWFFERGNAKYTDCPYPCDGTCHHLVFRGDH

SEQ ID NO: 5424 - protein, 301 aa, Zea mays subsp. mays
  peptide (1)..(301): Ceres Seq. ID no. 12405103
  misc_feature (1)..(280): Pfam Name: Pectinacetylesterase Pfam Description: Pectinacetylesterase
  misc_feature (1)..(301): Homolog of NCBI NO: 34913332 NR Description: putative pectin acetylesterase precursor [Oryza
  misc_feature (1)..(298): Homolog of NCBI NO: 18397406 NR Description: pectinacetylesterase, putative; protein id: supported by cDNA: gi_15292826, supported by cDNA: gi_16226324, by cDNA: gi_20465792 [Arabidopsis thaliana]
  misc_feature (1)..(298): Homolog of NCBI NO: 25347293 NR Description: probable pectinacetylesterase precursor T8L23.6 - Arabidopsis thaliana >gi|12321351|gb|AAG50747.1|AC079733_15
  misc_feature (1)..(298): Homolog of NCBI NO: 30696158 NR Description: pectinacetylesterase, putative [Arabidopsis
  misc_feature (1)..(298): Homolog of NCBI NO: 21703105 NR Description: At1g57590/T8L23_6 [Arabidopsis thaliana]
  misc_feature (1)..(297): Homolog of NCBI NO: 28392968 NR Description: putative pectinacetylesterase [Arabidopsis >gi|28827554|gb|AAO50621.1| putative pectinacetylesterase
  misc_feature (1)..(298): Homolog of NCBI NO: 15226462 NR Description: pectinacetylesterase, putative; protein id: supported by cDNA: gi_15450606 [Arabidopsis thaliana]
  misc_feature (1)..(298): Homolog of NCBI NO: 7487997 NR Description: pectin acetylesterase homolog F21E10.11 - thaliana >gi|3047082|gb|AAC13595.1| similar to Vigna radiata
  misc_feature (1)..(144): Homolog of NCBI NO: 6714404 NR Description: putative pectinacetylesterase [Arabidopsis
  misc_feature (179)..(298): Homolog of NCBI NO: 6714404 NR Description: putative pectinacetylesterase [Arabidopsis
MERQLQFTGILSNKPEENPDFYNWNRVKVRYCDGGSFTGDGSDAAAGLYFRGQRIWQAAMDDLMAQGMRYANQALLSGCSAGGVSTILHCDEFRGLFPSNTRVKCLADAGMFLDTVDVSGRREMRSFFNGIVRLQGSGRSLPRSCTSHMDKTSCFFPQNVLPTIRTPTFVLNTAYDVWQLQQSVAPRTADPQGLWSKCRTNHAFCNSNQLQFLQGFRNQMLDAVRGFSASRQNGLFINSCFAHCQSERQDTWYANNSPRLGNKKIADAVGDWFFERGNAKYTDCPYPCDGTCHHLVFRGDH

SEQ ID NO: 5425 - protein, 242 aa, Zea mays subsp. mays
  peptide (1)..(242): Ceres Seq. ID no. 12405104
  misc_feature (1)..(221): Pfam Name: Pectinacetylesterase Pfam Description: Pectinacetylesterase
  misc_feature (1)..(242): Homolog of NCBI NO: 34913332 NR Description: putative pectin acetylesterase precursor [Oryza
  misc_feature (1)..(239): Homolog of NCBI NO: 18397406 NR Description: pectinacetylesterase, putative; protein id: supported by cDNA: gi_15292826, supported by cDNA: gi_16226324, by cDNA: gi_20465792 [Arabidopsis thaliana]
  misc_feature (1)..(239): Homolog of NCBI NO: 25347293 NR Description: probable pectinacetylesterase precursor T8L23.6 - Arabidopsis thaliana >gi|12321351|gb|AAG50747.1|AC079733_15
  misc_feature (1)..(239): Homolog of NCBI NO: 30696158 NR Description: pectinacetylesterase, putative [Arabidopsis
  misc_feature (1)..(239): Homolog of NCBI NO: 21703105 NR Description: At1g57590/T8L23_6 [Arabidopsis thaliana]
  misc_feature (1)..(238): Homolog of NCBI NO: 28392968 NR Description: putative pectinacetylesterase [Arabidopsis >gi|28827554|gb|AAO50621.1| putative pectinacetylesterase
  misc_feature (1)..(239): Homolog of NCBI NO: 15226462 NR Description: pectinacetylesterase, putative; protein id: supported by cDNA: gi_15450606 [Arabidopsis thaliana]
  misc_feature (1)..(239): Homolog of NCBI NO: 7487997 NR Description: pectin acetylesterase homolog F21E10.11 - thaliana >gi|3047082|gb|AAC13595.1| similar to Vigna radiata
  misc_feature (1)..(85): Homolog of NCBI NO: 6714404 NR Description: putative pectinacetylesterase [Arabidopsis
  misc_feature (120)..(239): Homolog of NCBI NO: 6714404 NR Description: putative pectinacetylesterase [Arabidopsis
MDDLMAQGMRYANQALLSGCSAGGVSTILHCDEFRGLFPSNTRVKCLADAGMFLDTVDVSGRREMRSFFNGIVRLQGSGRSLPRSCTSHMDKTSCFFPQNVLPTIRTPTFVLNTAYDVWQLQQSVAPRTADPQGLWSKCRTNHAFCNSNQLQFLQGFRNQMLDAVRGFSASRQNGLFINSCFAHCQSERQDTWYANNSPRLGNKKIADAVGDWFFERGNAKYTDCPYPCDGTCHHLVFRGDH

SEQ ID NO: 5426 - DNA, 1487 bp, Zea mays subsp. mays
  misc_feature (1)..(1487): Ceres Seq. ID no. 12358823
  misc_feature: MA Experiment ID: 108535 Result: Up-regulated in Transcription
  misc_feature: MA Experiment 108535 PARAMETER Experiment Name: Zm_Meristem_P Parameter: Age (day) Value: 8
  misc_feature: MA Experiment 108535 PARAMETER Experiment Name: Zm_Meristem_P Parameter: Organism Value: Zea mays
  misc_feature: MA Experiment 108535 PARAMETER Experiment Name: Zm_Meristem_P Parameter: Plant Line Value: 35A19
  misc_feature: MA Experiment 108535 PARAMETER Experiment Name: Zm_Meristem_P Parameter: Tissue Value: Root Meristem vs. Above Root Meristem
  misc_feature: MA Experiment ID: 108544 Result: Down-regulated in Transcription
  misc_feature: MA Experiment ID: 108559 Result: Up-regulated in Transcription
  misc_feature: MA Experiment 108559 PARAMETER Experiment Name: Zm_5mM_NO_P Parameter: Age (day) Value: 8
  misc_feature: MA Experiment 108559 PARAMETER Experiment Name: Zm_5mM_NO_P Parameter: Organism Value: Zea mays
  misc_feature: MA Experiment 108559 PARAMETER Experiment Name: Zm_5mM_NO_P Parameter: Plant Line Value: 35A19
  misc_feature: MA Experiment 108559 PARAMETER Experiment Name: Zm_5mM_NO_P Parameter: Timepoint (hr) Value: 12
  misc_feature: MA Experiment 108559 PARAMETER Experiment Name: Zm_5mM_NO_P Parameter: Tissue Value: Aerial
  misc_feature: MA Experiment 108559 PARAMETER Experiment Name: Zm_5mM_NO_P Parameter: Treatment Value: 5mM NO vs. No Treatment
  misc_feature: MA Experiment ID: 20000488 Result: Up-regulated in Transcription
  misc_feature: MA Experiment 20000488 PARAMETER Experiment Name: Zm_50mM_NH4NO3_L_to_H_P Parameter: Organism Value: Zea mays
  misc_feature: MA Experiment 20000488 PARAMETER Experiment Name: Zm_50mM_NH4NO3_L_to_H_P Parameter: Timepoint (hr) Value: 8
  misc_feature: MA Experiment 20000488 PARAMETER Experiment Name: Zm_50mM_NH4NO3_L_to_H_P Parameter: Tissue Value: Leaves
  misc_feature: MA Experiment 20000488 PARAMETER Experiment Name: Zm_50mM_NH4NO3_L_to_H_P Parameter: Treatment Value: 50mM NH4NO3 vs. 100mM Mannitol
  misc_feature: MA Experiment ID: 20000535 Result: Up-regulated in Transcription
  misc_feature: MA Experiment 20000535 PARAMETER Experiment Name: Zm_Hybrid_Seed_Dev_P Parameter: DAP Value: 30 vs. 12
  misc_feature: MA Experiment 20000535 PARAMETER Experiment Name: Zm_Hybrid_Seed_Dev_P Parameter: Organism Value: Zea mays
  misc_feature: MA Experiment 20000535 PARAMETER Experiment Name: Zm_Hybrid_Seed_Dev_P Parameter: Plant Line Value: 35A19
  misc_feature: MA Experiment 20000535 PARAMETER Experiment Name: Zm_Hybrid_Seed_Dev_P Parameter: Tissue Value: Embryo vs. Unfert Floret
aagaaccctaggaaataacaggagaggggacgcgcgctcactagcaaaatgcaggcctcttccctccggcgagccctccttctgcggggaccgcgaggcgcccagctcttccccattcccgtaggcaacaagccccgtgccttctcctccgcgtcccccgcggcagcgcgctctcccaaagacgctcataatgcgccgccgccgattatgccgacgctgccgtggggtgatgcgctcgcagccacgcagcgcaccttctgcctgccgctcgctgggcgcgtcctcgccgcctcggcgaccgagaacgcggccgtggcccccgtcgcagtctacgcctcgctggccctggccgccgccggcgcgcgcggcgacacgcggcggcaggtcctccaggcgctgggcggcggcggcgggggcaggggcgccgcggttcaagcggccaacttggcgtcgcgcgtggtcaagcgggtgttcaaggaccggtccacgtccggcggcccgcggctggccttcgcaggaggaatatgggccgacacctcaacgagcctatcgcccggggttcgtggaggccgcccgtagtgtctacagctgcacggcgcggacggctgacttcattaacaagcctgaagatgccgccaagctaattaacatgtgggtcaaacaatccacaaaagatactgttacctcgctccttccggatggactaattgacaagaatacaggacttgttattggcagcgcactgtattttaggggaagatggcttgacaggactgatacgaggagtgacgcggtacaaaaattctgctgtctggatcgaacttgtgttgacgttccttttgtggaatatgatagaactcgacctttcgcagtccacgatggatttaaagtgattaagcttccttaccagcaaggaaataatgaacggaagttctccatgtacatcttcctgcctgatgctcatgatggcttgtttgaattagctaagaaagttttcgcggaaccatcattcttagaacaacacttgccaactgagaagcggcacgtggatatcaagattcccaagttcacagtgtcattccaggtcaatatgaagcagtttctgaaagaaatgggcctcgaattacccttcctccgtgatgcagatttcactgatatggtcaaggaagatggatccagaaatccgttgtatctatccgacatacttcataaagcagttttggaggttaatgatgaaggcgttgaagaaacttctgtgagaattggcatagggaagccctcaccaggagagcactttgttgccgaccatcctttcttctttgtcattagggaggaggtgtctggctcagtaatgttcatggggcacatactggacccatcatcacaatcttaatttcgggctctgcacttttgtcacctatatattacacatatatcttgtatgatctgactttgtcagtctggttcaatgagatttttagtacttg

SEQ ID NO: 5427 - protein, 400 aa, Zea mays subsp. mays
  peptide (1)..(400): Ceres Seq. ID no. 12358824
  misc_feature (121)..(396): Pfam Name: Serpin (serine protease inhibitor) Pfam Description: Serpin (serine protease inhibitor)
  misc_feature (121)..(400): Homolog of NCBI NO: 7438218 NR Description: serpin - barley >gi|1197577|emb|CAA64599.1|
  misc_feature (124)..(396): Homolog of NCBI NO: 40539102 NR Description: putative serine protease inhibitor [Oryza sativa
  misc_feature (121)..(396): Homolog of NCBI NO: 7438222 NR Description: serpin homolog WZS3 - wheat
  misc_feature (121)..(396): Homolog of NCBI NO: 7438221 NR Description: serpin WZS2 - wheat >gi|1885350|emb|CAA72273.1|
  misc_feature (121)..(396): Homolog of NCBI NO: 1310677 NR Description: protein z-type serpin [Hordeum vulgare subsp.
  misc_feature (121)..(396): Homolog of NCBI NO: 5734504 NR Description: serpin [Triticum aestivum]
  misc_feature (121)..(396): Homolog of NCBI NO: 131091 NR Description: Protein Z (Z4) (Major endosperm albumin)
  misc_feature (121)..(396): Homolog of NCBI NO: 2130110 NR Description: serpin - wheat >gi|871551|emb|CAA90071.1| serpin
  misc_feature (121)..(396): Homolog of NCBI NO: 5734506 NR Description: serpin [Triticum aestivum]
  misc_feature (152)..(396): Homolog of NCBI NO: 40539102 NR Description: putative serine protease inhibitor [Oryza sativa
MRRRRLCRRCRGVMRSQPRSAPSACRSLGASSPPRRPRTRPWPPSQSTPRWPWPPPARAATRGGRSSRRWAAAAGAGAPRFKRPTWRRAWSSGCSRTGPRPAARGWPSQEEYGPTPQRAYRPGFVEAARSVYSCTARTADFINKPEDAAKLINMWVKQSTKDTVTSLLPDGLIDKNTGLVIGSALYFRGRWLDRTDTRSDAVQKFCCLDRTCVDVPFVEYDRTRPFAVHDGFKVIKLPYQQGNNERKFSMYIFLPDAHDGLFELAKKVFAEPSFLEQHLPTEKRHVDIKIPKFTVSFQVNMKQFLKEMGLELPFLRDADFTDMVKEDGSRNPLYLSDILHKAVLEVNDEGVEETSVRIGIGKPSPGEHFVADHPFFFVIREEVSGSVMFMGHILDPSSQS

SEQ ID NO: 5428 - protein, 387 aa, Zea mays subsp. mays
  peptide (1)..(387): Ceres Seq. ID no. 12358825
  misc_feature (108)..(383): Pfam Name: Serpin (serine protease inhibitor) Pfam Description: Serpin (serine protease inhibitor)
  misc_feature (108)..(387): Homolog of NCBI NO: 7438218 NR Description: serpin - barley >gi|1197577|emb|CAA64599.1|
  misc_feature (111)..(383): Homolog of NCBI NO: 40539102 NR Description: putative serine protease inhibitor [Oryza sativa
  misc_feature (108)..(383): Homolog of NCBI NO: 7438222 NR Description: serpin homolog WZS3 - wheat
  misc_feature (108)..(383): Homolog of NCBI NO: 7438221 NR Description: serpin WZS2 - wheat >gi|1885350|emb|CAA72273.1|
  misc_feature (108)..(383): Homolog of NCBI NO: 1310677 NR Description: protein z-type serpin [Hordeum vulgare subsp.
  misc_feature (108)..(383): Homolog of NCBI NO: 5734504 NR Description: serpin [Triticum aestivum]
  misc_feature (108)..(383): Homolog of NCBI NO: 131091 NR Description: Protein Z (Z4) (Major endosperm albumin)
  misc_feature (108)..(383): Homolog of NCBI NO: 2130110 NR Description: serpin - wheat >gi|871551|emb|CAA90071.1| serpin
  misc_feature (108)..(383): Homolog of NCBI NO: 5734506 NR Description: serpin [Triticum aestivum]
  misc_feature (139)..(383): Homolog of NCBI NO: 40539102 NR Description: putative serine protease inhibitor [Oryza sativa
MRSQPRSAPSACRSLGASSPPRRPRTRPWPPSQSTPRWPWPPPARAATRGGRSSRRWAAAAGAGAPRFKRPTWRRAWSSGCSRTGPRPAARGWPSQEEYGPTPQRAYRPGFVEAARSVYSCTARTADFINKPEDAAKLINMWVKQSTKDTVTSLLPDGLIDKNTGLVIGSALYFRGRWLDRTDTRSDAVQKFCCLDRTCVDVPFVEYDRTRPFAVHDGFKVIKLPYQQGNNERKFSMYIFLPDAHDGLFELAKKVFAEPSFLEQHLPTEKRHVDIKIPKFTVSFQVNMKQFLKEMGLELPFLRDADFTDMVKEDGSRNPLYLSDILHKAVLEVNDEGVEETSVRIGIGKPSPGEHFVADHPFFFVIREEVSGSVMFMGHILDPSSQS

SEQ ID NO: 5429 - protein, 247 aa, Zea mays subsp. mays
  peptide (1)..(247): Ceres Seq. ID no. 12358826
  misc_feature (1)..(243): Pfam Name: Serpin (serine protease inhibitor) Pfam Description: Serpin (serine protease inhibitor)
  misc_feature (1)..(247): Homolog of NCBI NO: 7438218 NR Description: serpin - barley >gi|1197577|emb|CAA64599.1|
  misc_feature (1)..(243): Homolog of NCBI NO: 40539102 NR Description: putative serine protease inhibitor [Oryza sativa
  misc_feature (1)..(243): Homolog of NCBI NO: 7438222 NR Description: serpin homolog WZS3 - wheat
  misc_feature (1)..(243): Homolog of NCBI NO: 7438221 NR Description: serpin WZS2 - wheat >gi|1885350|emb|CAA72273.1|
  misc_feature (1)..(243): Homolog of NCBI NO: 1310677 NR Description: protein z-type serpin [Hordeum vulgare subsp.
  misc_feature (1)..(243): Homolog of NCBI NO: 5734504 NR Description: serpin [Triticum aestivum]
  misc_feature (1)..(243): Homolog of NCBI NO: 131091 NR Description: Protein Z (Z4) (Major endosperm albumin)
  misc_feature (1)..(243): Homolog of NCBI NO: 2130110 NR Description: serpin - wheat >gi|871551|emb|CAA90071.1| serpin
  misc_feature (1)..(243): Homolog of NCBI NO: 5734506 NR Description: serpin [Triticum aestivum]
  misc_feature (1)..(243): Homolog of NCBI NO: 40539102 NR Description: putative serine protease inhibitor [Oryza sativa
MWVKQSTKDTVTSLLPDGLIDKNTGLVIGSALYFRGRWLDRTDTRSDAVQKFCCLDRTCVDVPFVEYDRTRPFAVHDGFKVIKLPYQQGNNERKFSMYIFLPDAHDGLFELAKKVFAEPSFLEQHLPTEKRHVDIKIPKFTVSFQVNMKQFLKEMGLELPFLRDADFTDMVKEDGSRNPLYLSDILHKAVLEVNDEGVEETSVRIGIGKPSPGEHFVADHPFFFVIREEVSGSVMFMGHILDPSSQS

SEQ ID NO: 5430 - DNA, 1037 bp, Zea mays subsp. mays
  misc_feature (1)..(1037): Ceres Seq. ID no. 12349085
  misc_feature: MA Experiment ID: 20000492 Result: Up-regulated in Transcription
  misc_feature: MA Experiment 20000492 PARAMETER Experiment Name: Zm_Hybrid_Seed_Dev_P Parameter: DAP Value: 12
  misc_feature: MA Experiment 20000492 PARAMETER Experiment Name: Zm_Hybrid_Seed_Dev_P Parameter: Organism Value: Zea mays
  misc_feature: MA Experiment 20000492 PARAMETER Experiment Name: Zm_Hybrid_Seed_Dev_P Parameter: Plant Line Value: 35A19
  misc_feature: MA Experiment 20000492 PARAMETER Experiment Name: Zm_Hybrid_Seed_Dev_P Parameter: Tissue Value: Fert Kernel vs. Unfert Floret
aacccaagagcgaaaatggatccgcaccagttcgccccctcccagcagtcggcgctgaccatggaatcggcggagatcacggccgccgccgccgccgcgcgcgcacccaacggcgctgcccgggctatcgtcgaggacgacgacgaggacgacgacgtccccgaggtggccgcctgcatatcgacgatgctcgaccgcgggggtagcgtggagagccaccgcctcttcctggcgcgccgcaccgcgctggagatgctccgcgaccgcgggtacgccgttccggaggaagagctcgcccggaccctcccggagttccgcgcctggtgggaatacaggccagagctcgaacgcctcgccttctccactaccctcgcctccgacccgtccagcaaggtgaaagttgtgttctgtccacctggacctgtcaaaatcgcagctatccggctgatatataccgaagtcaaagatgagaacttgtccagactgattctgatactgcagggcaaaataatgtctacaaccagagaatccatcaaggagatctttcgatttaaagttgacacattccagatcacggaattactggtgaacatcactaagcatgtcctcaagcccaagcatgaagtgttgactgcagaggggaaagctaagctcctgaaggagtacaatgtggtggattcacagttgcctcgcatgctggagaatgatgctgttgctcgctattacgggctaggcaagggaactgttgttaaggttatatacgacagcgagcttaccgggaaccatgtgacgtaccgatgcattacctgaggggcccatgtgtttcggtggatgaagtgtcgtaagcagtctgtaaaaaattacctctaagaggggcaggtgacactgttctgctaggcctttgtaagcacccaattatgcaggatgaagctcgctgtaagctattggtaaaatcatcttgcgccattgccgtaccttaagtgcttggtgttaatcttggaaacagtgagacaactaatcctgtagtgagttatctc

SEQ ID NO: 5431 - protein, 269 aa, Zea mays subsp. mays
  peptide (1)..(269): Ceres Seq. ID no. 12349086
  misc_feature (196)..(268): Pfam Name: RNA polymerase Rpb5, C-terminal domain Pfam Description: RNA polymerase Rpb5, C-terminal domain
  misc_feature (56)..(267): Homolog of NCBI NO: 8896071 NR Description: RPB5d [Brassica napus]
  misc_feature (59)..(268): Homolog of NCBI NO: 15230206 NR Description: putative protein; protein id: At3g57080.1, by cDNA: 8751. [Arabidopsis thaliana] >gi|11261045|pir||T47768
  misc_feature (59)..(268): Homolog of NCBI NO: 21617912 NR Description: putative DNA-directed RNA polymerase 23kD subunit
  misc_feature (69)..(269): Homolog of NCBI NO: 15227327 NR Description: putative DNA-directed RNA polymerase 23kD protein id: At2g41340.1, supported by cDNA: gi_19310384 thaliana] >gi|25288347|pir||E84840 hypothetical protein At2g41340
  misc_feature (59)..(268): Homolog of NCBI NO: 15232524 NR Description: RNA polymerase 24kDa subunit -like protein; id: At3g54490.1 [Arabidopsis thaliana] >gi|11261042|pir||T47608
  misc_feature (70)..(268): Homolog of NCBI NO: 17507947 NR Description: RNA polymerase Rpb5, N-terminal domain and RNA
  misc_feature (70)..(268): Homolog of NCBI NO: 39595790 NR Description: Hypothetical protein CBG12745 [Caenorhabditis
  misc_feature (71)..(268): Homolog of NCBI NO: 15228724 NR Description: RNA polymerase I, II and III 24.3 kDa subunit; id: At3g22320.1, supported by cDNA: 21828., supported by cDNA: supported by cDNA: gi_15724321, supported by cDNA: gi_3372232
  misc_feature (71)..(268): Homolog of NCBI NO: 38344231 NR Description: OJ991113_30.8 [Oryza sativa (japonica
  misc_feature (71)..(268): Homolog of NCBI NO: 28497750 NR Description: polymerase (RNA) II (DNA directed) polypeptide E musculus] >gi|28374319|gb|AAH45521.1| similar to DNA directed RNA
NPRAKMDPHQFAPSQQSALTMESAEITAAAAAARAPNGAARAIVEDDDEDDDVPEVAACISTMLDRGGSVESHRLFLARRTALEMLRDRGYAVPEEELARTLPEFRAWWEYRPELERLAFSTTLASDPSSKVKVVFCPPGPVKIAAIRLIYTEVKDENLSRLILILQGKIMSTTRESIKEIFRFKVDTFQITELLVNITKHVLKPKHEVLTAEGKAKLLKEYNVVDSQLPRMLENDAVARYYGLGKGTVVKVIYDSELTGNHVTYRCIT

SEQ ID NO: 5432 - protein, 264 aa, Zea mays subsp. mays
  peptide (1)..(264): Ceres Seq. ID no. 12349087
  misc_feature (191)..(263): Pfam Name: RNA polymerase Rpb5, C-terminal domain Pfam Description: RNA polymerase Rpb5, C-terminal domain
  misc_feature (51)..(262): Homolog of NCBI NO: 8896071 NR Description: RPB5d [Brassica napus]
  misc_feature (54)..(263): Homolog of NCBI NO: 15230206 NR Description: putative protein; protein id: At3g57080.1, by cDNA: 8751. [Arabidopsis thaliana] >gi|11261045|pir||T47768
  misc_feature (54)..(263): Homolog of NCBI NO: 21617912 NR Description: putative DNA-directed RNA polymerase 23kD subunit
  misc_feature (64)..(264): Homolog of NCBI NO: 15227327 NR Description: putative DNA-directed RNA polymerase 23kD protein id: At2g41340.1, supported by cDNA: gi_19310384 thaliana] >gi|25288347|pir||E84840 hypothetical protein At2g41340
  misc_feature (54)..(263): Homolog of NCBI NO: 15232524 NR Description: RNA polymerase 24kDa subunit -like protein; id: At3g54490.1 [Arabidopsis thaliana] >gi|11261042|pir||T47608
  misc_feature (65)..(263): Homolog of NCBI NO: 17507947 NR Description: RNA polymerase Rpb5, N-terminal domain and RNA
  misc_feature (65)..(263): Homolog of NCBI NO: 39595790 NR Description: Hypothetical protein CBG12745 [Caenorhabditis
  misc_feature (66)..(263): Homolog of NCBI NO: 15228724 NR Description: RNA polymerase I, II and III 24.3 kDa subunit; id: At3g22320.1, supported by cDNA: 21828., supported by cDNA: supported by cDNA: gi_15724321, supported by cDNA: gi_3372232
  misc_feature (66)..(263): Homolog of NCBI NO: 38344231 NR Description: OJ991113_30.8 [Oryza sativa (japonica
  misc_feature (66)..(263): Homolog of NCBI NO: 28497750 NR Description: polymerase (RNA) II (DNA directed) polypeptide E musculus] >gi|28374319|gb|AAH45521.1| similar to DNA directed RNA
MDPHQFAPSQQSALTMESAEITAAAAAARAPNGAARAIVEDDDEDDDVPEVAACISTMLDRGGSVESHRLFLARRTALEMLRDRGYAVPEEELARTLPEFRAWWEYRPELERLAFSTTLASDPSSKVKVVFCPPGPVKIAAIRLIYTEVKDENLSRLILILQGKIMSTTRESIKEIFRFKVDTFQITELLVNITKHVLKPKHEVLTAEGKAKLLKEYNVVDSQLPRMLENDAVARYYGLGKGTVVKVIYDSELTGNHVTYRCIT

SEQ ID NO: 5433 - protein, 249 aa, Zea mays subsp. mays
  peptide (1)..(249): Ceres Seq. ID no. 12349088
  misc_feature (176)..(248): Pfam Name: RNA polymerase Rpb5, C-terminal domain Pfam Description: RNA polymerase Rpb5, C-terminal domain
  misc_feature (51)..(248): Homolog of NCBI NO: 15228724 NR Description: RNA polymerase I, II and III 24.3 kDa subunit; id: At3g22320.1, supported by cDNA: 21828., supported by cDNA: supported by cDNA: gi_15724321, supported by cDNA: gi_3372232
  misc_feature (51)..(248): Homolog of NCBI NO: 38344231 NR Description: OJ991113_30.8 [Oryza sativa (japonica
  misc_feature (39)..(248): Homolog of NCBI NO: 15230206 NR Description: putative protein; protein id: At3g57080.1, by cDNA: 8751. [Arabidopsis thaliana] >gi|11261045|pir||T47768
  misc_feature (49)..(249): Homolog of NCBI NO: 15227327 NR Description: putative DNA-directed RNA polymerase 23kD protein id: At2g41340.1, supported by cDNA: gi_19310384 thaliana] >gi|25288347|pir||E84840 hypothetical protein At2g41340
  misc_feature (50)..(248): Homolog of NCBI NO: 17507947 NR Description: RNA polymerase Rpb5, N-terminal domain and RNA
  misc_feature (50)..(248): Homolog of NCBI NO: 39595790 NR Description: Hypothetical protein CBG12745 [Caenorhabditis
  misc_feature (39)..(248): Homolog of NCBI NO: 15232524 NR Description: RNA polymerase 24kDa subunit -like protein; id: At3g54490.1 [Arabidopsis thaliana] >gi|11261042|pir||T47608
  misc_feature (39)..(248): Homolog of NCBI NO: 21617912 NR Description: putative DNA-directed RNA polymerase 23kD subunit
  misc_feature (36)..(247): Homolog of NCBI NO: 8896071 NR Description: RPB5d [Brassica napus]
  misc_feature (51)..(248): Homolog of NCBI NO: 28497750 NR Description: polymerase (RNA) II (DNA directed) polypeptide E musculus] >gi|28374319|gb|AAH45521.1| similar to DNA directed RNA
MESAEITAAAAAARAPNGAARAIVEDDDEDDDVPEVAACISTMLDRGGSVESHRLFLARRTALEMLRDRGYAVPEEELARTLPEFRAWWEYRPELERLAFSTTLASDPSSKVKVVFCPPGPVKIAAIRLIYTEVKDENLSRLILILQGKIMSTTRESIKEIFRFKVDTFQITELLVNITKHVLKPKHEVLTAEGKAKLLKEYNVVDSQLPRMLENDAVARYYGLGKGTVVKVIYDSELTGNHVTYRCIT

SEQ ID NO: 5434 - DNA, 1602 bp, Zea mays subsp. mays
  misc_feature (1)..(1602): Ceres Seq. ID no. 12407263
  misc_feature: MA Experiment ID: 108522 Result: Down-regulated in Transcription
  misc_feature: MA Experiment 108522 PARAMETER Experiment Name: Zm_42deg_Heat_P Parameter: Age (day) Value: 8
  misc_feature: MA Experiment 108522 PARAMETER Experiment Name: Zm_42deg_Heat_P Parameter: Organism Value: Zea mays
  misc_feature: MA Experiment 108522 PARAMETER Experiment Name: Zm_42deg_Heat_P Parameter: Plant Line Value: 35A19
  misc_feature: MA Experiment 108522 PARAMETER Experiment Name: Zm_42deg_Heat_P Parameter: Temperature (deg C) Value: 42 vs. 22
  misc_feature: MA Experiment 108522 PARAMETER Experiment Name: Zm_42deg_Heat_P Parameter: Timepoint (hr) Value: 1
  misc_feature: MA Experiment 108522 PARAMETER Experiment Name: Zm_42deg_Heat_P Parameter: Tissue Value: Aerial
  misc_feature: MA Experiment ID: 108547 Result: Up-regulated in Transcription
  misc_feature: MA Experiment 108547 PARAMETER Experiment Name: Zm_Imbibed_Seeds_P Parameter: Age (day) Value: 4 vs. 2
  misc_feature: MA Experiment 108547 PARAMETER Experiment Name: Zm_Imbibed_Seeds_P Parameter: Organism Value: Zea mays
  misc_feature: MA Experiment 108547 PARAMETER Experiment Name: Zm_Imbibed_Seeds_P Parameter: Plant Line Value: 35A19
  misc_feature: MA Experiment 108547 PARAMETER Experiment Name: Zm_Imbibed_Seeds_P Parameter: Tissue Value: Aerial vs. Embryo
tatgtttatacgttagcaaaccaattcccatcccattactccaactccggcggcggccgcaccaccgccaaaaaccaatgcagatgacggcggatcaggaatcggcgggccaaggcgacggaggacgacacgatgagcggccggcggcgggtggacgacgacgacgaccacgacgtcgtcttcgacgccgggaagccgccgccgttccgcatcggcgacgtgcgggcggcggtgccggagcactgctggcgcaagagcccctggcggtcgctgtggtacgtggcgcgggacgtggcggtggtggcggcgctgggcgcggcggcggcgggcatggacagttgggcggtgtggccgctgtactgggcggcgcaggggaccatgttctgggcgctcttcgtgctgggacacgactgtggccatggcagcttctcggacagcgcgacgctcaacagcgtcgtgggccatctccttcactccttcatcctcgtcccttaccatggatggaggatcagccacagaacacaccatcagaaccacggccacatccacagggacgagtcatggcacccgatcacggagaagctgtaccggcaactagagccacgcaccaagaagctgagattcacggtgcccttcccgctgctcgcattccccgtctacctcttgtacaggagccccggcaagtcgggctcccacttccttcccagcagcgacctgttcagccccaaggagaagagcgacgtcatggtgtcaaccacctgctggtgcatcatgctcgcctccctcctcgccatggcgtgcgcgttcggcccactccaggtgctcaagatgtacggcatcccatacctggtgttcgtgatgtggcttgacctggtgacgtacctgcaccaccatgggcaccatcagcttcctctcccctggtaccgcggccaggagtggagctacctgcgcggcggcctcaccacggtggacagggactacggctggatcaacaacgtccaccacgacatcggcacccacgtcattcatcacctcttcccgcagatcccgcactaccatctcgtcgaagctaccaaggcagccaagccggtgctggggcgatactaccgggagccgcacaagtcaggcccgctgccacttcacctcctcgtcgtgctcctcaggagcctcagagtcgaccacttcgtcagcgaccacggggatgtcgtctactaccaaaccgaccatgacttgaacactagcagtgctcatggctgggccaaccaaaaccaccataagcaaaaataatggtttctcaaacacagagacgggctgatggttgctgttgttgttgctccaaggactcacacagtacaagaacttaaatatatatgatggtaagtagcatcatatataggcatgcgtatgacaaagccaaataattaaagagaagggagggatcctctagctgaagcaattaattaattacagtatcccactagatcgagtttgctaagcattactcctactatatacaatatgtactgttgcttgtattaattagctagatgttgtgttggagccttggatgatgaaactaaaggatgagccactaaaatttgt

SEQ ID NO: 5435 - protein, 384 aa, Zea mays subsp. mays
  peptide (1)..(384): Ceres Seq. ID no. 12407264
  misc_feature (76)..(321): Pfam Name: Fatty acid desaturase Pfam Description: Fatty acid desaturase
  misc_feature (11)..(382): Homolog of NCBI NO: 7433280 NR Description: probable omega-3 fatty acid desaturase (EC
  misc_feature (11)..(382): Homolog of NCBI NO: 7433275 NR Description: omega-3 fatty acid desaturase (EC 1.14.99.-) FAD3
  misc_feature (1)..(373): Homolog of NCBI NO: 21668465 NR Description: plastid omega-3 fatty acid desaturase [Triticum
  misc_feature (17)..(371): Homolog of NCBI NO: 1345971 NR Description: Omega-3 fatty acid desaturase, chloroplast
  misc_feature (1)..(367): Homolog of NCBI NO: 1345970 NR Description: Omega-3 fatty acid desaturase, chloroplast
  misc_feature (1)..(371): Homolog of NCBI NO: 7433278 NR Description: omega-3 fatty acid desaturase (EC 1.14.99.-) FAD8 maize (fragment) >gi|2446996|dbj|BAA22440.1| fatty acid [Zea mays] >gi|2447000|dbj|BAA22442.1| fatty acid desaturase [Zea
  misc_feature (17)..(368): Homolog of NCBI NO: 7433276 NR Description: omega-3 fatty acid desaturase (EC 1.14.99.-) FAD7
  misc_feature (17)..(368): Homolog of NCBI NO: 1754795 NR Description: omega-3 fatty acid desaturase
  misc_feature (2)..(371): Homolog of NCBI NO: 23345025 NR Description: microsomal omega-3 fatty acid desaturase [Betula
  misc_feature (1)..(371): Homolog of NCBI NO: 7433277 NR Description: omega-3 fatty acid desaturase (EC 1.14.99.-) FAD7 maize >gi|2446998|dbj|BAA22441.1| fatty acid desaturase [Zea
MSGRRRVDDDDDHDVVFDAGKPPPFRIGDVRAAVPEHCWRKSPWRSLWYVARDVAVVAALGAAAAGMDSWAVWPLYWAAQGTMFWALFVLGHDCGHGSFSDSATLNSVVGHLLHSFILVPYHGWRISHRTHHQNHGHIHRDESWHPITEKLYRQLEPRTKKLRFTVPFPLLAFPVYLLYRSPGKSGSHFLPSSDLFSPKEKSDVMVSTTCWCIMLASLLAMACAFGPLQVLKMYGIPYLVFVMWLDLVTYLHHHGHHQLPLPWYRGQEWSYLRGGLTTVDRDYGWINNVHHDIGTHVIHHLFPQIPHYHLVEATKAAKPVLGRYYREPHKSGPLPLHLLVVLLRSLRVDHFVSDHGDVVYYQTDHDLNTSSAHGWANQNHHKQK

SEQ ID NO: 5436 - protein, 318 aa, Zea mays subsp. mays
  peptide (1)..(318): Ceres Seq. ID no. 12407265
  misc_feature (10)..(255): Pfam Name: Fatty acid desaturase Pfam Description: Fatty acid desaturase
  misc_feature (1)..(316): Homolog of NCBI NO: 7433280 NR Description: probable omega-3 fatty acid desaturase (EC
  misc_feature (1)..(316): Homolog of NCBI NO: 7433275 NR Description: omega-3 fatty acid desaturase (EC 1.14.99.-) FAD3
  misc_feature (1)..(307): Homolog of NCBI NO: 21668465 NR Description: plastid omega-3 fatty acid desaturase [Triticum
  misc_feature (1)..(305): Homolog of NCBI NO: 1345971 NR Description: Omega-3 fatty acid desaturase, chloroplast
  misc_feature (1)..(301): Homolog of NCBI NO: 1345970 NR Description: Omega-3 fatty acid desaturase, chloroplast
  misc_feature (1)..(305): Homolog of NCBI NO: 7433278 NR Description: omega-3 fatty acid desaturase (EC 1.14.99.-) FAD8 maize (fragment) >gi|2446996|dbj|BAA22440.1| fatty acid [Zea mays] >gi|2447000|dbj|BAA22442.1| fatty acid desaturase [Zea
  misc_feature (1)..(302): Homolog of NCBI NO: 7433276 NR Description: omega-3 fatty acid desaturase (EC 1.14.99.-) FAD7
  misc_feature (1)..(302): Homolog of NCBI NO: 1754795 NR Description: omega-3 fatty acid desaturase
  misc_feature (1)..(305): Homolog of NCBI NO: 23345025 NR Description: microsomal omega-3 fatty acid desaturase [Betula
  misc_feature (1)..(305): Homolog of NCBI NO: 7433277 NR Description: omega-3 fatty acid desaturase (EC 1.14.99.-) FAD7 maize >gi|2446998|dbj|BAA22441.1| fatty acid desaturase [Zea
MDSWAVWPLYWAAQGTMFWALFVLGHDCGHGSFSDSATLNSVVGHLLHSFILVPYHGWRISHRTHHQNHGHIHRDESWHPITEKLYRQLEPRTKKLRFTVPFPLLAFPVYLLYRSPGKSGSHFLPSSDLFSPKEKSDVMVSTTCWCIMLASLLAMACAFGPLQVLKMYGIPYLVFVMWLDLVTYLHHHGHHQLPLPWYRGQEWSYLRGGLTTVDRDYGWINNVHHDIGTHVIHHLFPQIPHYHLVEATKAAKPVLGRYYREPHKSGPLPLHLLVVLLRSLRVDHFVSDHGDVVYYQTDHDLNTSSAHGWANQNHHKQK

SEQ ID NO: 5437 - protein, 302 aa, Zea mays subsp. mays
  peptide (1)..(302): Ceres Seq. ID no. 12407266
  misc_feature (1)..(239): Pfam Name: Fatty acid desaturase Pfam Description: Fatty acid desaturase
  misc_feature (1)..(300): Homolog of NCBI NO: 7433280 NR Description: probable omega-3 fatty acid desaturase (EC
  misc_feature (1)..(300): Homolog of NCBI NO: 7433275 NR Description: omega-3 fatty acid desaturase (EC 1.14.99.-) FAD3
  misc_feature (1)..(291): Homolog of NCBI NO: 21668465 NR Description: plastid omega-3 fatty acid desaturase [Triticum
  misc_feature (1)..(289): Homolog of NCBI NO: 1345971 NR Description: Omega-3 fatty acid desaturase, chloroplast
  misc_feature (1)..(285): Homolog of NCBI NO: 1345970 NR Description: Omega-3 fatty acid desaturase, chloroplast
  misc_feature (1)..(289): Homolog of NCBI NO: 7433278 NR Description: omega-3 fatty acid desaturase (EC 1.14.99.-) FAD8 maize (fragment) >gi|2446996|dbj|BAA22440.1| fatty acid [Zea mays] >gi|2447000|dbj|BAA22442.1| fatty acid desaturase [Zea
  misc_feature (1)..(286): Homolog of NCBI NO: 7433276 NR Description: omega-3 fatty acid desaturase (EC 1.14.99.-) FAD7
  misc_feature (1)..(286): Homolog of NCBI NO: 1754795 NR Description: omega-3 fatty acid desaturase
  misc_feature (1)..(289): Homolog of NCBI NO: 23345025 NR Description: microsomal omega-3 fatty acid desaturase [Betula
  misc_feature (1)..(289): Homolog of NCBI NO: 7433277 NR Description: omega-3 fatty acid desaturase (EC 1.14.99.-) FAD7 maize >gi|2446998|dbj|BAA22441.1| fatty acid desaturase [Zea
MFWALFVLGHDCGHGSFSDSATLNSVVGHLLHSFILVPYHGWRISHRTHHQNHGHIHRDESWHPITEKLYRQLEPRTKKLRFTVPFPLLAFPVYLLYRSPGKSGSHFLPSSDLFSPKEKSDVMVSTTCWCIMLASLLAMACAFGPLQVLKMYGIPYLVFVMWLDLVTYLHHHGHHQLPLPWYRGQEWSYLRGGLTTVDRDYGWINNVHHDIGTHVIHHLFPQIPHYHLVEATKAAKPVLGRYYREPHKSGPLPLHLLVVLLRSLRVDHFVSDHGDVVYYQTDHDLNTSSAHGWANQNHHKQK

SEQ ID NO: 5438 - DNA, 1907 bp, Zea mays subsp. mays
  misc_feature (1)..(1907): Ceres Seq. ID no. 13494394
  misc_feature: MA Experiment ID: 108535 Result: Down-regulated in Transcription
  misc_feature: MA Experiment 108535 PARAMETER Experiment Name: Zm_Meristem_P Parameter: Age (day) Value: 8
  misc_feature: MA Experiment 108535 PARAMETER Experiment Name: Zm_Meristem_P Parameter: Organism Value: Zea mays
  misc_feature: MA Experiment 108535 PARAMETER Experiment Name: Zm_Meristem_P Parameter: Plant Line Value: 35A19
  misc_feature: MA Experiment 108535 PARAMETER Experiment Name: Zm_Meristem_P Parameter: Tissue Value: Root Meristem vs. Above Root Meristem
ctaatcgacaaatggtcggtcgcaccgaacagcacgaccagaccagttgcccggctcaccaaatccaggcgtggccgtgcgaccatccctcccctcatggcgtcatcggcggcgcgatccctcgcgctcgtcgcgtctgcctcggcatcgctcggcgtcgggcagcggtcgtgggctcgcttggctgtctcttcctcttcggctgggtcggccctccccaagctccgcgggctccgctcgttcgccgcctccgcagggggcgccgtgatggggaagccaagccccggggtcgttgacgccgacgccgggatggacgccgtccagcggcggctcatgtttgaggacgagtgcattttagtggatgaacaagacaatgtcatcggccacgagtccaagtataactgccatctcatggagaagatagaagctggaaatgccctgcacagagctttcagtgttttccttttcaactccaaatatgagttgctactgcagcaaaggtctgcaacaaaagtgacatttccacttgtctggacaaacacctgctgtagccatcctctctaccgcgagtcagagttgattgaggaaaattgtgcaggggtgagaaatgcagcccagcgcaaactatttgatgagctgggaatagtggctgacgaattacctgtcgaccagttcattccgcttgggaggatgctttacaaggctccttcagatggaaaatggggcgaacacgagttggattacctcttgttcatggttcgtgacgtgaagctcgacccgaatcctgaagaggtggccgatgtcaagtacatgaaccggcatcagctgaaggagctgctcaggaaagccgatgccggggaagatggcgttaagctctccccttggttcaggctggtggtggacaactttctcatgggctggtgggatcatgtcgagcaagggactctgcagggggcagcagacatgaaaaccatccataaattgtaaatcttctagatcgcttaagcacgagtcttgccctgttgaggaataagcgcttgtcctgctgtttggtgctggaggaataatcgataaaattataacagagtgatcttaattctggaacgtaactatgcaaaaaaaaaaaaaaaaaacggcacgagaagcttttttttttttttttttcttttttttttttttttttttttttttttttttttttttttagaaccgagggctttccattgataatagcagtgaaaatattacaccaaatgggctagaaactggaacacctcgaaacgaagatacagaacaaactacagtagaccggccaactagacacacaaccgaccacggccgtcacatcaaagcatcagaaggggaggtggcctagccgccgaagccgtagagcgtgcggccctggcgcttgagcgcgtagacgacatccatggcggtgacggtcttgcggcgggcgtgctcggtgtaggtgacggcgtcgcggatgacgttctcgaggaagatcttgagcacgccgcgggtctcctcgtagatgagcccagaaatgcgcttgacgccgcccctcctggccagcctacggatcgccggcttcgtgatgccctggatgttgtcgcgcagcaccttgcggtggcgcttggcgccgcccttgcccagccccttgccgcccttgccgcgccccgacatcgccgaaaccgagaggtacgcggacggaggaggagaatcgtgccgttgtgcggttgaacttggattccgttgtccgaaatttctaatccgaaagatggatttcattgtcttcttcttcttagcattatgtcactatctcacgtcgtcctgtctcaatacagtctaaggttcatgtgatgttatccccatttgtccacgcacaagtgaatgcagtcactatttcg

SEQ ID NO: 5439 - protein, 328 aa, Zea mays subsp. mays
  peptide (1)..(328): Ceres Seq. ID no. 13494395
  misc_feature (147)..(299): Pfam Name: NUDIX domain Pfam Description: NUDIX domain
  misc_feature (97)..(328): Homolog of NCBI NO: 33340598 NR Description: isopentenyl pyrophosphate isomerase [Zea mays]
  misc_feature (64)..(328): Homolog of NCBI NO: 9759126 NR Description: isopentenyl pyrophosphate:dimethyllallyl
  misc_feature (81)..(328): Homolog of NCBI NO: 6856560 NR Description: isopentenyl pyrophosphate:dimethyllallyl
  misc_feature (29)..(328): Homolog of NCBI NO: 6856550 NR Description: isopentenyl pyrophosphate:dimethyllallyl
  misc_feature (96)..(328): Homolog of NCBI NO: 13603408 NR Description: isopentenyl diphosphate isomerase 2 [Nicotiana
  misc_feature (101)..(328): Homolog of NCBI NO: 1085973 NR Description: isopentenyl-diphosphate Delta-isomerase (EC
  misc_feature (101)..(328): Homolog of NCBI NO: 6225526 NR Description: ISOPENTENYL-DIPHOSPHATE DELTA-ISOMERASE I (IPP
  misc_feature (100)..(328): Homolog of NCBI NO: 19568937 NR Description: isopentenyl pyrophosphate isomerase IDI2
  misc_feature (101)..(328): Homolog of NCBI NO: 34898490 NR Description: putative isopentenyl pyrophosphate:dimethyllallyl
  misc_feature (73)..(328): Homolog of NCBI NO: 1213442 NR Description: isopentenyl pyrophosphate isomerase [Arabidopsis
LIDKWSVAPNSTTRPVARLTKSRRGRATIPPLMASSAARSLALVASASASLGVGQRSWARLAVSSSSAGSALPKLRGLRSFAASAGGAVMGKPSPGVVDADAGMDAVQRRLMFEDECILVDEQDNVIGHESKYNCHLMEKIEAGNALHRAFSVFLFNSKYELLLQQRSATKVTFPLVWTNTCCSHPLYRESELIEENCAGVRNAAQRKLFDELGIVADELPVDQFIPLGRMLYKAPSDGKWGEHELDYLLFMVRDVKLDPNPEEVADVKYMNRHQLKELLRKADAGEDGVKLSPWFRLVVDNFLMGWWDHVEQGTLQGAADMKTIHKL

SEQ ID NO: 5440 - protein, 296 aa, Zea mays subsp. mays
  peptide (1)..(296): Ceres Seq. ID no. 13494396
  misc_feature (115)..(267): Pfam Name: NUDIX domain Pfam Description: NUDIX domain
  misc_feature (65)..(296): Homolog of NCBI NO: 33340598 NR Description: isopentenyl pyrophosphate isomerase [Zea mays]
  misc_feature (32)..(296): Homolog of NCBI NO: 9759126 NR Description: isopentenyl pyrophosphate:dimethyllallyl
  misc_feature (49)..(296): Homolog of NCBI NO: 6856560 NR Description: isopentenyl pyrophosphate:dimethyllallyl
  misc_feature (1)..(296): Homolog of NCBI NO: 6856550 NR Description: isopentenyl pyrophosphate:dimethyllallyl
  misc_feature (64)..(296): Homolog of NCBI NO: 13603408 NR Description: isopentenyl diphosphate isomerase 2 [Nicotiana
  misc_feature (69)..(296): Homolog of NCBI NO: 1085973 NR Description: isopentenyl-diphosphate Delta-isomerase (EC
  misc_feature (69)..(296): Homolog of NCBI NO: 6225526 NR Description: ISOPENTENYL-DIPHOSPHATE DELTA-ISOMERASE I (IPP
  misc_feature (68)..(296): Homolog of NCBI NO: 19568937 NR Description: isopentenyl pyrophosphate isomerase IDI2
  misc_feature (69)..(296): Homolog of NCBI NO: 34898490 NR Description: putative isopentenyl pyrophosphate:dimethyllallyl
  misc_feature (41)..(296): Homolog of NCBI NO: 1213442 NR Description: isopentenyl pyrophosphate isomerase [Arabidopsis
MASSAARSLALVASASASLGVGQRSWARLAVSSSSAGSALPKLRGLRSFAASAGGAVMGKPSPGVVDADAGMDAVQRRLMFEDECILVDEQDNVIGHESKYNCHLMEKIEAGNALHRAFSVFLFNSKYELLLQQRSATKVTFPLVWTNTCCSHPLYRESELIEENCAGVRNAAQRKLFDELGIVADELPVDQFIPLGRMLYKAPSDGKWGEHELDYLLFMVRDVKLDPNPEEVADVKYMNRHQLKELLRKADAGEDGVKLSPWFRLVVDNFLMGWWDHVEQGTLQGAADMKTIHKL

SEQ ID NO: 5441 - protein, 239 aa, Zea mays subsp. mays
  peptide (1)..(239): Ceres Seq. ID no. 13494397
  misc_feature (58)..(210): Pfam Name: NUDIX domain Pfam Description: NUDIX domain
  misc_feature (8)..(239): Homolog of NCBI NO: 33340598 NR Description: isopentenyl pyrophosphate isomerase [Zea mays]
  misc_feature (1)..(239): Homolog of NCBI NO: 9759126 NR Description: isopentenyl pyrophosphate:dimethyllallyl
  misc_feature (1)..(239): Homolog of NCBI NO: 6856560 NR Description: isopentenyl pyrophosphate:dimethyllallyl
  misc_feature (1)..(239): Homolog of NCBI NO: 6856550 NR Description: isopentenyl pyrophosphate:dimethyllallyl
  misc_feature (7)..(239): Homolog of NCBI NO: 13603408 NR Description: isopentenyl diphosphate isomerase 2 [Nicotiana
  misc_feature (12)..(239): Homolog of NCBI NO: 1085973 NR Description: isopentenyl-diphosphate Delta-isomerase (EC
  misc_feature (12)..(239): Homolog of NCBI NO: 6225526 NR Description: ISOPENTENYL-DIPHOSPHATE DELTA-ISOMERASE I (IPP
  misc_feature (11)..(239): Homolog of NCBI NO: 19568937 NR Description: isopentenyl pyrophosphate isomerase IDI2
  misc_feature (12)..(239): Homolog of NCBI NO: 34898490 NR Description: putative isopentenyl pyrophosphate:dimethyllallyl
  misc_feature (1)..(239): Homolog of NCBI NO: 1213442 NR Description: isopentenyl pyrophosphate isomerase [Arabidopsis
MGKPSPGVVDADAGMDAVQRRLMFEDECILVDEQDNVIGHESKYNCHLMEKIEAGNALHRAFSVFLFNSKYELLLQQRSATKVTFPLVWTNTCCSHPLYRESELIEENCAGVRNAAQRKLFDELGIVADELPVDQFIPLGRMLYKAPSDGKWGEHELDYLLFMVRDVKLDPNPEEVADVKYMNRHQLKELLRKADAGEDGVKLSPWFRLVVDNFLMGWWDHVEQGTLQGAADMKTIHKL

SEQ ID NO: 5442 - DNA, 2114 bp, Zea mays subsp. mays
  misc_feature (1)..(2114): Ceres Seq. ID no. 12376562
  misc_feature: MA Experiment ID: 108535 Result: Up-regulated in Transcription
  misc_feature: MA Experiment 108535 PARAMETER Experiment Name: Zm_Meristem_P Parameter: Age (day) Value: 8
  misc_feature: MA Experiment 108535 PARAMETER Experiment Name: Zm_Meristem_P Parameter: Organism Value: Zea mays
  misc_feature: MA Experiment 108535 PARAMETER Experiment Name: Zm_Meristem_P Parameter: Plant Line Value: 35A19
  misc_feature: MA Experiment 108535 PARAMETER Experiment Name: Zm_Meristem_P Parameter: Tissue Value: Root Meristem vs. Above Root Meristem
  misc_feature: MA Experiment ID: 108543 Result: Down-regulated in Transcription
  misc_feature: MA Experiment ID: 108544 Result: Down-regulated in Transcription
  misc_feature: MA Experiment ID: 20000492 Result: Up-regulated in Transcription
  misc_feature: MA Experiment 20000492 PARAMETER Experiment Name: Zm_Hybrid_Seed_Dev_P Parameter: DAP Value: 12
  misc_feature: MA Experiment 20000492 PARAMETER Experiment Name: Zm_Hybrid_Seed_Dev_P Parameter: Organism Value: Zea mays
  misc_feature: MA Experiment 20000492 PARAMETER Experiment Name: Zm_Hybrid_Seed_Dev_P Parameter: Plant Line Value: 35A19
  misc_feature: MA Experiment 20000492 PARAMETER Experiment Name: Zm_Hybrid_Seed_Dev_P Parameter: Tissue Value: Fert Kernel vs. Unfert Floret
acccccacttaaccaagaaaacggaatcaaagaaaacctgtccctgaaacgacgacgcaacatcgttacgtctacaagcctgtgcctgtcccatcgatcgatcaaccatggagattgcattggcagccaagaagaagaaccgtgcccgtcgccacctcgccgttcttctcctgctcctcgcctgcgcctgcgccggcattgcgcccgcgagcggcgccggcgggaggtgggacctccagcagcgcagcatcggggtgtcggcgatgcacatgcagctcctgcacaacgaccgcgtcatcatcttcgaccgcaccgacttcggccactccaacctctccctccccgacggacgctgccgcgtcaacccgcgggagcgcgtgctccctcagggggactgcaccgcgcactccgtcgagtacgacgtcgccgccaacgcgttccgcccgctcttcgtcttcaccgacacctggtgctcctcgggcaccgtcgcgcccgacggcacgctcgtccagaccggcggctggaacgacgggttccgcaacgcgcgcaccatgcccgcgtgcagcgacggcgacgagagctgcgactggtccgagacgcaggacgcgctctcggccaaccggtggtacgccaccaaccagatcctccccgacggccgcgcgttcatcatcggcggccggaggcagttcagctacgagttctacccaaaggcgggcccttcggatacgtccgtcatcccgatgccatttctggtgcagacgagggaccccgaggagaacaatctttatccgttcgtgcacctcaacatagacggcaaccttttcatcttctccaacaaccgcgccgtcctcttggactacagcagcaacaagatcgtgcggacgtaccccgtgctgggcgacggcgacccgcggaactaccccagctcgggctcctcggtgctgctcccgctgaaacccaaccccaccgaggccgaggtgctggtctgcggcggcgcgccggcgggctcctacaactccaccaagcagcagggcggcaccgccggcgctttcgtcccggcgctgacgacgtgtgggcggatcaagatcaccgacgccacgccggcgtgggtcatcgagacaatgccgtcgccgcgggtgatgggcgacatgatcctgctgcccaacggcgcggaggtggccatcatcaacggcgccgcggacggcaccgccgggtgggagtccgccaagaccccggcgtacgcgcccgtcgtctaccgcccggaccactcgccgggggaccggttcgaggagcagaacgcggcgggcgtcgcgcggctgtaccactcctcggcggtgctcctccgcgacggccgcctgctggtgggcggcagcaacccgcacacctactacaacttcagcaacgtgcagttccccaccgacctcagcctggaggccttctcgccggagtacctcgacgcgtccaacgacatgctccggccgaggatcctcgacccgtcccccaccggcgcgccggcgaccgtgggctacggggcgacgatggcgatccggttcctggtcccggcattggcgcggagaaggcgtggcggccgcgccggcggcctcggtgacgtgtcggtgacgatggtggcgccgtccttcacgacgcactcgttcgcgatgaaccagcggctgctgttccttgacgtgaccaagaacgtggcggtgcgcggccgagccggcgcgttcagcgcgtcggtgacgatgccggcgacagcggtgctggcgccaccggggtactacatgctgttcgtggtgaacgggcacatccccagcgaggggatctgggtcaaaatacaggcacagtgagagcgtgcgacagggaagggttatacatttcattcattttgtttcgttattgccattgatactcccctcttcttagttcttgttactactctacaggtgtacgtaaaaagacaaagacccttgtataaaagaggtgtaaatccatggtagcgttgacagtcactgactgtgactggacactgtgttgctgtctctcgttgacgtgagtcgtgagatgagattggaaagaaaaaaaaaaaaaaaaaaaaaaaaaaaaaaaaacaaaaa

SEQ ID NO: 5443 - protein, 579 aa, Zea mays subsp. mays
  peptide (1)..(579): Ceres Seq. ID no. 12376563
  misc_feature (16)..(577): Homolog of NCBI NO: 15222300 NR Description: unknown protein; protein id: At1g75620.1 thaliana] >gi|9369366|gb|AAF87115.1|AC006434_11 F10A5.18
  misc_feature (34)..(577): Homolog of NCBI NO: 15223699 NR Description: unknown protein; protein id: At1g19900.1, by cDNA: gi_16604506 [Arabidopsis thaliana]
  misc_feature (53)..(577): Homolog of NCBI NO: 25352604 NR Description: hypothetical protein F6F9.4 [imported] - thaliana >gi|10086483|gb|AAG12543.1|AC007797_3 Unknown Protein
  misc_feature (19)..(577): Homolog of NCBI NO: 15230360 NR Description: putative protein; protein id: At3g57620.1 thaliana] >gi|7485502|pir||T06758 probable galactose oxidase (EC
  misc_feature (38)..(576): Homolog of NCBI NO: 25352602 NR Description: F14L17.20 protein - Arabidopsis thaliana Weak similarity to glyoxal oxidase (glx2) from Phanerochaete
  misc_feature (38)..(573): Homolog of NCBI NO: 15223754 NR Description: hypothetical protein; protein id: At1g14430.1
  misc_feature (39)..(485): Homolog of NCBI NO: 15232379 NR Description: putative protein; protein id: At3g53950.1, by cDNA: gi_15809875 [Arabidopsis thaliana]
  misc_feature (499)..(576): Homolog of NCBI NO: 15232379 NR Description: putative protein; protein id: At3g53950.1, by cDNA: gi_15809875 [Arabidopsis thaliana]
  misc_feature (39)..(576): Homolog of NCBI NO: 15220398 NR Description: glyoxal oxidase (glx1), putative; protein id: [Arabidopsis thaliana] >gi|9828629|gb|AAG00252.1|AC002130_17 [Arabidopsis thaliana] >gi|27754377|gb|AAO22637.1| putative
  misc_feature (38)..(565): Homolog of NCBI NO: 15241135 NR Description: putative protein; protein id: At5g19580.1,
MEIALAAKKKNRARRHLAVLLLLLACACAGIAPASGAGGRWDLQQRSIGVSAMHMQLLHNDRVIIFDRTDFGHSNLSLPDGRCRVNPRERVLPQGDCTAHSVEYDVAANAFRPLFVFTDTWCSSGTVAPDGTLVQTGGWNDGFRNARTMPACSDGDESCDWSETQDALSANRWYATNQILPDGRAFIIGGRRQFSYEFYPKAGPSDTSVIPMPFLVQTRDPEENNLYPFVHLNIDGNLFIFSNNRAVLLDYSSNKIVRTYPVLGDGDPRNYPSSGSSVLLPLKPNPTEAEVLVCGGAPAGSYNSTKQQGGTAGAFVPALTTCGRIKITDATPAWVIETMPSPRVMGDMILLPNGAEVAIINGAADGTAGWESAKTPAYAPVVYRPDHSPGDRFEEQNAAGVARLYHSSAVLLRDGRLLVGGSNPHTYYNFSNVQFPTDLSLEAFSPEYLDASNDMLRPRILDPSPTGAPATVGYGATMAIRFLVPALARRRRGGRAGGLGDVSVTMVAPSFTTHSFAMNQRLLFLDVTKNVAVRGRAGAFSASVTMPATAVLAPPGYYMLFVVNGHIPSEGIWVKIQAQ

SEQ ID NO: 5444 - protein, 535 aa, Zea mays subsp. mays
  peptide (1)..(535): Ceres Seq. ID no. 12376564
  misc_feature (385)..(492): Pfam Name: FHIPEP family Pfam Description: FHIPEP family
PPLNQENGIKENLSLKRRRNIVTSTSLCLSHRSINHGDCIGSQEEEPCPSPPRRSSPAPRLRLRRHCARERRRREVGPPAAQHRGVGDAHAAPAQRPRHHLRPHRLRPLQPLPPRRTLPRQPAGARAPSGGLHRALRRVRRRRQRVPPALRLHRHLVLLGHRRARRHARPDRRLERRVPQRAHHARVQRRRRELRLVRDAGRALGQPVVRHQPDPPRRPRVHHRRPEAVQLRVLPKGGPFGYVRHPDAISGADEGPRGEQSLSVRAPQHRRQPFHLLQQPRRPLGLQQQQDRADVPRAGRRRPAELPQLGLLGAAPAETQPHRGRGAGLRRRAGGLLQLHQAAGRHRRRFRPGADDVWADQDHRRHAGVGHRDNAVAAGDGRHDPAAQRRGGGHHQRRRGRHRRVGVRQDPGVRARRLPPGPLAGGPVRGAERGGRRAAVPLLGGAPPRRPPAGGRQQPAHLLQLQQRAVPHRPQPGGLLAGVPRRVQRHAPAEDPRPVPHRRAGDRGLRGDDGDPVPGPGIGAEKAWRPRRRPR

SEQ ID NO: 5445 - protein, 527 aa, Zea mays subsp. mays
  peptide (1)..(527): Ceres Seq. ID no. 12376565
  misc_feature (1)..(525): Homolog of NCBI NO: 15222300 NR Description: unknown protein; protein id: At1g75620.1 thaliana] >gi|9369366|gb|AAF87115.1|AC006434_11 F10A5.18
  misc_feature (1)..(525): Homolog of NCBI NO: 15223699 NR Description: unknown protein; protein id: At1g19900.1, by cDNA: gi_16604506 [Arabidopsis thaliana]
  misc_feature (1)..(525): Homolog of NCBI NO: 25352604 NR Description: hypothetical protein F6F9.4 [imported] - thaliana >gi|10086483|gb|AAG12543.1|AC007797_3 Unknown Protein
  misc_feature (1)..(525): Homolog of NCBI NO: 15230360 NR Description: putative protein; protein id: At3g57620.1 thaliana] >gi|7485502|pir||T06758 probable galactose oxidase (EC
  misc_feature (1)..(524): Homolog of NCBI NO: 25352602 NR Description: F14L17.20 protein - Arabidopsis thaliana Weak similarity to glyoxal oxidase (glx2) from Phanerochaete
  misc_feature (1)..(521): Homolog of NCBI NO: 15223754 NR Description: hypothetical protein; protein id: At1g14430.1
  misc_feature (1)..(433): Homolog of NCBI NO: 15232379 NR Description: putative protein; protein id: At3g53950.1, by cDNA: gi_15809875 [Arabidopsis thaliana]
  misc_feature (447)..(524): Homolog of NCBI NO: 15232379 NR Description: putative protein; protein id: At3g53950.1, by cDNA: gi_15809875 [Arabidopsis thaliana]
  misc_feature (1)..(524): Homolog of NCBI NO: 15220398 NR Description: glyoxal oxidase (glx1), putative; protein id: [Arabidopsis thaliana] >gi|9828629|gb|AAG00252.1|AC002130_17 [Arabidopsis thaliana] >gi|27754377|gb|AAO22637.1| putative
  misc_feature (1)..(513): Homolog of NCBI NO: 15241135 NR Description: putative protein; protein id: At5g19580.1,
MHMQLLHNDRVIIFDRTDFGHSNLSLPDGRCRVNPRERVLPQGDCTAHSVEYDVAANAFRPLFVFTDTWCSSGTVAPDGTLVQTGGWNDGFRNARTMPACSDGDESCDWSETQDALSANRWYATNQILPDGRAFIIGGRRQFSYEFYPKAGPSDTSVIPMPFLVQTRDPEENNLYPFVHLNIDGNLFIFSNNRAVLLDYSSNKIVRTYPVLGDGDPRNYPSSGSSVLLPLKPNPTEAEVLVCGGAPAGSYNSTKQQGGTAGAFVPALTTCGRIKITDATPAWVIETMPSPRVMGDMILLPNGAEVAIINGAADGTAGWESAKTPAYAPVVYRPDHSPGDRFEEQNAAGVARLYHSSAVLLRDGRLLVGGSNPHTYYNFSNVQFPTDLSLEAFSPEYLDASNDMLRPRILDPSPTGAPATVGYGATMAIRFLVPALARRRRGGRAGGLGDVSVTMVAPSFTTHSFAMNQRLLFLDVTKNVAVRGRAGAFSASVTMPATAVLAPPGYYMLFVVNGHIPSEGIWVKIQAQ

SEQ ID NO: 5446 - DNA, 1268 bp, Zea mays subsp. mays
  misc_feature (1)..(1268): Ceres Seq. ID no. 12409505
  misc_feature: MA Experiment ID: 108522 Result: Up-regulated in Transcription
  misc_feature: MA Experiment 108522 PARAMETER Experiment Name: Zm_42deg_Heat_P Parameter: Age (day) Value: 8
  misc_feature: MA Experiment 108522 PARAMETER Experiment Name: Zm_42deg_Heat_P Parameter: Organism Value: Zea mays
  misc_feature: MA Experiment 108522 PARAMETER Experiment Name: Zm_42deg_Heat_P Parameter: Plant Line Value: 35A19
  misc_feature: MA Experiment 108522 PARAMETER Experiment Name: Zm_42deg_Heat_P Parameter: Temperature (deg C) Value: 42 vs. 22
  misc_feature: MA Experiment 108522 PARAMETER Experiment Name: Zm_42deg_Heat_P Parameter: Timepoint (hr) Value: 1
  misc_feature: MA Experiment 108522 PARAMETER Experiment Name: Zm_42deg_Heat_P Parameter: Tissue Value: Aerial
  misc_feature: MA Experiment ID: 108527 Result: Up-regulated in Transcription
  misc_feature: MA Experiment 108527 PARAMETER Experiment Name: Zm_5mM_NO_P Parameter: Age (day) Value: 8
  misc_feature: MA Experiment 108527 PARAMETER Experiment Name: Zm_5mM_NO_P Parameter: Organism Value: Zea mays
  misc_feature: MA Experiment 108527 PARAMETER Experiment Name: Zm_5mM_NO_P Parameter: Plant Line Value: 35A19
  misc_feature: MA Experiment 108527 PARAMETER Experiment Name: Zm_5mM_NO_P Parameter: Timepoint (hr) Value: 6
  misc_feature: MA Experiment 108527 PARAMETER Experiment Name: Zm_5mM_NO_P Parameter: Tissue Value: Aerial
  misc_feature: MA Experiment 108527 PARAMETER Experiment Name: Zm_5mM_NO_P Parameter: Treatment Value: 5mM NO vs. No Treatment
  misc_feature: MA Experiment ID: 108530 Result: Up-regulated in Transcription
  misc_feature: MA Experiment 108530 PARAMETER Experiment Name: Zm_Imbibed_Seeds_P Parameter: Age (day) Value: 6 vs. 2
  misc_feature: MA Experiment 108530 PARAMETER Experiment Name: Zm_Imbibed_Seeds_P Parameter: Organism Value: Zea mays
  misc_feature: MA Experiment 108530 PARAMETER Experiment Name: Zm_Imbibed_Seeds_P Parameter: Plant Line Value: 35A19
  misc_feature: MA Experiment 108530 PARAMETER Experiment Name: Zm_Imbibed_Seeds_P Parameter: Tissue Value: Aerial vs. Embryo
  misc_feature: MA Experiment ID: 108534 Result: Down-regulated in Transcription
  misc_feature: MA Experiment 108534 PARAMETER Experiment Name: Zm_4deg_Cold_P Parameter: Age (hr) Value: 8
  misc_feature: MA Experiment 108534 PARAMETER Experiment Name: Zm_4deg_Cold_P Parameter: Organism Value: Zea mays
  misc_feature: MA Experiment 108534 PARAMETER Experiment Name: Zm_4deg_Cold_P Parameter: Plant Line Value: 35A19
  misc_feature: MA Experiment 108534 PARAMETER Experiment Name: Zm_4deg_Cold_P Parameter: Temperature (deg C) Value: 4 vs. 22
  misc_feature: MA Experiment 108534 PARAMETER Experiment Name: Zm_4deg_Cold_P Parameter: Timepoint (hr) Value: 6
  misc_feature: MA Experiment 108534 PARAMETER Experiment Name: Zm_4deg_Cold_P Parameter: Tissue Value: Aerial
  misc_feature: MA Experiment ID: 108535 Result: Down-regulated in Transcription
  misc_feature: MA Experiment 108535 PARAMETER Experiment Name: Zm_Meristem_P Parameter: Age (day) Value: 8
  misc_feature: MA Experiment 108535 PARAMETER Experiment Name: Zm_Meristem_P Parameter: Organism Value: Zea mays
  misc_feature: MA Experiment 108535 PARAMETER Experiment Name: Zm_Meristem_P Parameter: Plant Line Value: 35A19
  misc_feature: MA Experiment 108535 PARAMETER Experiment Name: Zm_Meristem_P Parameter: Tissue Value: Root Meristem vs. Above Root Meristem
  misc_feature: MA Experiment ID: 108542 Result: Up-regulated in Transcription
  misc_feature: MA Experiment 108542 PARAMETER Experiment Name: Zm_150mM_NaCl_P Parameter: Age (day) Value: 8
  misc_feature: MA Experiment 108542 PARAMETER Experiment Name: Zm_150mM_NaCl_P Parameter: Organism Value: Zea mays
  misc_feature: MA Experiment 108542 PARAMETER Experiment Name: Zm_150mM_NaCl_P Parameter: Plant Line Value: 35A19
  misc_feature: MA Experiment 108542 PARAMETER Experiment Name: Zm_150mM_NaCl_P Parameter: Timepoint (hr) Value: 6
  misc_feature: MA Experiment 108542 PARAMETER Experiment Name: Zm_150mM_NaCl_P Parameter: Tissue Value: Aerial
  misc_feature: MA Experiment 108542 PARAMETER Experiment Name: Zm_150mM_NaCl_P Parameter: Treatment Value: 150mM NaCl vs. No Treatment
  misc_feature: MA Experiment ID: 108543 Result: Down-regulated in Transcription
  misc_feature: MA Experiment ID: 108556 Result: Up-regulated in Transcription
  misc_feature: MA Experiment 108556 PARAMETER Experiment Name: Zm_Drought_P Parameter: Age (day) Value: 9
  misc_feature: MA Experiment 108556 PARAMETER Experiment Name: Zm_Drought_P Parameter: Organism Value: Zea mays
  misc_feature: MA Experiment 108556 PARAMETER Experiment Name: Zm_Drought_P Parameter: Plant Line Value: 35A19
  misc_feature: MA Experiment 108556 PARAMETER Experiment Name: Zm_Drought_P Parameter: Timepoint (hr) Value: 24
  misc_feature: MA Experiment 108556 PARAMETER Experiment Name: Zm_Drought_P Parameter: Tissue Value: Aerial
  misc_feature: MA Experiment 108556 PARAMETER Experiment Name: Zm_Drought_P Parameter: Treatment Value: Drought vs. No Drought
  misc_feature: MA Experiment ID: 108559 Result: Up-regulated in Transcription
  misc_feature: MA Experiment 108559 PARAMETER Experiment Name: Zm_5mM_NO_P Parameter: Age (day) Value: 8
  misc_feature: MA Experiment 108559 PARAMETER Experiment Name: Zm_5mM_NO_P Parameter: Organism Value: Zea mays
  misc_feature: MA Experiment 108559 PARAMETER Experiment Name: Zm_5mM_NO_P Parameter: Plant Line Value: 35A19
  misc_feature: MA Experiment 108559 PARAMETER Experiment Name: Zm_5mM_NO_P Parameter: Timepoint (hr) Value: 12
  misc_feature: MA Experiment 108559 PARAMETER Experiment Name: Zm_5mM_NO_P Parameter: Tissue Value: Aerial
  misc_feature: MA Experiment 108559 PARAMETER Experiment Name: Zm_5mM_NO_P Parameter: Treatment Value: 5mM NO vs. No Treatment
  misc_feature: MA Experiment ID: 20000478 Result: Up-regulated in Transcription
  misc_feature: MA Experiment 20000478 PARAMETER Experiment Name: Zm_5mM_SA_P Parameter: Age (day) Value: 11
  misc_feature: MA Experiment 20000478 PARAMETER Experiment Name: Zm_5mM_SA_P Parameter: Organism Value: Zea mays
  misc_feature: MA Experiment 20000478 PARAMETER Experiment Name: Zm_5mM_SA_P Parameter: Plant Line Value: 35A19
  misc_feature: MA Experiment 20000478 PARAMETER Experiment Name: Zm_5mM_SA_P Parameter: Timepoint (hr) Value: 72
  misc_feature: MA Experiment 20000478 PARAMETER Experiment Name: Zm_5mM_SA_P Parameter: Tissue Value: Aerial
  misc_feature: MA Experiment 20000478 PARAMETER Experiment Name: Zm_5mM_SA_P Parameter: Treatment Value: 5mM SA vs. No Treatment
  misc_feature: MA Experiment ID: 20000479 Result: Up-regulated in Transcription
  misc_feature: MA Experiment 20000479 PARAMETER Experiment Name: Zm_Drought_P Parameter: Age (day) Value: 10
  misc_feature: MA Experiment 20000479 PARAMETER Experiment Name: Zm_Drought_P Parameter: Organism Value: Zea mays
  misc_feature: MA Experiment 20000479 PARAMETER Experiment Name: Zm_Drought_P Parameter: Plant Line Value: 35A19
  misc_feature: MA Experiment 20000479 PARAMETER Experiment Name: Zm_Drought_P Parameter: Timepoint (hr) Value: 48
  misc_feature: MA Experiment 20000479 PARAMETER Experiment Name: Zm_Drought_P Parameter: Tissue Value: Aerial
  misc_feature: MA Experiment 20000479 PARAMETER Experiment Name: Zm_Drought_P Parameter: Treatment Value: Drought vs. No Drought
  misc_feature: MA Experiment ID: 20000480 Result: Up-regulated in Transcription
  misc_feature: MA Experiment 20000480 PARAMETER Experiment Name: Zm_Drought_P Parameter: Age (day) Value: 11
  misc_feature: MA Experiment 20000480 PARAMETER Experiment Name: Zm_Drought_P Parameter: Organism Value: Zea mays
  misc_feature: MA Experiment 20000480 PARAMETER Experiment Name: Zm_Drought_P Parameter: Plant Line Value: 35A19
  misc_feature: MA Experiment 20000480 PARAMETER Experiment Name: Zm_Drought_P Parameter: Timepoint (hr) Value: 72
  misc_feature: MA Experiment 20000480 PARAMETER Experiment Name: Zm_Drought_P Parameter: Tissue Value: Aerial
  misc_feature: MA Experiment 20000480 PARAMETER Experiment Name: Zm_Drought_P Parameter: Treatment Value: Drought vs. No Drought
  misc_feature: MA Experiment ID: 20000534 Result: Down-regulated in Transcription
  misc_feature: MA Experiment 20000534 PARAMETER Experiment Name: Zm_Hybrid_Pollen_P Parameter: Age (day) Value: 8
  misc_feature: MA Experiment 20000534 PARAMETER Experiment Name: Zm_Hybrid_Pollen_P Parameter: Organism Value: Zea mays
  misc_feature: MA Experiment 20000534 PARAMETER Experiment Name: Zm_Hybrid_Pollen_P Parameter: Plant Line Value: 35A19
  misc_feature: MA Experiment 20000534 PARAMETER Experiment Name: Zm_Hybrid_Pollen_P Parameter: Tissue Value: Pollen vs. Aerial
ctcttgctcggtcgcctttcccggtctttggtgtggataaaccggctttcttgctgttctcgatccttcttcaattcgctgtagtttttccttttgtcgcttgctcttgttctctttccaagaccgaggaagacgagtcagatttggtgattgtgtagagcgtacaagtgattgttcttggagaagcataggcctctcttggctgctcttgtcttcttgagcaaggaggcggaggaaaggaaagacatggaagaggaatccgtcgcagcttcaaggtactactgccacatgtgctcgctgatcataaggcccgaactgggcatcgaggaggtgaagtgcccccactgccacaccggcttcgtggaggagatggcgggcgaccggcgaggcagcgacgacgcagccatcagaggccgtcctcccggcggcgaggcgagctctaacgcctcggacgcggcgctggagcgcgaggtttcgctctgggcgcctgtgctcatggacttcatcgccgcctcgtccggccgccacggcctcgacggccacggaggggacctcgccgctttggcgcgaaggcagtaccgcaacatcgccctcctgcagctgctcaacgcgctccaggaaggcgacaccgatgccgggcgcgagcgggtcgtgctcatgagccccgcggacgcgcgcgccatgcttatgggacaagagcgaggggacggcgccgccgccctgggccccggcggtctgacgctcggggacctgttcctcggcccggggctggacttgctgctggagtacctggccgagaccgacccaaaccggcagggcacgccgccggccaggaaggaggccgtggccgcgttgccgacggtccgggtgcgcgaggacttcacctgccccgtgtgcctggacgaggtcgcgggcggcggcgacgcgcgcgagatgccgtgcaagcaccggttccacgaccagtgcatcctgccctggctggagatgcacagctcctgccccgtgtgcaggcaccagctgcccacggaggagccggcggaggcaattggcagcgacagaggcgccggtgttgagtccagtggcaacgcgcgcggcggcgggaggaggcattggttctcgtggcccttcggagggttgttctcgcaaagatccagcgggaactcctcgtcgtcctgatgatgcatgaacacgataataatatgcaagggaacacctcatcgtccctgatgatgctaatgaacaggataataatatgcgtcgatgtagcc

SEQ ID NO: 5447 - protein, 309 aa, Zea mays subsp. mays
  peptide (1)..(309): Ceres Seq. ID no. 12409506
  misc_feature (214)..(254): Pfam Name: Zinc finger, C3HC4 type (RING finger) Pfam Description: Zinc finger, C3HC4 type (RING finger)
  misc_feature (94)..(260): Homolog of NCBI NO: 15241188 NR Description: putative protein; protein id: At5g56340.1, by cDNA: gi_17380897, supported by cDNA: gi_20259580 [Arabidopsis >gi|10177832|dbj|BAB11261.1| gene_id:MCD7.7~pir||T05064~similar
  misc_feature (3)..(93): Homolog of NCBI NO: 15241188 NR Description: putative protein; protein id: At5g56340.1, by cDNA: gi_17380897, supported by cDNA: gi_20259580 [Arabidopsis >gi|10177832|dbj|BAB11261.1| gene_id:MCD7.7~pir||T05064~similar
  misc_feature (265)..(309): Homolog of NCBI NO: 15241188 NR Description: putative protein; protein id: At5g56340.1, by cDNA: gi_17380897, supported by cDNA: gi_20259580 [Arabidopsis >gi|10177832|dbj|BAB11261.1| gene_id:MCD7.7~pir||T05064~similar
  misc_feature (93)..(309): Homolog of NCBI NO: 22328949 NR Description: putative protein; protein id: At4g26400.1, by cDNA: gi_20466681 [Arabidopsis thaliana] putative protein [Arabidopsis thaliana]
  misc_feature (8)..(88): Homolog of NCBI NO: 22328949 NR Description: putative protein; protein id: At4g26400.1, by cDNA: gi_20466681 [Arabidopsis thaliana] putative protein [Arabidopsis thaliana]
  misc_feature (93)..(309): Homolog of NCBI NO: 7486783 NR Description: hypothetical protein M3E9.170 - Arabidopsis >gi|2982466|emb|CAA18230.1| putative protein [Arabidopsis >gi|7269492|emb|CAB79495.1| putative protein [Arabidopsis
  misc_feature (19)..(88): Homolog of NCBI NO: 7486783 NR Description: hypothetical protein M3E9.170 - Arabidopsis >gi|2982466|emb|CAA18230.1| putative protein [Arabidopsis >gi|7269492|emb|CAB79495.1| putative protein [Arabidopsis
  misc_feature (1)..(287): Homolog of NCBI NO: 34903272 NR Description: unnamed protein product [Oryza sativa (japonica group)] >gi|6539567|dbj|BAA88184.1| unnamed protein product
  misc_feature (3)..(262): Homolog of NCBI NO: 18405411 NR Description: expressed protein; protein id: At1g55530.1, by cDNA: gi_14517545, supported by cDNA: gi_15983407 [Arabidopsis
  misc_feature (123)..(309): Homolog of NCBI NO: 32129334 NR Description: unknown protein [Oryza sativa (japonica
MEEESVAASRYYCHMCSLIIRPELGIEEVKCPHCHTGFVEEMAGDRRGSDDAAIRGRPPGGEASSNASDAALEREVSLWAPVLMDFIAASSGRHGLDGHGGDLAALARRQYRNIALLQLLNALQEGDTDAGRERVVLMSPADARAMLMGQERGDGAAALGPGGLTLGDLFLGPGLDLLLEYLAETDPNRQGTPPARKEAVAALPTVRVREDFTCPVCLDEVAGGGDAREMPCKHRFHDQCILPWLEMHSSCPVCRHQLPTEEPAEAIGSDRGAGVESSGNARGGGRRHWFSWPFGGLFSQRSSGNSSSS

SEQ ID NO: 5448 - protein, 295 aa, Zea mays subsp. mays
  peptide (1)..(295): Ceres Seq. ID no. 12409507
  misc_feature (200)..(240): Pfam Name: Zinc finger, C3HC4 type (RING finger) Pfam Description: Zinc finger, C3HC4 type (RING finger)
  misc_feature (251)..(295): Homolog of NCBI NO: 15241188 NR Description: putative protein; protein id: At5g56340.1, by cDNA: gi_17380897, supported by cDNA: gi_20259580 [Arabidopsis >gi|10177832|dbj|BAB11261.1| gene_id:MCD7.7~pir||T05064~similar
  misc_feature (79)..(295): Homolog of NCBI NO: 22328949 NR Description: putative protein; protein id: At4g26400.1, by cDNA: gi_20466681 [Arabidopsis thaliana] putative protein [Arabidopsis thaliana]
  misc_feature (1)..(74): Homolog of NCBI NO: 22328949 NR Description: putative protein; protein id: At4g26400.1, by cDNA: gi_20466681 [Arabidopsis thaliana] putative protein [Arabidopsis thaliana]
  misc_feature (79)..(295): Homolog of NCBI NO: 7486783 NR Description: hypothetical protein M3E9.170 - Arabidopsis >gi|2982466|emb|CAA18230.1| putative protein [Arabidopsis >gi|7269492|emb|CAB79495.1| putative protein [Arabidopsis
  misc_feature (80)..(246): Homolog of NCBI NO: 15241188 NR Description: putative protein; protein id: At5g56340.1, by cDNA: gi_17380897, supported by cDNA: gi_20259580 [Arabidopsis >gi|10177832|dbj|BAB11261.1| gene_id:MCD7.7~pir||T05064~similar
  misc_feature (1)..(79): Homolog of NCBI NO: 15241188 NR Description: putative protein; protein id: At5g56340.1, by cDNA: gi_17380897, supported by cDNA: gi_20259580 [Arabidopsis >gi|10177832|dbj|BAB11261.1| gene_id:MCD7.7~pir||T05064~similar
  misc_feature (5)..(74): Homolog of NCBI NO: 7486783 NR Description: hypothetical protein M3E9.170 - Arabidopsis >gi|2982466|emb|CAA18230.1| putative protein [Arabidopsis >gi|7269492|emb|CAB79495.1| putative protein [Arabidopsis
  misc_feature (1)..(273): Homolog of NCBI NO: 34903272 NR Description: unnamed protein product [Oryza sativa (japonica group)] >gi|6539567|dbj|BAA88184.1| unnamed protein product
  misc_feature (1)..(248): Homolog of NCBI NO: 18405411 NR Description: expressed protein; protein id: At1g55530.1, by cDNA: gi_14517545, supported by cDNA: gi_15983407 [Arabidopsis
  misc_feature (109)..(295): Homolog of NCBI NO: 32129334 NR Description: unknown protein [Oryza sativa (japonica
MCSLIIRPELGIEEVKCPHCHTGFVEEMAGDRRGSDDAAIRGRPPGGEASSNASDAALEREVSLWAPVLMDFIAASSGRHGLDGHGGDLAALARRQYRNIALLQLLNALQEGDTDAGRERVVLMSPADARAMLMGQERGDGAAALGPGGLTLGDLFLGPGLDLLLEYLAETDPNRQGTPPARKEAVAALPTVRVREDFTCPVCLDEVAGGGDAREMPCKHRFHDQCILPWLEMHSSCPVCRHQLPTEEPAEAIGSDRGAGVESSGNARGGGRRHWFSWPFGGLFSQRSSGNSSSS

SEQ ID NO: 5449 - protein, 268 aa, Zea mays subsp. mays
  peptide (1)..(268): Ceres Seq. ID no. 12409508
  misc_feature (173)..(213): Pfam Name: Zinc finger, C3HC4 type (RING finger) Pfam Description: Zinc finger, C3HC4 type (RING finger)
  misc_feature (53)..(219): Homolog of NCBI NO: 15241188 NR Description: putative protein; protein id: At5g56340.1, by cDNA: gi_17380897, supported by cDNA: gi_20259580 [Arabidopsis >gi|10177832|dbj|BAB11261.1| gene_id:MCD7.7~pir||T05064~similar
  misc_feature (1)..(52): Homolog of NCBI NO: 15241188 NR Description: putative protein; protein id: At5g56340.1, by cDNA: gi_17380897, supported by cDNA: gi_20259580 [Arabidopsis >gi|10177832|dbj|BAB11261.1| gene_id:MCD7.7~pir||T05064~similar
  misc_feature (224)..(268): Homolog of NCBI NO: 15241188 NR Description: putative protein; protein id: At5g56340.1, by cDNA: gi_17380897, supported by cDNA: gi_20259580 [Arabidopsis >gi|10177832|dbj|BAB11261.1| gene_id:MCD7.7~pir||T05064~similar
  misc_feature (52)..(268): Homolog of NCBI NO: 22328949 NR Description: putative protein; protein id: At4g26400.1, by cDNA: gi_20466681 [Arabidopsis thaliana] putative protein [Arabidopsis thaliana]
  misc_feature (1)..(47): Homolog of NCBI NO: 22328949 NR Description: putative protein; protein id: At4g26400.1, by cDNA: gi_20466681 [Arabidopsis thaliana] putative protein [Arabidopsis thaliana]
  misc_feature (52)..(268): Homolog of NCBI NO: 7486783 NR Description: hypothetical protein M3E9.170 - Arabidopsis >gi|2982466|emb|CAA18230.1| putative protein [Arabidopsis >gi|7269492|emb|CAB79495.1| putative protein [Arabidopsis
  misc_feature (1)..(47): Homolog of NCBI NO: 7486783 NR Description: hypothetical protein M3E9.170 - Arabidopsis >gi|2982466|emb|CAA18230.1| putative protein [Arabidopsis >gi|7269492|emb|CAB79495.1| putative protein [Arabidopsis
  misc_feature (1)..(246): Homolog of NCBI NO: 34903272 NR Description: unnamed protein product [Oryza sativa (japonica group)] >gi|6539567|dbj|BAA88184.1| unnamed protein product
  misc_feature (1)..(221): Homolog of NCBI NO: 18405411 NR Description: expressed protein; protein id: At1g55530.1, by cDNA: gi_14517545, supported by cDNA: gi_15983407 [Arabidopsis
  misc_feature (82)..(268): Homolog of NCBI NO: 32129334 NR Description: unknown protein [Oryza sativa (japonica
MAGDRRGSDDAAIRGRPPGGEASSNASDAALEREVSLWAPVLMDFIAASSGRHGLDGHGGDLAALARRQYRNIALLQLLNALQEGDTDAGRERVVLMSPADARAMLMGQERGDGAAALGPGGLTLGDLFLGPGLDLLLEYLAETDPNRQGTPPARKEAVAALPTVRVREDFTCPVCLDEVAGGGDAREMPCKHRFHDQCILPWLEMHSSCPVCRHQLPTEEPAEAIGSDRGAGVESSGNARGGGRRHWFSWPFGGLFSQRSSGNSSSS

SEQ ID NO: 5450 - DNA, 1468 bp, Zea mays subsp. mays
  misc_feature (1)..(1468): Ceres Seq. ID no. 12353780
  misc_feature: MA Experiment ID: 108527 Result: Up-regulated in Transcription
  misc_feature: MA Experiment 108527 PARAMETER Experiment Name: Zm_5mM_NO_P Parameter: Age (day) Value: 8
  misc_feature: MA Experiment 108527 PARAMETER Experiment Name: Zm_5mM_NO_P Parameter: Organism Value: Zea mays
  misc_feature: MA Experiment 108527 PARAMETER Experiment Name: Zm_5mM_NO_P Parameter: Plant Line Value: 35A19
  misc_feature: MA Experiment 108527 PARAMETER Experiment Name: Zm_5mM_NO_P Parameter: Timepoint (hr) Value: 6
  misc_feature: MA Experiment 108527 PARAMETER Experiment Name: Zm_5mM_NO_P Parameter: Tissue Value: Aerial
  misc_feature: MA Experiment 108527 PARAMETER Experiment Name: Zm_5mM_NO_P Parameter: Treatment Value: 5mM NO vs. No Treatment
  misc_feature: MA Experiment ID: 108559 Result: Up-regulated in Transcription
  misc_feature: MA Experiment 108559 PARAMETER Experiment Name: Zm_5mM_NO_P Parameter: Age (day) Value: 8
  misc_feature: MA Experiment 108559 PARAMETER Experiment Name: Zm_5mM_NO_P Parameter: Organism Value: Zea mays
  misc_feature: MA Experiment 108559 PARAMETER Experiment Name: Zm_5mM_NO_P Parameter: Plant Line Value: 35A19
  misc_feature: MA Experiment 108559 PARAMETER Experiment Name: Zm_5mM_NO_P Parameter: Timepoint (hr) Value: 12
  misc_feature: MA Experiment 108559 PARAMETER Experiment Name: Zm_5mM_NO_P Parameter: Tissue Value: Aerial
  misc_feature: MA Experiment 108559 PARAMETER Experiment Name: Zm_5mM_NO_P Parameter: Treatment Value: 5mM NO vs. No Treatment
  misc_feature: MA Experiment ID: 20000477 Result: Up-regulated in Transcription
  misc_feature: MA Experiment 20000477 PARAMETER Experiment Name: Zm_5mM_SA_P Parameter: Age (day) Value: 10
  misc_feature: MA Experiment 20000477 PARAMETER Experiment Name: Zm_5mM_SA_P Parameter: Organism Value: Zea mays
  misc_feature: MA Experiment 20000477 PARAMETER Experiment Name: Zm_5mM_SA_P Parameter: Plant Line Value: 35A19
  misc_feature: MA Experiment 20000477 PARAMETER Experiment Name: Zm_5mM_SA_P Parameter: Timepoint (hr) Value: 48
  misc_feature: MA Experiment 20000477 PARAMETER Experiment Name: Zm_5mM_SA_P Parameter: Tissue Value: Aerial
  misc_feature: MA Experiment 20000477 PARAMETER Experiment Name: Zm_5mM_SA_P Parameter: Treatment Value: 5mM SA vs. No Treatment
  misc_feature: MA Experiment ID: 20000478 Result: Up-regulated in Transcription
  misc_feature: MA Experiment 20000478 PARAMETER Experiment Name: Zm_5mM_SA_P Parameter: Age (day) Value: 11
  misc_feature: MA Experiment 20000478 PARAMETER Experiment Name: Zm_5mM_SA_P Parameter: Organism Value: Zea mays
  misc_feature: MA Experiment 20000478 PARAMETER Experiment Name: Zm_5mM_SA_P Parameter: Plant Line Value: 35A19
  misc_feature: MA Experiment 20000478 PARAMETER Experiment Name: Zm_5mM_SA_P Parameter: Timepoint (hr) Value: 72
  misc_feature: MA Experiment 20000478 PARAMETER Experiment Name: Zm_5mM_SA_P Parameter: Tissue Value: Aerial
  misc_feature: MA Experiment 20000478 PARAMETER Experiment Name: Zm_5mM_SA_P Parameter: Treatment Value: 5mM SA vs. No Treatment
  misc_feature: MA Experiment ID: 20000487 Result: Up-regulated in Transcription
  misc_feature: MA Experiment 20000487 PARAMETER Experiment Name: Zm_50mM_NH4NO3_L_to_H_P Parameter: Organism Value: Zea mays
  misc_feature: MA Experiment 20000487 PARAMETER Experiment Name: Zm_50mM_NH4NO3_L_to_H_P Parameter: Timepoint (hr) Value: 4
  misc_feature: MA Experiment 20000487 PARAMETER Experiment Name: Zm_50mM_NH4NO3_L_to_H_P Parameter: Tissue Value: Leaves
  misc_feature: MA Experiment 20000487 PARAMETER Experiment Name: Zm_50mM_NH4NO3_L_to_H_P Parameter: Treatment Value: 50mM NH4NO3 vs. 100mM Mannitol
gcatctccctttaccattgtctcccccctcgtccgacctcctcgccgccgcagacgaccgccgccgccgctgccgctgccgctgccgctgcgaaccctttgtgaatcttcgttgtccgggctgtgtggggcaggcatggcgctccggaggctgctgcaggggagcgtcctgccgcggataatcggcagggatttggcaccggccgtggcgccgttttcaacggagtccggggagaccattcgtgccacgctctttcccggcgatggcatcgggccagagatcgctgagtctgtcaagcaggtattcaatgttgcaggggtaccaattgaatgggaagaacactatgtcggtacagaagttgatcccagaacagagagttttttgacttgggaaagcctggagtcagtgcgtagaaacaaagttggcttgaaaggacctatggctacacctattggaaagggccatcgatctttgaatcttacattaaggaaagaacttgggctctatgccaatgtcagaccttgcaacagcctcccaggttacaagaccagatacgatgatgttaaccttgtaacaattcgtgaaaatactgaaggagaatatagtggtcttgagcatcaggttgtgagaggtgttgtggaaagtttgaaaattattacacgccaagcaagtttgagagtggcagagtatgctttccattatgccaaggccaatggccgggaaagagtctctgcgatccacaaagccaatattatgaggaagacagatggtcttttcctcaagtgttgccgtgaagtgtctgaaaagtaccctgaaattcaatacgaggaggtcatcattgacaattgctgtatgacgcttgtgaagaatcctggtctttttgacgtattagtgatgccaaatctctatggtgacattattagtgatctatgtgctggtttgatcgggggcttgggcctaacacccagttgcaatattggtgaaggtggcatttgtctggcagaagctgttcatggttctgctcctgatattgctggcaagaacctcgcgaacccgactgctcttatgctgagtgctgtcatgttgttgcgccacatgcaattcaacgacaaagcagaccggatccacaacgccatcctccagaccatcgccgaggggaagtacaggactgctgatcttggtggaaaggcatcgacatcagagtttacaaacgcagtctgtgatcacatctgagaaacggatgtgattcttccttctgattgttttgtcatcctaatatttttttgtcacatatgagaggagctttagctttaagaggttaactggcagcacctcgaacttctttggggtgtttaacacggtttgagaccgtcaaataattttgtcacatttcttgcggttcagaaattctttcaacattggaatggagccaagaattgtctgtaataatcaacatcagcattataac

SEQ ID NO: 5451 - protein, 410 aa, Zea mays subsp. mays
  peptide (1)..(410): Ceres Seq. ID no. 12353781
  misc_feature (81)..(406): Pfam Name: Isocitrate/isopropylmalate dehydrogenase Pfam Description: Isocitrate/isopropylmalate dehydrogenase
  misc_feature (46)..(410): Homolog of NCBI NO: 34903262 NR Description: unnamed protein product [Oryza sativa (japonica group)] >gi|6539562|dbj|BAA88179.1| unnamed protein product
  misc_feature (72)..(410): Homolog of NCBI NO: 7431333 NR Description: probable isocitrate dehydrogenase (NAD) (EC
  misc_feature (44)..(410): Homolog of NCBI NO: 11251553 NR Description: 3-isopropylmalate dehydrogenase-like protein -
  misc_feature (44)..(410): Homolog of NCBI NO: 18414179 NR Description: putative protein; protein id: At5g03290.1, by cDNA: gi_15724319, supported by cDNA: gi_20466713 [Arabidopsis >gi|15724320|gb|AAL06553.1|AF412100_1 W25EPL23M/W25EPL23M
  misc_feature (82)..(410): Homolog of NCBI NO: 28974492 NR Description: NAD-dependent isocitrate dehydrogenase alpha
  misc_feature (72)..(387): Homolog of NCBI NO: 266463 NR Description: 3-isopropylmalate dehydrogenase, chloroplast
  misc_feature (72)..(387): Homolog of NCBI NO: 7427677 NR Description: 3-isopropylmalate dehydrogenase (EC 1.1.1.85)
  misc_feature (49)..(410): Homolog of NCBI NO: 21536667 NR Description: putative (NAD+) isocitrate dehydrogenase
  misc_feature (55)..(410): Homolog of NCBI NO: 39850137 NR Description: Unknown (protein for MGC:76128) [Silurana
  misc_feature (76)..(410): Homolog of NCBI NO: 18250284 NR Description: isocitrate dehydrogenase 3 (NAD+) alpha; sequence AI316514 [Mus musculus] >gi|12845252|dbj|BAB26679.1| protein product [Mus musculus] >gi|26328565|dbj|BAC28021.1|
ASPFTIVSPLVRPPRRRRRPPPPLPLPLPLRTLCESSLSGLCGAGMALRRLLQGSVLPRIIGRDLAPAVAPFSTESGETIRATLFPGDGIGPEIAESVKQVFNVAGVPIEWEEHYVGTEVDPRTESFLTWESLESVRRNKVGLKGPMATPIGKGHRSLNLTLRKELGLYANVRPCNSLPGYKTRYDDVNLVTIRENTEGEYSGLEHQVVRGVVESLKIITRQASLRVAEYAFHYAKANGRERVSAIHKANIMRKTDGLFLKCCREVSEKYPEIQYEEVIIDNCCMTLVKNPGLFDVLVMPNLYGDIISDLCAGLIGGLGLTPSCNIGEGGICLAEAVHGSAPDIAGKNLANPTALMLSAVMLLRHMQFNDKADRIHNAILQTIAEGKYRTADLGGKASTSEFTNAVCDHI

SEQ ID NO: 5452 - protein, 365 aa, Zea mays subsp. mays
  peptide (1)..(365): Ceres Seq. ID no. 12353782
  misc_feature (36)..(361): Pfam Name: Isocitrate/isopropylmalate dehydrogenase Pfam Description: Isocitrate/isopropylmalate dehydrogenase
  misc_feature (1)..(365): Homolog of NCBI NO: 34903262 NR Description: unnamed protein product [Oryza sativa (japonica group)] >gi|6539562|dbj|BAA88179.1| unnamed protein product
  misc_feature (27)..(365): Homolog of NCBI NO: 7431333 NR Description: probable isocitrate dehydrogenase (NAD) (EC
  misc_feature (1)..(365): Homolog of NCBI NO: 11251553 NR Description: 3-isopropylmalate dehydrogenase-like protein -
  misc_feature (1)..(365): Homolog of NCBI NO: 18414179 NR Description: putative protein; protein id: At5g03290.1, by cDNA: gi_15724319, supported by cDNA: gi_20466713 [Arabidopsis >gi|15724320|gb|AAL06553.1|AF412100_1 W25EPL23M/W25EPL23M
  misc_feature (37)..(365): Homolog of NCBI NO: 28974492 NR Description: NAD-dependent isocitrate dehydrogenase alpha
  misc_feature (27)..(342): Homolog of NCBI NO: 266463 NR Description: 3-isopropylmalate dehydrogenase, chloroplast
  misc_feature (27)..(342): Homolog of NCBI NO: 7427677 NR Description: 3-isopropylmalate dehydrogenase (EC 1.1.1.85)
  misc_feature (4)..(365): Homolog of NCBI NO: 21536667 NR Description: putative (NAD+) isocitrate dehydrogenase
  misc_feature (10)..(365): Homolog of NCBI NO: 39850137 NR Description: Unknown (protein for MGC:76128) [Silurana
  misc_feature (31)..(365): Homolog of NCBI NO: 18250284 NR Description: isocitrate dehydrogenase 3 (NAD+) alpha; sequence AI316514 [Mus musculus] >gi|12845252|dbj|BAB26679.1| protein product [Mus musculus] >gi|26328565|dbj|BAC28021.1|
MALRRLLQGSVLPRIIGRDLAPAVAPFSTESGETIRATLFPGDGIGPEIAESVKQVFNVAGVPIEWEEHYVGTEVDPRTESFLTWESLESVRRNKVGLKGPMATPIGKGHRSLNLTLRKELGLYANVRPCNSLPGYKTRYDDVNLVTIRENTEGEYSGLEHQVVRGVVESLKIITRQASLRVAEYAFHYAKANGRERVSAIHKANIMRKTDGLFLKCCREVSEKYPEIQYEEVIIDNCCMTLVKNPGLFDVLVMPNLYGDIISDLCAGLIGGLGLTPSCNIGEGGICLAEAVHGSAPDIAGKNLANPTALMLSAVMLLRHMQFNDKADRIHNAILQTIAEGKYRTADLGGKASTSEFTNAVCDHI

SEQ ID NO: 5453 - protein, 264 aa, Zea mays subsp. mays
  peptide (1)..(264): Ceres Seq. ID no. 12353783
  misc_feature (1)..(260): Pfam Name: Isocitrate/isopropylmalate dehydrogenase Pfam Description: Isocitrate/isopropylmalate dehydrogenase
  misc_feature (1)..(264): Homolog of NCBI NO: 34903262 NR Description: unnamed protein product [Oryza sativa (japonica group)] >gi|6539562|dbj|BAA88179.1| unnamed protein product
  misc_feature (1)..(264): Homolog of NCBI NO: 7431333 NR Description: probable isocitrate dehydrogenase (NAD) (EC
  misc_feature (1)..(264): Homolog of NCBI NO: 11251553 NR Description: 3-isopropylmalate dehydrogenase-like protein -
  misc_feature (1)..(264): Homolog of NCBI NO: 18414179 NR Description: putative protein; protein id: At5g03290.1, by cDNA: gi_15724319, supported by cDNA: gi_20466713 [Arabidopsis >gi|15724320|gb|AAL06553.1|AF412100_1 W25EPL23M/W25EPL23M
  misc_feature (1)..(264): Homolog of NCBI NO: 28974492 NR Description: NAD-dependent isocitrate dehydrogenase alpha
  misc_feature (1)..(241): Homolog of NCBI NO: 266463 NR Description: 3-isopropylmalate dehydrogenase, chloroplast
  misc_feature (1)..(241): Homolog of NCBI NO: 7427677 NR Description: 3-isopropylmalate dehydrogenase (EC 1.1.1.85)
  misc_feature (1)..(264): Homolog of NCBI NO: 21536667 NR Description: putative (NAD+) isocitrate dehydrogenase
  misc_feature (1)..(264): Homolog of NCBI NO: 39850137 NR Description: Unknown (protein for MGC:76128) [Silurana
  misc_feature (1)..(264): Homolog of NCBI NO: 18250284 NR Description: isocitrate dehydrogenase 3 (NAD+) alpha; sequence AI316514 [Mus musculus] >gi|12845252|dbj|BAB26679.1| protein product [Mus musculus] >gi|26328565|dbj|BAC28021.1|
MATPIGKGHRSLNLTLRKELGLYANVRPCNSLPGYKTRYDDVNLVTIRENTEGEYSGLEHQVVRGVVESLKIITRQASLRVAEYAFHYAKANGRERVSAIHKANIMRKTDGLFLKCCREVSEKYPEIQYEEVIIDNCCMTLVKNPGLFDVLVMPNLYGDIISDLCAGLIGGLGLTPSCNIGEGGICLAEAVHGSAPDIAGKNLANPTALMLSAVMLLRHMQFNDKADRIHNAILQTIAEGKYRTADLGGKASTSEFTNAVCDHI

SEQ ID NO: 5454 - DNA, 1962 bp, Zea mays subsp. mays
  misc_feature (1)..(1962): Ceres Seq. ID no. 12407748
  misc_feature: MA Experiment ID: 108527 Result: Up-regulated in Transcription
  misc_feature: MA Experiment 108527 PARAMETER Experiment Name: Zm_5mM_NO_P Parameter: Age (day) Value: 8
  misc_feature: MA Experiment 108527 PARAMETER Experiment Name: Zm_5mM_NO_P Parameter: Organism Value: Zea mays
  misc_feature: MA Experiment 108527 PARAMETER Experiment Name: Zm_5mM_NO_P Parameter: Plant Line Value: 35A19
  misc_feature: MA Experiment 108527 PARAMETER Experiment Name: Zm_5mM_NO_P Parameter: Timepoint (hr) Value: 6
  misc_feature: MA Experiment 108527 PARAMETER Experiment Name: Zm_5mM_NO_P Parameter: Tissue Value: Aerial
  misc_feature: MA Experiment 108527 PARAMETER Experiment Name: Zm_5mM_NO_P Parameter: Treatment Value: 5mM NO vs. No Treatment
  misc_feature: MA Experiment ID: 108535 Result: Down-regulated in Transcription
  misc_feature: MA Experiment 108535 PARAMETER Experiment Name: Zm_Meristem_P Parameter: Age (day) Value: 8
  misc_feature: MA Experiment 108535 PARAMETER Experiment Name: Zm_Meristem_P Parameter: Organism Value: Zea mays
  misc_feature: MA Experiment 108535 PARAMETER Experiment Name: Zm_Meristem_P Parameter: Plant Line Value: 35A19
  misc_feature: MA Experiment 108535 PARAMETER Experiment Name: Zm_Meristem_P Parameter: Tissue Value: Root Meristem vs. Above Root Meristem
  misc_feature: MA Experiment ID: 108536 Result: Up-regulated in Transcription
  misc_feature: MA Experiment 108536 PARAMETER Experiment Name: Zm_Meristem_P Parameter: Age (day) Value: 8
  misc_feature: MA Experiment 108536 PARAMETER Experiment Name: Zm_Meristem_P Parameter: Organism Value: Zea mays
  misc_feature: MA Experiment 108536 PARAMETER Experiment Name: Zm_Meristem_P Parameter: Plant Line Value: 35A19
  misc_feature: MA Experiment 108536 PARAMETER Experiment Name: Zm_Meristem_P Parameter: Tissue Value: Shoot Meristem vs. Above Shoot Meristem
  misc_feature: MA Experiment ID: 108543 Result: Down-regulated in Transcription
  misc_feature: MA Experiment ID: 20000479 Result: Up-regulated in Transcription
  misc_feature: MA Experiment 20000479 PARAMETER Experiment Name: Zm_Drought_P Parameter: Age (day) Value: 10
  misc_feature: MA Experiment 20000479 PARAMETER Experiment Name: Zm_Drought_P Parameter: Organism Value: Zea mays
  misc_feature: MA Experiment 20000479 PARAMETER Experiment Name: Zm_Drought_P Parameter: Plant Line Value: 35A19
  misc_feature: MA Experiment 20000479 PARAMETER Experiment Name: Zm_Drought_P Parameter: Timepoint (hr) Value: 48
  misc_feature: MA Experiment 20000479 PARAMETER Experiment Name: Zm_Drought_P Parameter: Tissue Value: Aerial
  misc_feature: MA Experiment 20000479 PARAMETER Experiment Name: Zm_Drought_P Parameter: Treatment Value: Drought vs. No Drought
  misc_feature: MA Experiment ID: 20000492 Result: Down-regulated in Transcription
  misc_feature: MA Experiment 20000492 PARAMETER Experiment Name: Zm_Hybrid_Seed_Dev_P Parameter: DAP Value: 12
  misc_feature: MA Experiment 20000492 PARAMETER Experiment Name: Zm_Hybrid_Seed_Dev_P Parameter: Organism Value: Zea mays
  misc_feature: MA Experiment 20000492 PARAMETER Experiment Name: Zm_Hybrid_Seed_Dev_P Parameter: Plant Line Value: 35A19
  misc_feature: MA Experiment 20000492 PARAMETER Experiment Name: Zm_Hybrid_Seed_Dev_P Parameter: Tissue Value: Fert Kernel vs. Unfert Floret
  misc_feature: MA Experiment ID: 20000535 Result: Down-regulated in Transcription
  misc_feature: MA Experiment 20000535 PARAMETER Experiment Name: Zm_Hybrid_Seed_Dev_P Parameter: DAP Value: 30 vs. 12
  misc_feature: MA Experiment 20000535 PARAMETER Experiment Name: Zm_Hybrid_Seed_Dev_P Parameter: Organism Value: Zea mays
  misc_feature: MA Experiment 20000535 PARAMETER Experiment Name: Zm_Hybrid_Seed_Dev_P Parameter: Plant Line Value: 35A19
  misc_feature: MA Experiment 20000535 PARAMETER Experiment Name: Zm_Hybrid_Seed_Dev_P Parameter: Tissue Value: Embryo vs. Unfert Floret
gtacacacgagcgccccgcggaaagggtagcaaacggcccggacagtgagccgcgcacctttcacacttgacttgatgggttgctggcgctcgtcgctgcgctcagggccccacgcggcggagaagccgccccgccaccgccaccgcccgccaccgccaccgacgaacggccccacctcctccctgaacgcgcagcaggccgcgcccccggcccgcgcctccggggaagtaccggcgctcgccgagttctcgctggcggagctccgcgcggccacggccgggttcgcgccggggaacatcgtctccgagagcggtgagaaggcgcccaacctcgtctacagaggccagctcaggggccccggcggtgccccgccgcgcgcagttgccgtgaagaagttcgccaagctcgcgtggcccgaccccaagcagttcgcggaggaggcgaagggggtcggaggcctgcggcaccggagcatggcgaaccttatcggttattgctgcgacggcgacgatcgcctgctcgtcgccgagttcatgcccaacgacaccctcgccaagcaccttttccactgggaaaaccagactattgagtgggctatgcgtctgagagttgcatactacatttcccaagcattggaatactgtagtaccaaggggtggcctttatatcatgacctaaatgcatacagggtcctctttgatgagaatggtgaccctcggctgtcatgctttggtctgatgaaaaacagcagggatggaaaaagctatagcacgaacctagcatatacacctccagaatatctgagaaatggcagggttactccagaaagtgtcattttcagttttggcactgtacttcttgaccttctcagtgggaaacgcataccgccttcacatgcgcttgatatcatgagaggcagaaacatccaagcagttatggattcacatttggaggggaactactcaattgaggtggctactacattggtgaatcttgcttctcagtgtctacaatatgagccaagagatcgtcctggcataaaaaagttggtttccattctggagcctttgcagaaaaaaatagaggtaccgtcctatgtgatgcttggatttgcaaagccagtggaagaaccacaggcacctcctactccacagcgccctctttctcccatgggagatgcttgttccagaatggaccttactgccatctatcagatcctattcacaacgcattaccgagatgatgaagggagcaatgagctgtcttttcaagaatggacacagcagatgagggatatgctggatgcaaggaaacgtggcgactctgccttcaaagacaaagattttaaggcagcaatcgattgctatactcagtttgtcgatgtggggataatggtgtcaccgactgtattcgccagacgaagcttgtgctaccttatgtgtgaccaacctgatgcggccctccgtgatgcaatgcaagcgcagatcgtctaccctgattggccaacagcattctacatgcaggcagttgcactatccaagctaaacatgcagagtgacgccgtggacatgctgaacgaggcatcacagctagaagagaagaggcaaaagagcacaagagttccttgaatggcattgtcagctcagagaagtggcacgtcttctatacatataacatagatcgcacactatgtagtacagtagtatattctccaaccttttccaccctgtaaaaagcgcatagtatattgcgtggtctagaattagaagtaagaagtgaactgcagagaagatgctctttgctccctgtactctggagccctgtgatggcacttgtgtgataggttcttcatttttttgggcccatgtatataacatctgttgcatgggagtttagagtataggttgccggttgttcaggagggccctgtcgccgaagataataaacatgttatgtttgtg

SEQ ID NO: 5455 - protein, 517 aa, Zea mays subsp. mays
  peptide (1)..(517): Ceres Seq. ID no. 12407749
  misc_feature (1)..(517): Homolog of NCBI NO: 37536550 NR Description: protein kinase-like protein [Oryza sativa
  misc_feature (1)..(515): Homolog of NCBI NO: 18418600 NR Description: putative protein; protein id: At4g35230.1, by cDNA: gi_16612248 [Arabidopsis thaliana] AT4g35230/F23E12_210 [Arabidopsis thaliana]
  misc_feature (1)..(515): Homolog of NCBI NO: 7486022 NR Description: hypothetical protein F23E12.210 - Arabidopsis >gi|3080427|emb|CAA18746.1| putative protein [Arabidopsis >gi|7270475|emb|CAB80240.1| putative protein [Arabidopsis
  misc_feature (1)..(515): Homolog of NCBI NO: 37537032 NR Description: putative protein kinase [Oryza sativa (japonica group)] >gi|19225015|gb|AAL86491.1| putative protein kinase
  misc_feature (41)..(513): Homolog of NCBI NO: 22327962 NR Description: protein kinase - like; protein id: At5g59010.1, by cDNA: gi_19715585 [Arabidopsis thaliana]
  misc_feature (43)..(510): Homolog of NCBI NO: 15232406 NR Description: protein kinase -like protein; protein id: supported by cDNA: 150889., supported by cDNA: gi_15450845
  misc_feature (43)..(510): Homolog of NCBI NO: 21553556 NR Description: protein kinase-like protein [Arabidopsis thaliana]
  misc_feature (49)..(510): Homolog of NCBI NO: 15237604 NR Description: protein kinase-like; protein id: At5g41260.1
  misc_feature (29)..(515): Homolog of NCBI NO: 15237465 NR Description: protein kinase-like protein; protein id:
  misc_feature (29)..(515): Homolog of NCBI NO: 28393210 NR Description: putative protein kinase [Arabidopsis thaliana]
MGCWRSSLRSGPHAAEKPPRHRHRPPPPPTNGPTSSLNAQQAAPPARASGEVPALAEFSLAELRAATAGFAPGNIVSESGEKAPNLVYRGQLRGPGGAPPRAVAVKKFAKLAWPDPKQFAEEAKGVGGLRHRSMANLIGYCCDGDDRLLVAEFMPNDTLAKHLFHWENQTIEWAMRLRVAYYISQALEYCSTKGWPLYHDLNAYRVLFDENGDPRLSCFGLMKNSRDGKSYSTNLAYTPPEYLRNGRVTPESVIFSFGTVLLDLLSGKRIPPSHALDIMRGRNIQAVMDSHLEGNYSIEVATTLVNLASQCLQYEPRDRPGIKKLVSILEPLQKKIEVPSYVMLGFAKPVEEPQAPPTPQRPLSPMGDACSRMDLTAIYQILFTTHYRDDEGSNELSFQEWTQQMRDMLDARKRGDSAFKDKDFKAAIDCYTQFVDVGIMVSPTVFARRSLCYLMCDQPDAALRDAMQAQIVYPDWPTAFYMQAVALSKLNMQSDAVDMLNEASQLEEKRQKSTRVP

SEQ ID NO: 5456 - protein, 384 aa, Zea mays subsp. mays
  peptide (1)..(384): Ceres Seq. ID no. 12407750
  misc_feature (1)..(384): Homolog of NCBI NO: 37536550 NR Description: protein kinase-like protein [Oryza sativa
  misc_feature (1)..(382): Homolog of NCBI NO: 18418600 NR Description: putative protein; protein id: At4g35230.1, by cDNA: gi_16612248 [Arabidopsis thaliana] AT4g35230/F23E12_210 [Arabidopsis thaliana]
  misc_feature (1)..(382): Homolog of NCBI NO: 7486022 NR Description: hypothetical protein F23E12.210 - Arabidopsis >gi|3080427|emb|CAA18746.1| putative protein [Arabidopsis >gi|7270475|emb|CAB80240.1| putative protein [Arabidopsis
  misc_feature (1)..(382): Homolog of NCBI NO: 37537032 NR Description: putative protein kinase [Oryza sativa (japonica group)] >gi|19225015|gb|AAL86491.1| putative protein kinase
  misc_feature (1)..(380): Homolog of NCBI NO: 22327962 NR Description: protein kinase - like; protein id: At5g59010.1, by cDNA: gi_19715585 [Arabidopsis thaliana]
  misc_feature (1)..(377): Homolog of NCBI NO: 15232406 NR Description: protein kinase -like protein; protein id: supported by cDNA: 150889., supported by cDNA: gi_15450845
  misc_feature (1)..(377): Homolog of NCBI NO: 21553556 NR Description: protein kinase-like protein [Arabidopsis thaliana]
  misc_feature (1)..(377): Homolog of NCBI NO: 15237604 NR Description: protein kinase-like; protein id: At5g41260.1
  misc_feature (1)..(382): Homolog of NCBI NO: 15237465 NR Description: protein kinase-like protein; protein id:
  misc_feature (1)..(382): Homolog of NCBI NO: 28393210 NR Description: putative protein kinase [Arabidopsis thaliana]
MANLIGYCCDGDDRLLVAEFMPNDTLAKHLFHWENQTIEWAMRLRVAYYISQALEYCSTKGWPLYHDLNAYRVLFDENGDPRLSCFGLMKNSRDGKSYSTNLAYTPPEYLRNGRVTPESVIFSFGTVLLDLLSGKRIPPSHALDIMRGRNIQAVMDSHLEGNYSIEVATTLVNLASQCLQYEPRDRPGIKKLVSILEPLQKKIEVPSYVMLGFAKPVEEPQAPPTPQRPLSPMGDACSRMDLTAIYQILFTTHYRDDEGSNELSFQEWTQQMRDMLDARKRGDSAFKDKDFKAAIDCYTQFVDVGIMVSPTVFARRSLCYLMCDQPDAALRDAMQAQIVYPDWPTAFYMQAVALSKLNMQSDAVDMLNEASQLEEKRQKSTRVP

SEQ ID NO: 5457 - protein, 364 aa, Zea mays subsp. mays
  peptide (1)..(364): Ceres Seq. ID no. 12407751
  misc_feature (1)..(364): Homolog of NCBI NO: 37536550 NR Description: protein kinase-like protein [Oryza sativa
  misc_feature (1)..(362): Homolog of NCBI NO: 18418600 NR Description: putative protein; protein id: At4g35230.1, by cDNA: gi_16612248 [Arabidopsis thaliana] AT4g35230/F23E12_210 [Arabidopsis thaliana]
  misc_feature (1)..(362): Homolog of NCBI NO: 7486022 NR Description: hypothetical protein F23E12.210 - Arabidopsis >gi|3080427|emb|CAA18746.1| putative protein [Arabidopsis >gi|7270475|emb|CAB80240.1| putative protein [Arabidopsis
  misc_feature (1)..(362): Homolog of NCBI NO: 37537032 NR Description: putative protein kinase [Oryza sativa (japonica group)] >gi|19225015|gb|AAL86491.1| putative protein kinase
  misc_feature (1)..(360): Homolog of NCBI NO: 22327962 NR Description: protein kinase - like; protein id: At5g59010.1, by cDNA: gi_19715585 [Arabidopsis thaliana]
  misc_feature (1)..(357): Homolog of NCBI NO: 15232406 NR Description: protein kinase -like protein; protein id: supported by cDNA: 150889., supported by cDNA: gi_15450845
  misc_feature (1)..(357): Homolog of NCBI NO: 21553556 NR Description: protein kinase-like protein [Arabidopsis thaliana]
  misc_feature (1)..(357): Homolog of NCBI NO: 15237604 NR Description: protein kinase-like; protein id: At5g41260.1
  misc_feature (1)..(362): Homolog of NCBI NO: 15237465 NR Description: protein kinase-like protein; protein id:
  misc_feature (1)..(362): Homolog of NCBI NO: 28393210 NR Description: putative protein kinase [Arabidopsis thaliana]
MPNDTLAKHLFHWENQTIEWAMRLRVAYYISQALEYCSTKGWPLYHDLNAYRVLFDENGDPRLSCFGLMKNSRDGKSYSTNLAYTPPEYLRNGRVTPESVIFSFGTVLLDLLSGKRIPPSHALDIMRGRNIQAVMDSHLEGNYSIEVATTLVNLASQCLQYEPRDRPGIKKLVSILEPLQKKIEVPSYVMLGFAKPVEEPQAPPTPQRPLSPMGDACSRMDLTAIYQILFTTHYRDDEGSNELSFQEWTQQMRDMLDARKRGDSAFKDKDFKAAIDCYTQFVDVGIMVSPTVFARRSLCYLMCDQPDAALRDAMQAQIVYPDWPTAFYMQAVALSKLNMQSDAVDMLNEASQLEEKRQKSTRVP

SEQ ID NO: 5458 - DNA, 1407 bp, Zea mays subsp. mays
  misc_feature (1)..(1407): Ceres Seq. ID no. 12358313
  misc_feature: MA Experiment ID: 108515 Result: Up-regulated in Transcription
  misc_feature: MA Experiment 108515 PARAMETER Experiment Name: Zm_2mM_SA_P Parameter: Age (day) Value: 8
  misc_feature: MA Experiment 108515 PARAMETER Experiment Name: Zm_2mM_SA_P Parameter: Organism Value: Zea mays
  misc_feature: MA Experiment 108515 PARAMETER Experiment Name: Zm_2mM_SA_P Parameter: Plant Line Value: 35A19
  misc_feature: MA Experiment 108515 PARAMETER Experiment Name: Zm_2mM_SA_P Parameter: Timepoint (hr) Value: 12
  misc_feature: MA Experiment 108515 PARAMETER Experiment Name: Zm_2mM_SA_P Parameter: Tissue Value: Aerial
  misc_feature: MA Experiment 108515 PARAMETER Experiment Name: Zm_2mM_SA_P Parameter: Treatment Value: 2mM SA vs. No Treatment
  misc_feature: MA Experiment ID: 108527 Result: Up-regulated in Transcription
  misc_feature: MA Experiment 108527 PARAMETER Experiment Name: Zm_5mM_NO_P Parameter: Age (day) Value: 8
  misc_feature: MA Experiment 108527 PARAMETER Experiment Name: Zm_5mM_NO_P Parameter: Organism Value: Zea mays
  misc_feature: MA Experiment 108527 PARAMETER Experiment Name: Zm_5mM_NO_P Parameter: Plant Line Value: 35A19
  misc_feature: MA Experiment 108527 PARAMETER Experiment Name: Zm_5mM_NO_P Parameter: Timepoint (hr) Value: 6
  misc_feature: MA Experiment 108527 PARAMETER Experiment Name: Zm_5mM_NO_P Parameter: Tissue Value: Aerial
  misc_feature: MA Experiment 108527 PARAMETER Experiment Name: Zm_5mM_NO_P Parameter: Treatment Value: 5mM NO vs. No Treatment
  misc_feature: MA Experiment ID: 108528 Result: Down-regulated in Transcription
  misc_feature: MA Experiment 108528 PARAMETER Experiment Name: Zm_Imbibed_Seeds_P Parameter: Age (day) Value: 5 vs. 2
  misc_feature: MA Experiment 108528 PARAMETER Experiment Name: Zm_Imbibed_Seeds_P Parameter: Organism Value: Zea mays
  misc_feature: MA Experiment 108528 PARAMETER Experiment Name: Zm_Imbibed_Seeds_P Parameter: Plant Line Value: 35A19
  misc_feature: MA Experiment 108528 PARAMETER Experiment Name: Zm_Imbibed_Seeds_P Parameter: Tissue Value: Aerial vs. Embryo
  misc_feature: MA Experiment ID: 108529 Result: Up-regulated in Transcription
  misc_feature: MA Experiment 108529 PARAMETER Experiment Name: Zm_Imbibed_Seeds_P Parameter: Age (day) Value: 5 vs. 2
  misc_feature: MA Experiment 108529 PARAMETER Experiment Name: Zm_Imbibed_Seeds_P Parameter: Organism Value: Zea mays
  misc_feature: MA Experiment 108529 PARAMETER Experiment Name: Zm_Imbibed_Seeds_P Parameter: Plant Line Value: 35A19
  misc_feature: MA Experiment 108529 PARAMETER Experiment Name: Zm_Imbibed_Seeds_P Parameter: Tissue Value: Roots vs. Embryo
  misc_feature: MA Experiment ID: 108530 Result: Down-regulated in Transcription
  misc_feature: MA Experiment 108530 PARAMETER Experiment Name: Zm_Imbibed_Seeds_P Parameter: Age (day) Value: 6 vs. 2
  misc_feature: MA Experiment 108530 PARAMETER Experiment Name: Zm_Imbibed_Seeds_P Parameter: Organism Value: Zea mays
  misc_feature: MA Experiment 108530 PARAMETER Experiment Name: Zm_Imbibed_Seeds_P Parameter: Plant Line Value: 35A19
  misc_feature: MA Experiment 108530 PARAMETER Experiment Name: Zm_Imbibed_Seeds_P Parameter: Tissue Value: Aerial vs. Embryo
  misc_feature: MA Experiment ID: 108536 Result: Down-regulated in Transcription
  misc_feature: MA Experiment 108536 PARAMETER Experiment Name: Zm_Meristem_P Parameter: Age (day) Value: 8
  misc_feature: MA Experiment 108536 PARAMETER Experiment Name: Zm_Meristem_P Parameter: Organism Value: Zea mays
  misc_feature: MA Experiment 108536 PARAMETER Experiment Name: Zm_Meristem_P Parameter: Plant Line Value: 35A19
  misc_feature: MA Experiment 108536 PARAMETER Experiment Name: Zm_Meristem_P Parameter: Tissue Value: Shoot Meristem vs. Above Shoot Meristem
  misc_feature: MA Experiment ID: 108545 Result: Down-regulated in Transcription
  misc_feature: MA Experiment 108545 PARAMETER Experiment Name: Zm_Imbibed_Seeds_P Parameter: Age (day) Value: 3 vs. 2
  misc_feature: MA Experiment 108545 PARAMETER Experiment Name: Zm_Imbibed_Seeds_P Parameter: Organism Value: Zea mays
  misc_feature: MA Experiment 108545 PARAMETER Experiment Name: Zm_Imbibed_Seeds_P Parameter: Plant Line Value: 35A19
  misc_feature: MA Experiment 108545 PARAMETER Experiment Name: Zm_Imbibed_Seeds_P Parameter: Tissue Value: Aerial vs. Embryo
  misc_feature: MA Experiment ID: 108547 Result: Down-regulated in Transcription
  misc_feature: MA Experiment 108547 PARAMETER Experiment Name: Zm_Imbibed_Seeds_P Parameter: Age (day) Value: 4 vs. 2
  misc_feature: MA Experiment 108547 PARAMETER Experiment Name: Zm_Imbibed_Seeds_P Parameter: Organism Value: Zea mays
  misc_feature: MA Experiment 108547 PARAMETER Experiment Name: Zm_Imbibed_Seeds_P Parameter: Plant Line Value: 35A19
  misc_feature: MA Experiment 108547 PARAMETER Experiment Name: Zm_Imbibed_Seeds_P Parameter: Tissue Value: Aerial vs. Embryo
  misc_feature: MA Experiment ID: 108556 Result: Down-regulated in Transcription
  misc_feature: MA Experiment 108556 PARAMETER Experiment Name: Zm_Drought_P Parameter: Age (day) Value: 9
  misc_feature: MA Experiment 108556 PARAMETER Experiment Name: Zm_Drought_P Parameter: Organism Value: Zea mays
  misc_feature: MA Experiment 108556 PARAMETER Experiment Name: Zm_Drought_P Parameter: Plant Line Value: 35A19
  misc_feature: MA Experiment 108556 PARAMETER Experiment Name: Zm_Drought_P Parameter: Timepoint (hr) Value: 24
  misc_feature: MA Experiment 108556 PARAMETER Experiment Name: Zm_Drought_P Parameter: Tissue Value: Aerial
  misc_feature: MA Experiment 108556 PARAMETER Experiment Name: Zm_Drought_P Parameter: Treatment Value: Drought vs. No Drought
  misc_feature: MA Experiment ID: 108559 Result: Up-regulated in Transcription
  misc_feature: MA Experiment 108559 PARAMETER Experiment Name: Zm_5mM_NO_P Parameter: Age (day) Value: 8
  misc_feature: MA Experiment 108559 PARAMETER Experiment Name: Zm_5mM_NO_P Parameter: Organism Value: Zea mays
  misc_feature: MA Experiment 108559 PARAMETER Experiment Name: Zm_5mM_NO_P Parameter: Plant Line Value: 35A19
  misc_feature: MA Experiment 108559 PARAMETER Experiment Name: Zm_5mM_NO_P Parameter: Timepoint (hr) Value: 12
  misc_feature: MA Experiment 108559 PARAMETER Experiment Name: Zm_5mM_NO_P Parameter: Tissue Value: Aerial
  misc_feature: MA Experiment 108559 PARAMETER Experiment Name: Zm_5mM_NO_P Parameter: Treatment Value: 5mM NO vs. No Treatment
  misc_feature: MA Experiment ID: 20000477 Result: Up-regulated in Transcription
  misc_feature: MA Experiment 20000477 PARAMETER Experiment Name: Zm_5mM_SA_P Parameter: Age (day) Value: 10
  misc_feature: MA Experiment 20000477 PARAMETER Experiment Name: Zm_5mM_SA_P Parameter: Organism Value: Zea mays
  misc_feature: MA Experiment 20000477 PARAMETER Experiment Name: Zm_5mM_SA_P Parameter: Plant Line Value: 35A19
  misc_feature: MA Experiment 20000477 PARAMETER Experiment Name: Zm_5mM_SA_P Parameter: Timepoint (hr) Value: 48
  misc_feature: MA Experiment 20000477 PARAMETER Experiment Name: Zm_5mM_SA_P Parameter: Tissue Value: Aerial
  misc_feature: MA Experiment 20000477 PARAMETER Experiment Name: Zm_5mM_SA_P Parameter: Treatment Value: 5mM SA vs. No Treatment
  misc_feature: MA Experiment ID: 20000532 Result: Up-regulated in Transcription
  misc_feature: MA Experiment 20000532 PARAMETER Experiment Name: Zm_0.001percent_MeJA_P Parameter: Age (day) Value: 10
  misc_feature: MA Experiment 20000532 PARAMETER Experiment Name: Zm_0.001percent_MeJA_P Parameter: Organism Value: Zea mays
  misc_feature: MA Experiment 20000532 PARAMETER Experiment Name: Zm_0.001percent_MeJA_P Parameter: Plant Line Value: 35A19
  misc_feature: MA Experiment 20000532 PARAMETER Experiment Name: Zm_0.001percent_MeJA_P Parameter: Timepoint (hr) Value: 48
  misc_feature: MA Experiment 20000532 PARAMETER Experiment Name: Zm_0.001percent_MeJA_P Parameter: Tissue Value: Aerial
  misc_feature: MA Experiment 20000532 PARAMETER Experiment Name: Zm_0.001percent_MeJA_P Parameter: Treatment Value: 0.001percent MeJA vs. No Treatment
  misc_feature: MA Experiment ID: 20000533 Result: Up-regulated in Transcription
  misc_feature: MA Experiment 20000533 PARAMETER Experiment Name: Zm_0.001percent_MeJA_P Parameter: Age (day) Value: 11
  misc_feature: MA Experiment 20000533 PARAMETER Experiment Name: Zm_0.001percent_MeJA_P Parameter: Organism Value: Zea mays
  misc_feature: MA Experiment 20000533 PARAMETER Experiment Name: Zm_0.001percent_MeJA_P Parameter: Plant Line Value: 35A19
  misc_feature: MA Experiment 20000533 PARAMETER Experiment Name: Zm_0.001percent_MeJA_P Parameter: Timepoint (hr) Value: 72
  misc_feature: MA Experiment 20000533 PARAMETER Experiment Name: Zm_0.001percent_MeJA_P Parameter: Tissue Value: Aerial
  misc_feature: MA Experiment 20000533 PARAMETER Experiment Name: Zm_0.001percent_MeJA_P Parameter: Treatment Value: 0.001percent MeJA vs. No Treatment
  misc_feature: MA Experiment ID: 20000626 Result: Up-regulated in Transcription
  misc_feature: MA Experiment 20000626 PARAMETER Experiment Name: Zm_Herbicide-Treatments_P Parameter: Timepoint (hr) Value: 12
  misc_feature: MA Experiment 20000626 PARAMETER Experiment Name: Zm_Herbicide-Treatments_P Parameter: Tissue Value: Aerial
  misc_feature: MA Experiment 20000626 PARAMETER Experiment Name: Zm_Herbicide-Treatments_P Parameter: Treatment Value: Roundup vs. No Treatment
gatacaaaacacaaactctcggagacagggaagtagcgtagctagatccagagctcggcgccagagatacccgacatcctcgtcatgtctccggttgcaagcaagggagtagtgatggacggtgcggtggcggtggcggcagtggccgccgccgtgctgctgtgcctccatctgccggcggtggcgcgaggccagctgcaggtggggttctacaacacgagctgccccaacgccgagtccctggtccgccaggcggtggccagcgcgttcgccaacgactccggcatcgccgccggcctcatccgcctccatttccacgactgcttcgtcaggggctgcgatgcgtcggtgctgctgacctccgccaacaacacggcggagcgtgacgcgccgcccaacaacccgagcctccacgggttccaggtgatcgacgcggcgaaggcggcggtggagcagagctgcccgcagacggtgtcgtgcgcggacatcgtggccttcgcggcgcgcgacagcatcaacctcactggcaacctgccgtaccaggtgccctcgggccgccgggacggcaacgtctccctcgacacggaggccaacagcaacctgccggcgccaacgttcaacgcgtcccagctggtggccagcttcgcggccaagaacctcaccgacgaggagatggtcatcctctccggcgcccacaccgtcggccgctccttctgcacatcgtttctcgcgcgcatctacaacggatccaccccgatcgttgactctggcctgagcgccgggtacgccacactgctgcgcgcgctgtgcccgtccaacgccaactcgtccacgcccacgaccacggtgatcgaccccagcacgccggcggtgctggacaacaactactacaagctgctgccgctcaacctgggcctcttcttctccgacaaccagctgcgcgtcaactccacgctcaacgcctccgtcaacagcttcgccgccaacgagacgctctggaaggagaagttcgtcgccgccatgtcaagatgggaaacatccaggtgctcacggggacccagggccagatcaggctcaactgcagcatcgtcaacaacggctcgtcgtcggtggggatccagcagatgacagtgcccaactcctactctggcgccaccgcgtcccttgatgatgagatcgccacgagctgatctagatcggcgcggtgtgatgtgatgatagatatttgcattgtgtgtccatctttaggctattaattagtacgtttgctcccggtacgcgcgagagtgcgtagttcgtgtgtcattcatatgcgcgtacacgagatttccagtatcaccatgcatgtatcccgtgaatcatcatcagtaaataaaactggtgctctttgagagtctattattatcg

SEQ ID NO: 5459 - protein, 347 aa, Zea mays subsp. mays
  peptide (1)..(347): Ceres Seq. ID no. 12358314
  misc_feature (54)..(301): Pfam Name: Peroxidase Pfam Description: Peroxidase
  misc_feature (11)..(313): Homolog of NCBI NO: 34894758 NR Description: putative peroxidase [Oryza sativa (japonica >gi|13366000|dbj|BAB39277.1| putative peroxidase [Oryza sativa
  misc_feature (32)..(313): Homolog of NCBI NO: 34894752 NR Description: putative peroxidase [Oryza sativa (japonica >gi|13365997|dbj|BAB39274.1| putative peroxidase [Oryza sativa
  misc_feature (22)..(313): Homolog of NCBI NO: 34894760 NR Description: putative peroxidase [Oryza sativa (japonica >gi|13366001|dbj|BAB39278.1| putative peroxidase [Oryza sativa
  misc_feature (38)..(313): Homolog of NCBI NO: 12056448 NR Description: peroxidase [Zea mays]
  misc_feature (15)..(323): Homolog of NCBI NO: 34894748 NR Description: putative peroxidase [Oryza sativa (japonica >gi|22535694|dbj|BAC10867.1| putative peroxidase [Oryza sativa
  misc_feature (26)..(313): Homolog of NCBI NO: 34894766 NR Description: putative peroxidase [Oryza sativa (japonica >gi|13366004|dbj|BAB39281.1| putative peroxidase [Oryza sativa
  misc_feature (24)..(313): Homolog of NCBI NO: 12056452 NR Description: peroxidase [Zea mays]
  misc_feature (20)..(313): Homolog of NCBI NO: 7453849 NR Description: peroxidase prx12 precursor [Spinacia oleracea]
  misc_feature (23)..(313): Homolog of NCBI NO: 4760700 NR Description: peroxidase 1 [Scutellaria baicalensis]
  misc_feature (25)..(313): Homolog of NCBI NO: 34902236 NR Description: Putative peroxidase [Oryza sativa (japonica >gi|21426123|gb|AAM52320.1| Putative peroxidase [Oryza sativa
MSPVASKGVVMDGAVAVAAVAAAVLLCLHLPAVARGQLQVGFYNTSCPNAESLVRQAVASAFANDSGIAAGLIRLHFHDCFVRGCDASVLLTSANNTAERDAPPNNPSLHGFQVIDAAKAAVEQSCPQTVSCADIVAFAARDSINLTGNLPYQVPSGRRDGNVSLDTEANSNLPAPTFNASQLVASFAAKNLTDEEMVILSGAHTVGRSFCTSFLARIYNGSTPIVDSGLSAGYATLLRALCPSNANSSTPTTTVIDPSTPAVLDNNYYKLLPLNLGLFFSDNQLRVNSTLNASVNSFAANETLWKEKFVAAMSRWETSRCSRGPRARSGSTAASSTTARRRWGSSR

SEQ ID NO: 5460 - protein, 337 aa, Zea mays subsp. mays
  peptide (1)..(337): Ceres Seq. ID no. 12358315
  misc_feature (44)..(291): Pfam Name: Peroxidase Pfam Description: Peroxidase
  misc_feature (28)..(303): Homolog of NCBI NO: 12056448 NR Description: peroxidase [Zea mays]
  misc_feature (5)..(313): Homolog of NCBI NO: 34894748 NR Description: putative peroxidase [Oryza sativa (japonica >gi|22535694|dbj|BAC10867.1| putative peroxidase [Oryza sativa
  misc_feature (16)..(303): Homolog of NCBI NO: 34894766 NR Description: putative peroxidase [Oryza sativa (japonica >gi|13366004|dbj|BAB39281.1| putative peroxidase [Oryza sativa
  misc_feature (14)..(303): Homolog of NCBI NO: 12056452 NR Description: peroxidase [Zea mays]
  misc_feature (22)..(303): Homolog of NCBI NO: 34894752 NR Description: putative peroxidase [Oryza sativa (japonica >gi|13365997|dbj|BAB39274.1| putative peroxidase [Oryza sativa
  misc_feature (12)..(303): Homolog of NCBI NO: 34894760 NR Description: putative peroxidase [Oryza sativa (japonica >gi|13366001|dbj|BAB39278.1| putative peroxidase [Oryza sativa
  misc_feature (1)..(303): Homolog of NCBI NO: 34894758 NR Description: putative peroxidase [Oryza sativa (japonica >gi|13366000|dbj|BAB39277.1| putative peroxidase [Oryza sativa
  misc_feature (10)..(303): Homolog of NCBI NO: 7453849 NR Description: peroxidase prx12 precursor [Spinacia oleracea]
  misc_feature (13)..(303): Homolog of NCBI NO: 4760700 NR Description: peroxidase 1 [Scutellaria baicalensis]
  misc_feature (15)..(303): Homolog of NCBI NO: 34902236 NR Description: Putative peroxidase [Oryza sativa (japonica >gi|21426123|gb|AAM52320.1| Putative peroxidase [Oryza sativa
MDGAVAVAAVAAAVLLCLHLPAVARGQLQVGFYNTSCPNAESLVRQAVASAFANDSGIAAGLIRLHFHDCFVRGCDASVLLTSANNTAERDAPPNNPSLHGFQVIDAAKAAVEQSCPQTVSCADIVAFAARDSINLTGNLPYQVPSGRRDGNVSLDTEANSNLPAPTFNASQLVASFAAKNLTDEEMVILSGAHTVGRSFCTSFLARIYNGSTPIVDSGLSAGYATLLRALCPSNANSSTPTTTVIDPSTPAVLDNNYYKLLPLNLGLFFSDNQLRVNSTLNASVNSFAANETLWKEKFVAAMSRWETSRCSRGPRARSGSTAASSTTARRRWGSSR

SEQ ID NO: 5461 - DNA, 1547 bp, Zea mays subsp. mays
  misc_feature (1)..(1547): Ceres Seq. ID no. 12409501
  misc_feature: MA Experiment ID: 108559 Result: Up-regulated in Transcription
  misc_feature: MA Experiment 108559 PARAMETER Experiment Name: Zm_5mM_NO_P Parameter: Age (day) Value: 8
  misc_feature: MA Experiment 108559 PARAMETER Experiment Name: Zm_5mM_NO_P Parameter: Organism Value: Zea mays
  misc_feature: MA Experiment 108559 PARAMETER Experiment Name: Zm_5mM_NO_P Parameter: Plant Line Value: 35A19
  misc_feature: MA Experiment 108559 PARAMETER Experiment Name: Zm_5mM_NO_P Parameter: Timepoint (hr) Value: 12
  misc_feature: MA Experiment 108559 PARAMETER Experiment Name: Zm_5mM_NO_P Parameter: Tissue Value: Aerial
  misc_feature: MA Experiment 108559 PARAMETER Experiment Name: Zm_5mM_NO_P Parameter: Treatment Value: 5mM NO vs. No Treatment
gcacaagtcgagggccaccgctccgcatccgcatcttcttccagagcaagtcgagcgcggcggccacaaaacccagtcccatacgcacccgtccgttccgcgcgatcagccgagcgatgtcgtcgtcggcgcccgcaccggccgccatggccgtggacgacgcggaggacgaccagctcgcctccatgtccacggaggagatcatcagggcctcccgtctcctcgacaacgagatccgcgtccacaaggatgagctgcagcgggtcgaacctggagctggagtctatcaaggagaagaccaaggagaaccaggagaagattaagctcaacaagcagctgccgtacctcgtcggcaacatcgtcgagattttggaaatgaaccctgaggatgaggctgaagaagatggtgctaacatcgatctggactcacaaaggaaaggaaaatgtgttgttctgaagacatccaccagacaaaccatattccttcctgtaattgggttagttgaccccgataagctaaagcctggcgatttagttggagttaacaaagacagctacttgatactagatacattgccttcagagtatgactcacgggttaaggcaatggaagtagatgagaaacctactgaggattacaatgacattggcggacttgagaaacagattcaagagcttgtggaagcaatagtgttaccaatgacacacaaggaccgatttcaaaaattgggcattcgtccccccaaaggggttcttttgtatggaccccctgggaccgggaaaacactcatggctcgtgcatgcgctgcacagactaatgcaacatttctgaaattggctggtccacaacttgtccagatgttcattggtgatggagctaagcttgttagagatgcttttcagcttgctaaggagaaagccccgtgcatcatctttattgatgaaattgatgccattggaacaaagcgttttgacagtgaagttagtggcgatagagaagtgcaaaggacaatgttggaattgctgaatcagcttgatggatttagcagcgatgagaggataaaggtgatagctgcaacaaatcgtgctgatattcttgatcctgctctgatgagatctggtcgtctggaccgtaagattgagttccctcatccatcagaggaagcaagagctagaatcctgcagatccactcgaggaaaatgaatgtgaatccagatgtcaactttgaagagttggcgcgttcaaccgatgatttcaatggcgctcagctaaaggctgtttgcgtagaggctggcatgctcgctctacgccgagatgctacagaggttacccacgaggatttcaacgaggggatcatccaagtgcaggcaaagaagaagtccagcttgaattactacgcgtaagggggggaacgcccggtacttggtgatcattcagttgtttgtgacactgccattgtctgggcaggctaacttactatttgtactataagcaagctgttgcttttgtgtcttactccgtatgagagtatcatttatgaaatatt

SEQ ID NO: 5462 - protein, 467 aa, Zea mays subsp. mays
  peptide (1)..(467): Ceres Seq. ID no. 12409502
  misc_feature (250)..(437): Pfam Name: ATPase family associated with various cellular Pfam Description: ATPase family associated with various cellular
  misc_feature (89)..(467): Homolog of NCBI NO: 17297989 NR Description: 26S proteasome regulatory particle triple-A
  misc_feature (89)..(467): Homolog of NCBI NO: 1174613 NR Description: 26S PROTEASE REGULATORY SUBUNIT 6A HOMOLOG
  misc_feature (89)..(467): Homolog of NCBI NO: 1729860 NR Description: 26S PROTEASE REGULATORY SUBUNIT 6A HOMOLOG
  misc_feature (89)..(467): Homolog of NCBI NO: 12697589 NR Description: Tat binding protein like protein [Brassica rapa]
  misc_feature (89)..(467): Homolog of NCBI NO: 3024434 NR Description: 26S PROTEASE REGULATORY SUBUNIT 6A HOMOLOG
  misc_feature (89)..(467): Homolog of NCBI NO: 15230005 NR Description: 26S proteasome AAA-ATPase subunit RPT5a; protein At3g05530.1, supported by cDNA: gi_17065257, supported by cDNA:
  misc_feature (89)..(467): Homolog of NCBI NO: 23197864 NR Description: 26S proteasome AAA-ATPase subunit RPT5a
  misc_feature (89)..(467): Homolog of NCBI NO: 5669047 NR Description: 19S proteasome regulatory complex subunit S6A
  misc_feature (89)..(467): Homolog of NCBI NO: 15217431 NR Description: 26S protease regulatory subunit 6A; protein id: supported by cDNA: gi_15215787, supported by cDNA: gi_15724309 thaliana] >gi|15215788|gb|AAK91439.1| At1g09100/F7G19_2
  misc_feature (89)..(467): Homolog of NCBI NO: 3024431 NR Description: 26S protease regulatory subunit 6A homolog
AQVEGHRSASASSSRASRARRPQNPVPYAPVRSARSAERCRRRRPHRPPWPWTTRRTTSSPPCPRRRSSGPPVSSTTRSASTRMSCSGSNLELESIKEKTKENQEKIKLNKQLPYLVGNIVEILEMNPEDEAEEDGANIDLDSQRKGKCVVLKTSTRQTIFLPVIGLVDPDKLKPGDLVGVNKDSYLILDTLPSEYDSRVKAMEVDEKPTEDYNDIGGLEKQIQELVEAIVLPMTHKDRFQKLGIRPPKGVLLYGPPGTGKTLMARACAAQTNATFLKLAGPQLVQMFIGDGAKLVRDAFQLAKEKAPCIIFIDEIDAIGTKRFDSEVSGDREVQRTMLELLNQLDGFSSDERIKVIAATNRADILDPALMRSGRLDRKIEFPHPSEEARARILQIHSRKMNVNPDVNFEELARSTDDFNGAQLKAVCVEAGMLALRRDATEVTHEDFNEGIIQVQAKKKSSLNYYA

SEQ ID NO: 5463 - protein, 384 aa, Zea mays subsp. mays
  peptide (1)..(384): Ceres Seq. ID no. 12409503
  misc_feature (167)..(354): Pfam Name: ATPase family associated with various cellular Pfam Description: ATPase family associated with various cellular
  misc_feature (6)..(384): Homolog of NCBI NO: 17297989 NR Description: 26S proteasome regulatory particle triple-A
  misc_feature (6)..(384): Homolog of NCBI NO: 1174613 NR Description: 26S PROTEASE REGULATORY SUBUNIT 6A HOMOLOG
  misc_feature (6)..(384): Homolog of NCBI NO: 1729860 NR Description: 26S PROTEASE REGULATORY SUBUNIT 6A HOMOLOG
  misc_feature (6)..(384): Homolog of NCBI NO: 12697589 NR Description: Tat binding protein like protein [Brassica rapa]
  misc_feature (6)..(384): Homolog of NCBI NO: 3024434 NR Description: 26S PROTEASE REGULATORY SUBUNIT 6A HOMOLOG
  misc_feature (6)..(384): Homolog of NCBI NO: 15230005 NR Description: 26S proteasome AAA-ATPase subunit RPT5a; protein At3g05530.1, supported by cDNA: gi_17065257, supported by cDNA:
  misc_feature (6)..(384): Homolog of NCBI NO: 23197864 NR Description: 26S proteasome AAA-ATPase subunit RPT5a
  misc_feature (6)..(384): Homolog of NCBI NO: 5669047 NR Description: 19S proteasome regulatory complex subunit S6A
  misc_feature (6)..(384): Homolog of NCBI NO: 15217431 NR Description: 26S protease regulatory subunit 6A; protein id: supported by cDNA: gi_15215787, supported by cDNA: gi_15724309 thaliana] >gi|15215788|gb|AAK91439.1| At1g09100/F7G19_2
  misc_feature (6)..(384): Homolog of NCBI NO: 3024431 NR Description: 26S protease regulatory subunit 6A homolog
MSCSGSNLELESIKEKTKENQEKIKLNKQLPYLVGNIVEILEMNPEDEAEEDGANIDLDSQRKGKCVVLKTSTRQTIFLPVIGLVDPDKLKPGDLVGVNKDSYLILDTLPSEYDSRVKAMEVDEKPTEDYNDIGGLEKQIQELVEAIVLPMTHKDRFQKLGIRPPKGVLLYGPPGTGKTLMARACAAQTNATFLKLAGPQLVQMFIGDGAKLVRDAFQLAKEKAPCIIFIDEIDAIGTKRFDSEVSGDREVQRTMLELLNQLDGFSSDERIKVIAATNRADILDPALMRSGRLDRKIEFPHPSEEARARILQIHSRKMNVNPDVNFEELARSTDDFNGAQLKAVCVEAGMLALRRDATEVTHEDFNEGIIQVQAKKKSSLNYYA

SEQ ID NO: 5464 - protein, 342 aa, Zea mays subsp. mays
  peptide (1)..(342): Ceres Seq. ID no. 12409504
  misc_feature (125)..(312): Pfam Name: ATPase family associated with various cellular Pfam Description: ATPase family associated with various cellular
  misc_feature (1)..(342): Homolog of NCBI NO: 17297989 NR Description: 26S proteasome regulatory particle triple-A
  misc_feature (1)..(342): Homolog of NCBI NO: 1174613 NR Description: 26S PROTEASE REGULATORY SUBUNIT 6A HOMOLOG
  misc_feature (1)..(342): Homolog of NCBI NO: 1729860 NR Description: 26S PROTEASE REGULATORY SUBUNIT 6A HOMOLOG
  misc_feature (1)..(342): Homolog of NCBI NO: 12697589 NR Description: Tat binding protein like protein [Brassica rapa]
  misc_feature (1)..(342): Homolog of NCBI NO: 3024434 NR Description: 26S PROTEASE REGULATORY SUBUNIT 6A HOMOLOG
  misc_feature (1)..(342): Homolog of NCBI NO: 15230005 NR Description: 26S proteasome AAA-ATPase subunit RPT5a; protein At3g05530.1, supported by cDNA: gi_17065257, supported by cDNA:
  misc_feature (1)..(342): Homolog of NCBI NO: 23197864 NR Description: 26S proteasome AAA-ATPase subunit RPT5a
  misc_feature (1)..(342): Homolog of NCBI NO: 5669047 NR Description: 19S proteasome regulatory complex subunit S6A
  misc_feature (1)..(342): Homolog of NCBI NO: 15217431 NR Description: 26S protease regulatory subunit 6A; protein id: supported by cDNA: gi_15215787, supported by cDNA: gi_15724309 thaliana] >gi|15215788|gb|AAK91439.1| At1g09100/F7G19_2
  misc_feature (1)..(342): Homolog of NCBI NO: 3024431 NR Description: 26S protease regulatory subunit 6A homolog
MNPEDEAEEDGANIDLDSQRKGKCVVLKTSTRQTIFLPVIGLVDPDKLKPGDLVGVNKDSYLILDTLPSEYDSRVKAMEVDEKPTEDYNDIGGLEKQIQELVEAIVLPMTHKDRFQKLGIRPPKGVLLYGPPGTGKTLMARACAAQTNATFLKLAGPQLVQMFIGDGAKLVRDAFQLAKEKAPCIIFIDEIDAIGTKRFDSEVSGDREVQRTMLELLNQLDGFSSDERIKVIAATNRADILDPALMRSGRLDRKIEFPHPSEEARARILQIHSRKMNVNPDVNFEELARSTDDFNGAQLKAVCVEAGMLALRRDATEVTHEDFNEGIIQVQAKKKSSLNYYA

SEQ ID NO: 5465 - DNA, 1140 bp, Zea mays subsp. mays
  misc_feature (1)..(1140): Ceres Seq. ID no. 12353784
  misc_feature: MA Experiment ID: 108527 Result: Up-regulated in Transcription
  misc_feature: MA Experiment 108527 PARAMETER Experiment Name: Zm_5mM_NO_P Parameter: Age (day) Value: 8
  misc_feature: MA Experiment 108527 PARAMETER Experiment Name: Zm_5mM_NO_P Parameter: Organism Value: Zea mays
  misc_feature: MA Experiment 108527 PARAMETER Experiment Name: Zm_5mM_NO_P Parameter: Plant Line Value: 35A19
  misc_feature: MA Experiment 108527 PARAMETER Experiment Name: Zm_5mM_NO_P Parameter: Timepoint (hr) Value: 6
  misc_feature: MA Experiment 108527 PARAMETER Experiment Name: Zm_5mM_NO_P Parameter: Tissue Value: Aerial
  misc_feature: MA Experiment 108527 PARAMETER Experiment Name: Zm_5mM_NO_P Parameter: Treatment Value: 5mM NO vs. No Treatment
atcctgtccccctcccacctttcccttccccgccgctctcgcttcgcttgcccgcacaccgagatttcctgcccgctcgttccgctgctctcatcgactcctcctgcgtgcctgccgaccggtccgaggcacgccgcggcggaggctctgccggccgggtcgtcggattcggccttaggttggttggttgggttgggtcgcatgtccacggcggtggcgcggccggcgcacggcggattccggcggtcggggagcgggaagccggatccggacgaggcggacaggatgacgcggagcgccaacgggtacttggtccaagaagaggaggaggaagagcatggcgaagaggcggcggcgaggagagaggatgaggacgaggaagaggaagaggaggaggcggaggcggtgtcggaggcctcgtcgatcggggcggcgtcgtccgacagctcctcctccatcggggagaactccgcgtccgacaaggaggaggaggaggaggaggttgagagtaaggcgcaggggcttggcatgatggggctggccacgctcgaatccttggatgatgccctgccctccaagcggggcctgtccagcttctacgcgggcaagtccaagtcgttcacgagcctggcggaggccgcggcggcggcggccgccagggagatcgccaagccggagaacccgttcaacaagcggcggcgcgtgctgcaggcgtggtcgcggcggcgggcgtcgtgcagcgcgctggccgccgcgtacctgccgccgctgctggccccggaccacgccgtggtggaggaggacgacgaggagggcgcggacgacgaggaggaggaggacgaggatgaggagcatggtggtggcggcggcgggctcaggggcacgaggaagccgcccacgttcccgtccccgcggctgagcgtgcacgtcgccgccgccggccagatggcgcggaacgggtcgtttcggtccccgaggtccttctccatgacggatctccacagcgccgccggctacgagtagccccggcgggcgggcggacaggattagagagtgctgatgtgttctaggtgcttttgttttactggtgatgtcgccattggtgctgccattaattactgctatatgatcatcattatg

SEQ ID NO: 5466 - protein, 340 aa, Zea mays subsp. mays
  peptide (1)..(340): Ceres Seq. ID no. 12353785
  misc_feature (100)..(173): Pfam Name: Prothymosin/parathymosin family Pfam Description: Prothymosin/parathymosin family
  misc_feature (68)..(339): Homolog of NCBI NO: 34905120 NR Description: P0686C03.43 [Oryza sativa (japonica
  misc_feature (112)..(286): Homolog of NCBI NO: 28393161 NR Description: unknown protein [Arabidopsis thaliana]
  misc_feature (112)..(286): Homolog of NCBI NO: 15238642 NR Description: putative protein; protein id: At5g24890.1, by cDNA: 42528. [Arabidopsis thaliana]
  misc_feature (146)..(285): Homolog of NCBI NO: 15724184 NR Description: At2g24550/F25P17.15 [Arabidopsis thaliana] unknown protein [Arabidopsis thaliana]
  misc_feature (146)..(287): Homolog of NCBI NO: 28916430 NR Description: putative KID-containing protein [Brassica napus]
  misc_feature (146)..(279): Homolog of NCBI NO: 25412223 NR Description: hypothetical protein At2g24550 [imported] -
  misc_feature (146)..(253): Homolog of NCBI NO: 18400574 NR Description: expressed protein; protein id: At2g24550.1, by cDNA: gi_15724183, supported by cDNA: gi_20466815 [Arabidopsis >gi|20197977|gb|AAD23890.2| expressed protein [Arabidopsis
  misc_feature (123)..(282): Homolog of NCBI NO: 15235970 NR Description: putative protein; protein id: At4g31510.1
  misc_feature (125)..(240): Homolog of NCBI NO: 9294810 NR Description: MTD1 [Medicago truncatula]
  misc_feature (145)..(275): Homolog of NCBI NO: 15229793 NR Description: putative protein; protein id: At3g43850.1
ILSPSHLSLPRRSRFACPHTEISCPLVPLLSSTPPACLPTGPRHAAAEALPAGSSDSALGWLVGLGRMSTAVARPAHGGFRRSGSGKPDPDEADRMTRSANGYLVQEEEEEEHGEEAAARREDEDEEEEEEEAEAVSEASSIGAASSDSSSSIGENSASDKEEEEEEVESKAQGLGMMGLATLESLDDALPSKRGLSSFYAGKSKSFTSLAEAAAAAAAREIAKPENPFNKRRRVLQAWSRRRASCSALAAAYLPPLLAPDHAVVEEDDEEGADDEEEEDEDEEHGGGGGGLRGTRKPPTFPSPRLSVHVAAAGQMARNGSFRSPRSFSMTDLHSAAGYE

SEQ ID NO: 5467 - protein, 273 aa, Zea mays subsp. mays
  peptide (1)..(273): Ceres Seq. ID no. 12353786
  misc_feature (33)..(106): Pfam Name: Prothymosin/parathymosin family Pfam Description: Prothymosin/parathymosin family
  misc_feature (1)..(272): Homolog of NCBI NO: 34905120 NR Description: P0686C03.43 [Oryza sativa (japonica
  misc_feature (45)..(219): Homolog of NCBI NO: 28393161 NR Description: unknown protein [Arabidopsis thaliana]
  misc_feature (45)..(219): Homolog of NCBI NO: 15238642 NR Description: putative protein; protein id: At5g24890.1, by cDNA: 42528. [Arabidopsis thaliana]
  misc_feature (79)..(218): Homolog of NCBI NO: 15724184 NR Description: At2g24550/F25P17.15 [Arabidopsis thaliana] unknown protein [Arabidopsis thaliana]
  misc_feature (79)..(220): Homolog of NCBI NO: 28916430 NR Description: putative KID-containing protein [Brassica napus]
  misc_feature (79)..(212): Homolog of NCBI NO: 25412223 NR Description: hypothetical protein At2g24550 [imported] -
  misc_feature (79)..(186): Homolog of NCBI NO: 18400574 NR Description: expressed protein; protein id: At2g24550.1, by cDNA: gi_15724183, supported by cDNA: gi_20466815 [Arabidopsis >gi|20197977|gb|AAD23890.2| expressed protein [Arabidopsis
  misc_feature (56)..(215): Homolog of NCBI NO: 15235970 NR Description: putative protein; protein id: At4g31510.1
  misc_feature (58)..(173): Homolog of NCBI NO: 9294810 NR Description: MTD1 [Medicago truncatula]
  misc_feature (78)..(208): Homolog of NCBI NO: 15229793 NR Description: putative protein; protein id: At3g43850.1
MSTAVARPAHGGFRRSGSGKPDPDEADRMTRSANGYLVQEEEEEEHGEEAAARREDEDEEEEEEEAEAVSEASSIGAASSDSSSSIGENSASDKEEEEEEVESKAQGLGMMGLATLESLDDALPSKRGLSSFYAGKSKSFTSLAEAAAAAAAREIAKPENPFNKRRRVLQAWSRRRASCSALAAAYLPPLLAPDHAVVEEDDEEGADDEEEEDEDEEHGGGGGGLRGTRKPPTFPSPRLSVHVAAAGQMARNGSFRSPRSFSMTDLHSAAGYE

SEQ ID NO: 5468 - protein, 245 aa, Zea mays subsp. mays
  peptide (1)..(245): Ceres Seq. ID no. 12353787
  misc_feature (5)..(78): Pfam Name: Prothymosin/parathymosin family Pfam Description: Prothymosin/parathymosin family
  misc_feature (1)..(244): Homolog of NCBI NO: 34905120 NR Description: P0686C03.43 [Oryza sativa (japonica
  misc_feature (17)..(191): Homolog of NCBI NO: 28393161 NR Description: unknown protein [Arabidopsis thaliana]
  misc_feature (17)..(191): Homolog of NCBI NO: 15238642 NR Description: putative protein; protein id: At5g24890.1, by cDNA: 42528. [Arabidopsis thaliana]
  misc_feature (51)..(190): Homolog of NCBI NO: 15724184 NR Description: At2g24550/F25P17.15 [Arabidopsis thaliana] unknown protein [Arabidopsis thaliana]
  misc_feature (51)..(192): Homolog of NCBI NO: 28916430 NR Description: putative KID-containing protein [Brassica napus]
  misc_feature (51)..(184): Homolog of NCBI NO: 25412223 NR Description: hypothetical protein At2g24550 [imported] -
  misc_feature (51)..(158): Homolog of NCBI NO: 18400574 NR Description: expressed protein; protein id: At2g24550.1, by cDNA: gi_15724183, supported by cDNA: gi_20466815 [Arabidopsis >gi|20197977|gb|AAD23890.2| expressed protein [Arabidopsis
  misc_feature (28)..(187): Homolog of NCBI NO: 15235970 NR Description: putative protein; protein id: At4g31510.1
  misc_feature (30)..(145): Homolog of NCBI NO: 9294810 NR Description: MTD1 [Medicago truncatula]
  misc_feature (50)..(180): Homolog of NCBI NO: 15229793 NR Description: putative protein; protein id: At3g43850.1
MTRSANGYLVQEEEEEEHGEEAAARREDEDEEEEEEEAEAVSEASSIGAASSDSSSSIGENSASDKEEEEEEVESKAQGLGMMGLATLESLDDALPSKRGLSSFYAGKSKSFTSLAEAAAAAAAREIAKPENPFNKRRRVLQAWSRRRASCSALAAAYLPPLLAPDHAVVEEDDEEGADDEEEEDEDEEHGGGGGGLRGTRKPPTFPSPRLSVHVAAAGQMARNGSFRSPRSFSMTDLHSAAGYE

SEQ ID NO: 5469 - DNA, 1522 bp, Zea mays subsp. mays; identical to SEQ ID NO: 1805
  misc_feature (1)..(1522): Ceres Seq. ID no. 12358133
  misc_feature: MA Experiment ID: 108528 Result: Up-regulated in Transcription
  misc_feature: MA Experiment 108528 PARAMETER Experiment Name: Zm_Imbibed_Seeds_P Parameter: Age (day) Value: 5 vs. 2
  misc_feature: MA Experiment 108528 PARAMETER Experiment Name: Zm_Imbibed_Seeds_P Parameter: Organism Value: Zea mays
  misc_feature: MA Experiment 108528 PARAMETER Experiment Name: Zm_Imbibed_Seeds_P Parameter: Plant Line Value: 35A19
  misc_feature: MA Experiment 108528 PARAMETER Experiment Name: Zm_Imbibed_Seeds_P Parameter: Tissue Value: Aerial vs. Embryo
  misc_feature: MA Experiment ID: 108530 Result: Up-regulated in Transcription
  misc_feature: MA Experiment 108530 PARAMETER Experiment Name: Zm_Imbibed_Seeds_P Parameter: Age (day) Value: 6 vs. 2
  misc_feature: MA Experiment 108530 PARAMETER Experiment Name: Zm_Imbibed_Seeds_P Parameter: Organism Value: Zea mays
  misc_feature: MA Experiment 108530 PARAMETER Experiment Name: Zm_Imbibed_Seeds_P Parameter: Plant Line Value: 35A19
  misc_feature: MA Experiment 108530 PARAMETER Experiment Name: Zm_Imbibed_Seeds_P Parameter: Tissue Value: Aerial vs. Embryo
  misc_feature: MA Experiment ID: 108536 Result: Down-regulated in Transcription
  misc_feature: MA Experiment 108536 PARAMETER Experiment Name: Zm_Meristem_P Parameter: Age (day) Value: 8
  misc_feature: MA Experiment 108536 PARAMETER Experiment Name: Zm_Meristem_P Parameter: Organism Value: Zea mays
  misc_feature: MA Experiment 108536 PARAMETER Experiment Name: Zm_Meristem_P Parameter: Plant Line Value: 35A19
  misc_feature: MA Experiment 108536 PARAMETER Experiment Name: Zm_Meristem_P Parameter: Tissue Value: Shoot Meristem vs. Above Shoot Meristem
  misc_feature: MA Experiment ID: 108545 Result: Up-regulated in Transcription
  misc_feature: MA Experiment 108545 PARAMETER Experiment Name: Zm_Imbibed_Seeds_P Parameter: Age (day) Value: 3 vs. 2
  misc_feature: MA Experiment 108545 PARAMETER Experiment Name: Zm_Imbibed_Seeds_P Parameter: Organism Value: Zea mays
  misc_feature: MA Experiment 108545 PARAMETER Experiment Name: Zm_Imbibed_Seeds_P Parameter: Plant Line Value: 35A19
  misc_feature: MA Experiment 108545 PARAMETER Experiment Name: Zm_Imbibed_Seeds_P Parameter: Tissue Value: Aerial vs. Embryo
  misc_feature: MA Experiment ID: 108547 Result: Up-regulated in Transcription
  misc_feature: MA Experiment 108547 PARAMETER Experiment Name: Zm_Imbibed_Seeds_P Parameter: Age (day) Value: 4 vs. 2
  misc_feature: MA Experiment 108547 PARAMETER Experiment Name: Zm_Imbibed_Seeds_P Parameter: Organism Value: Zea mays
  misc_feature: MA Experiment 108547 PARAMETER Experiment Name: Zm_Imbibed_Seeds_P Parameter: Plant Line Value: 35A19
  misc_feature: MA Experiment 108547 PARAMETER Experiment Name: Zm_Imbibed_Seeds_P Parameter: Tissue Value: Aerial vs. Embryo

SEQ ID NO: 5470 - protein, 283 aa, Zea mays subsp. mays; identical to SEQ ID NO: 1806
  peptide (1)..(283): Ceres Seq. ID no. 12358134
  misc_feature (1)..(98): Pfam Name: Glyoxalase/Bleomycin resistance Pfam Description: Glyoxalase/Bleomycin resistance
  misc_feature (1)..(143): Homolog of NCBI NO: 15220397 NR Description: glyoxalase I, putative (lactoylglutathione protein id: At1g67280.1, supported by cDNA: 13346., supported by gi_16930395, supported by cDNA: gi_19310504 [Arabidopsis
  misc_feature (186)..(282): Homolog of NCBI NO: 15220397 NR Description: glyoxalase I, putative (lactoylglutathione protein id: At1g67280.1, supported by cDNA: 13346., supported by gi_16930395, supported by cDNA: gi_19310504 [Arabidopsis
  misc_feature (1)..(143): Homolog of NCBI NO: 21537360 NR Description: glyoxalase I, putative [Arabidopsis thaliana]
  misc_feature (186)..(282): Homolog of NCBI NO: 21537360 NR Description: glyoxalase I, putative [Arabidopsis thaliana]
  misc_feature (1)..(143): Homolog of NCBI NO: 25350143 NR Description: protein F1N21.10 [imported] - Arabidopsis >gi|9828630|gb|AAG00253.1|AC002130_18 F1N21.10 [Arabidopsis
  misc_feature (186)..(282): Homolog of NCBI NO: 25350143 NR Description: protein F1N21.10 [imported] - Arabidopsis >gi|9828630|gb|AAG00253.1|AC002130_18 F1N21.10 [Arabidopsis
  misc_feature (1)..(143): Homolog of NCBI NO: 7619802 NR Description: putative glyoxalase I [Triticum aestivum]
  misc_feature (186)..(282): Homolog of NCBI NO: 7619802 NR Description: putative glyoxalase I [Triticum aestivum]
  misc_feature (1)..(143): Homolog of NCBI NO: 11281993 NR Description: lactoylglutathione lyase (EC 4.4.1.5) [imported]
  misc_feature (186)..(282): Homolog of NCBI NO: 11281993 NR Description: lactoylglutathione lyase (EC 4.4.1.5) [imported]

SEQ ID NO: 5471 - protein, 172 aa, Zea mays subsp. mays; identical to SEQ ID NO: 1807
  peptide (1)..(172): Ceres Seq. ID no. 12358135
  misc_feature (75)..(157): Pfam Name: Glyoxalase/Bleomycin resistance Pfam Description: Glyoxalase/Bleomycin resistance
  misc_feature (1)..(32): Homolog of NCBI NO: 15220397 NR Description: glyoxalase I, putative (lactoylglutathione protein id: At1g67280.1, supported by cDNA: 13346., supported by gi_16930395, supported by cDNA: gi_19310504 [Arabidopsis
  misc_feature (75)..(171): Homolog of NCBI NO: 15220397 NR Description: glyoxalase I, putative (lactoylglutathione protein id: At1g67280.1, supported by cDNA: 13346., supported by gi_16930395, supported by cDNA: gi_19310504 [Arabidopsis
  misc_feature (1)..(32): Homolog of NCBI NO: 21537360 NR Description: glyoxalase I, putative [Arabidopsis thaliana]
  misc_feature (75)..(171): Homolog of NCBI NO: 21537360 NR Description: glyoxalase I, putative [Arabidopsis thaliana]
  misc_feature (1)..(32): Homolog of NCBI NO: 25350143 NR Description: protein F1N21.10 [imported] - Arabidopsis >gi|9828630|gb|AAG00253.1|AC002130_18 F1N21.10 [Arabidopsis
  misc_feature (75)..(171): Homolog of NCBI NO: 25350143 NR Description: protein F1N21.10 [imported] - Arabidopsis >gi|9828630|gb|AAG00253.1|AC002130_18 F1N21.10 [Arabidopsis
  misc_feature (1)..(32): Homolog of NCBI NO: 7619802 NR Description: putative glyoxalase I [Triticum aestivum]
  misc_feature (75)..(171): Homolog of NCBI NO: 7619802 NR Description: putative glyoxalase I [Triticum aestivum]
  misc_feature (1)..(32): Homolog of NCBI NO: 11281993 NR Description: lactoylglutathione lyase (EC 4.4.1.5) [imported]
  misc_feature (75)..(171): Homolog of NCBI NO: 11281993 NR Description: lactoylglutathione lyase (EC 4.4.1.5) [imported]

SEQ ID NO: 5472 - protein, 153 aa, Zea mays subsp. mays; identical to SEQ ID NO: 1808
  peptide (1)..(153): Ceres Seq. ID no. 12358136
  misc_feature (56)..(138): Pfam Name: Glyoxalase/Bleomycin resistance Pfam Description: Glyoxalase/Bleomycin resistance
  misc_feature (1)..(13): Homolog of NCBI NO: 15220397 NR Description: glyoxalase I, putative (lactoylglutathione protein id: At1g67280.1, supported by cDNA: 13346., supported by gi_16930395, supported by cDNA: gi_19310504 [Arabidopsis
  misc_feature (56)..(152): Homolog of NCBI NO: 15220397 NR Description: glyoxalase I, putative (lactoylglutathione protein id: At1g67280.1, supported by cDNA: 13346., supported by gi_16930395, supported by cDNA: gi_19310504 [Arabidopsis
  misc_feature (1)..(13): Homolog of NCBI NO: 21537360 NR Description: glyoxalase I, putative [Arabidopsis thaliana]
  misc_feature (56)..(152): Homolog of NCBI NO: 21537360 NR Description: glyoxalase I, putative [Arabidopsis thaliana]
  misc_feature (1)..(13): Homolog of NCBI NO: 25350143 NR Description: protein F1N21.10 [imported] - Arabidopsis >gi|9828630|gb|AAG00253.1|AC002130_18 F1N21.10 [Arabidopsis
  misc_feature (56)..(152): Homolog of NCBI NO: 25350143 NR Description: protein F1N21.10 [imported] - Arabidopsis >gi|9828630|gb|AAG00253.1|AC002130_18 F1N21.10 [Arabidopsis
  misc_feature (1)..(13): Homolog of NCBI NO: 7619802 NR Description: putative glyoxalase I [Triticum aestivum]
  misc_feature (56)..(152): Homolog of NCBI NO: 7619802 NR Description: putative glyoxalase I [Triticum aestivum]
  misc_feature (1)..(13): Homolog of NCBI NO: 11281993 NR Description: lactoylglutathione lyase (EC 4.4.1.5) [imported]
  misc_feature (56)..(152): Homolog of NCBI NO: 11281993 NR Description: lactoylglutathione lyase (EC 4.4.1.5) [imported]

SEQ ID NO: 5473 - DNA, 1565 bp, Zea mays subsp. mays
  misc_feature (1)..(1565): Ceres Seq. ID no. 12407744
  misc_feature: MA Experiment ID: 20000479 Result: Up-regulated in Transcription
  misc_feature: MA Experiment 20000479 PARAMETER Experiment Name: Zm_Drought_P Parameter: Age (day) Value: 10
  misc_feature: MA Experiment 20000479 PARAMETER Experiment Name: Zm_Drought_P Parameter: Organism Value: Zea mays
  misc_feature: MA Experiment 20000479 PARAMETER Experiment Name: Zm_Drought_P Parameter: Plant Line Value: 35A19
  misc_feature: MA Experiment 20000479 PARAMETER Experiment Name: Zm_Drought_P Parameter: Timepoint (hr) Value: 48
  misc_feature: MA Experiment 20000479 PARAMETER Experiment Name: Zm_Drought_P Parameter: Tissue Value: Aerial
  misc_feature: MA Experiment 20000479 PARAMETER Experiment Name: Zm_Drought_P Parameter: Treatment Value: Drought vs. No Drought
  misc_feature: MA Experiment ID: 20000480 Result: Up-regulated in Transcription
  misc_feature: MA Experiment 20000480 PARAMETER Experiment Name: Zm_Drought_P Parameter: Age (day) Value: 11
  misc_feature: MA Experiment 20000480 PARAMETER Experiment Name: Zm_Drought_P Parameter: Organism Value: Zea mays
  misc_feature: MA Experiment 20000480 PARAMETER Experiment Name: Zm_Drought_P Parameter: Plant Line Value: 35A19
  misc_feature: MA Experiment 20000480 PARAMETER Experiment Name: Zm_Drought_P Parameter: Timepoint (hr) Value: 72
  misc_feature: MA Experiment 20000480 PARAMETER Experiment Name: Zm_Drought_P Parameter: Tissue Value: Aerial
  misc_feature: MA Experiment 20000480 PARAMETER Experiment Name: Zm_Drought_P Parameter: Treatment Value: Drought vs. No Drought
aacgctcgaactccacatcccccggtgttccccctccgctctccttcttaacccgtcccactgaactggatttcctctcgctattgtggtatactgtagcacgccagacgcaactagtcacggtcacggtcaagctcattgcgagcggagcgccctcctgtcgcttctgccgccgccgccaccgccgccgctcggctataaagtcgccagctctgttcaccgccgcttttcctctgcatccgtctgtggtgcggaattgaattccggtgggatttgggagccgagaggagaaggcggtaggcggggatggagacaccgggagggagcggggccccgtcgctggcgcggcagggctcggtgtactcgctaacgttcgacgagttccagaccgcgctcggcggcgccagcaaggacttcggctccatgaacatggacgagctgctgcgcaacatctggacggccgaggagtccaacgccatgaccgcggccgccccgaccacggcggccgcatccatggacgcgcatgggcagcatcagcagcaggccggggcgcccatccagcgccagggctccttcacgctgccgcgcacgctcagccagaagacggtcgacgaggtctggcgcgagatcgtgggcctcaccgacggggaggacgcgcaggcggttgcggctcccgctcccacgcccgcgcacgcgccgctgccggcgcaggcacagcggcagcagacgctggggtccatgactctggaggatttcctggtacgcgccggcgtggtttgtgaggacatggggcagcagaccctcgtgcagcagccgcacacgcagggttttttctcccaggggaatgcggtcgcgccgcagaccatgcagctggggaacggggtggtgaccggggtcgtcgggcaggggctcggaggagggatgacggtggcggtgccgacgacgccggtcgtgttcaacgggatggggaaggtggaggcgggggatctttcgtcgctgtcgccggtgccgtatcccttcgacactgcactgagggtgaggaagggaccgaccgtcgagaaggtggtggagaggaggcagaggcgcatgatcaagaacagggagtcggcagccaggtcgcgcgcgaggaagcaggcatacataatggagctagaagctgaggtggcaaaactcaaggacctgaatgacgagttgcagaaaaagcaggttgaaatgctgaagaagcaaaaggatgaggtcctggagcgaatcaacaaccaacatggaccgaaggcaaagaaactttgtcttcaccgcaccctgactggcccatggtagcctgctgaagcttgcacagacctcaccgaagtcgagatcgtcggcttagatgtgctcgtgtgtataccagatgatctcaagttgttctgtgacgtgggttgttgtctgtgcctgacagttcaccgtttaggttcagctgcgcaatcctcatataaacaatgaggcgtactaccttatctgttcatttaactccctcctattgccatggtgagatcatgcatgtaacttaggccttgttcgtttgtgcc

SEQ ID NO: 5474 - protein, 336 aa, Zea mays subsp. mays
  peptide (1)..(336): Ceres Seq. ID no. 12407745
  misc_feature (251)..(313): Pfam Name: bZIP transcription factor Pfam Description: bZIP transcription factor
  misc_feature (163)..(336): Homolog of NCBI NO: 18402757 NR Description: abscisic acid responsive elements-binding factor; id: At1g49720.1, supported by cDNA: gi_6739273 [Arabidopsis
  misc_feature (1)..(199): Homolog of NCBI NO: 7406677 NR Description: putative ripening-related bZIP protein [Vitis
  misc_feature (179)..(336): Homolog of NCBI NO: 7406677 NR Description: putative ripening-related bZIP protein [Vitis
  misc_feature (4)..(192): Homolog of NCBI NO: 18402186 NR Description: abscisic acid responsive elements-binding factor; id: At3g19290.1, supported by cDNA: gi_15292926, supported by
  misc_feature (196)..(336): Homolog of NCBI NO: 18402186 NR Description: abscisic acid responsive elements-binding factor; id: At3g19290.1, supported by cDNA: gi_15292926, supported by
  misc_feature (4)..(192): Homolog of NCBI NO: 11994451 NR Description: abscisic acid responsive elements-binding factor
  misc_feature (196)..(332): Homolog of NCBI NO: 11994451 NR Description: abscisic acid responsive elements-binding factor
  misc_feature (1)..(191): Homolog of NCBI NO: 13775111 NR Description: bZIP transcription factor 6 [Phaseolus vulgaris]
  misc_feature (166)..(336): Homolog of NCBI NO: 13775111 NR Description: bZIP transcription factor 6 [Phaseolus vulgaris]
  misc_feature (4)..(336): Homolog of NCBI NO: 27469352 NR Description: bZIP transcription factor ABI5 [Hordeum vulgare
METPGGSGAPSLARQGSVYSLTFDEFQTALGGASKDFGSMNMDELLRNIWTAEESNAMTAAAPTTAAASMDAHGQHQQQAGAPIQRQGSFTLPRTLSQKTVDEVWREIVGLTDGEDAQAVAAPAPTPAHAPLPAQAQRQQTLGSMTLEDFLVRAGVVCEDMGQQTLVQQPHTQGFFSQGNAVAPQTMQLGNGVVTGVVGQGLGGGMTVAVPTTPVVFNGMGKVEAGDLSSLSPVPYPFDTALRVRKGPTVEKVVERRQRRMIKNRESAARSRARKQAYIMELEAEVAKLKDLNDELQKKQVEMLKKQKDEVLERINNQHGPKAKKLCLHRTLTGPW

SEQ ID NO: 5475 - protein, 297 aa, Zea mays subsp. mays
  peptide (1)..(297): Ceres Seq. ID no. 12407746
  misc_feature (212)..(274): Pfam Name: bZIP transcription factor Pfam Description: bZIP transcription factor
  misc_feature (1)..(160): Homolog of NCBI NO: 7406677 NR Description: putative ripening-related bZIP protein [Vitis
  misc_feature (140)..(297): Homolog of NCBI NO: 7406677 NR Description: putative ripening-related bZIP protein [Vitis
  misc_feature (1)..(153): Homolog of NCBI NO: 18402186 NR Description: abscisic acid responsive elements-binding factor; id: At3g19290.1, supported by cDNA: gi_15292926, supported by
  misc_feature (157)..(297): Homolog of NCBI NO: 18402186 NR Description: abscisic acid responsive elements-binding factor; id: At3g19290.1, supported by cDNA: gi_15292926, supported by
  misc_feature (1)..(153): Homolog of NCBI NO: 11994451 NR Description: abscisic acid responsive elements-binding factor
  misc_feature (157)..(293): Homolog of NCBI NO: 11994451 NR Description: abscisic acid responsive elements-binding factor
  misc_feature (1)..(152): Homolog of NCBI NO: 13775111 NR Description: bZIP transcription factor 6 [Phaseolus vulgaris]
  misc_feature (127)..(297): Homolog of NCBI NO: 13775111 NR Description: bZIP transcription factor 6 [Phaseolus vulgaris]
  misc_feature (1)..(297): Homolog of NCBI NO: 27469352 NR Description: bZIP transcription factor ABI5 [Hordeum vulgare
  misc_feature (124)..(297): Homolog of NCBI NO: 18402757 NR Description: abscisic acid responsive elements-binding factor; id: At1g49720.1, supported by cDNA: gi_6739273 [Arabidopsis
MNMDELLRNIWTAEESNAMTAAAPTTAAASMDAHGQHQQQAGAPIQRQGSFTLPRTLSQKTVDEVWREIVGLTDGEDAQAVAAPAPTPAHAPLPAQAQRQQTLGSMTLEDFLVRAGVVCEDMGQQTLVQQPHTQGFFSQGNAVAPQTMQLGNGVVTGVVGQGLGGGMTVAVPTTPVVFNGMGKVEAGDLSSLSPVPYPFDTALRVRKGPTVEKVVERRQRRMIKNRESAARSRARKQAYIMELEAEVAKLKDLNDELQKKQVEMLKKQKDEVLERINNQHGPKAKKLCLHRTLTGPW

SEQ ID NO: 5476 - protein, 295 aa, Zea mays subsp. mays
  peptide (1)..(295): Ceres Seq. ID no. 12407747
  misc_feature (210)..(272): Pfam Name: bZIP transcription factor Pfam Description: bZIP transcription factor
  misc_feature (1)..(158): Homolog of NCBI NO: 7406677 NR Description: putative ripening-related bZIP protein [Vitis
  misc_feature (138)..(295): Homolog of NCBI NO: 7406677 NR Description: putative ripening-related bZIP protein [Vitis
  misc_feature (1)..(151): Homolog of NCBI NO: 18402186 NR Description: abscisic acid responsive elements-binding factor; id: At3g19290.1, supported by cDNA: gi_15292926, supported by
  misc_feature (155)..(295): Homolog of NCBI NO: 18402186 NR Description: abscisic acid responsive elements-binding factor; id: At3g19290.1, supported by cDNA: gi_15292926, supported by
  misc_feature (1)..(151): Homolog of NCBI NO: 11994451 NR Description: abscisic acid responsive elements-binding factor
  misc_feature (155)..(291): Homolog of NCBI NO: 11994451 NR Description: abscisic acid responsive elements-binding factor
  misc_feature (1)..(150): Homolog of NCBI NO: 13775111 NR Description: bZIP transcription factor 6 [Phaseolus vulgaris]
  misc_feature (125)..(295): Homolog of NCBI NO: 13775111 NR Description: bZIP transcription factor 6 [Phaseolus vulgaris]
  misc_feature (1)..(295): Homolog of NCBI NO: 27469352 NR Description: bZIP transcription factor ABI5 [Hordeum vulgare
  misc_feature (122)..(295): Homolog of NCBI NO: 18402757 NR Description: abscisic acid responsive elements-binding factor; id: At1g49720.1, supported by cDNA: gi_6739273 [Arabidopsis
MDELLRNIWTAEESNAMTAAAPTTAAASMDAHGQHQQQAGAPIQRQGSFTLPRTLSQKTVDEVWREIVGLTDGEDAQAVAAPAPTPAHAPLPAQAQRQQTLGSMTLEDFLVRAGVVCEDMGQQTLVQQPHTQGFFSQGNAVAPQTMQLGNGVVTGVVGQGLGGGMTVAVPTTPVVFNGMGKVEAGDLSSLSPVPYPFDTALRVRKGPTVEKVVERRQRRMIKNRESAARSRARKQAYIMELEAEVAKLKDLNDELQKKQVEMLKKQKDEVLERINNQHGPKAKKLCLHRTLTGPW

SEQ ID NO: 5477 - DNA, 1697 bp, Zea mays subsp. mays
  misc_feature (1)..(1697): Ceres Seq. ID no. 12382234
  misc_feature: MA Experiment ID: 20000534 Result: Down-regulated in Transcription
  misc_feature: MA Experiment 20000534 PARAMETER Experiment Name: Zm_Hybrid_Pollen_P Parameter: Age (day) Value: 8
  misc_feature: MA Experiment 20000534 PARAMETER Experiment Name: Zm_Hybrid_Pollen_P Parameter: Organism Value: Zea mays
  misc_feature: MA Experiment 20000534 PARAMETER Experiment Name: Zm_Hybrid_Pollen_P Parameter: Plant Line Value: 35A19
  misc_feature: MA Experiment 20000534 PARAMETER Experiment Name: Zm_Hybrid_Pollen_P Parameter: Tissue Value: Pollen vs. Aerial
gcacgagaccattacctagaacatcctaatcgaaaagtcctgcgaatccagtccgtcgacttccccgacgccgccgtggcagcagtcgccgccgacgaagtcggcaccagcagcggcggcgttaccacctctcgtccgctctccagccaccctcccccctctaccaccacatcgtccatacttactctcgagctccccggcgcaaaccccgtcgcgcccagccgaagccctaggatcctccacacccgcggcgtcatccacctctaccactcgtcgtcctccacttccacctcctcctcctacgcctcggcggtcgcagccacctcttcctcctcatccgggccggccaccccgcagcccgcctccgactcgcacctgcccctatgtcgcggcacgcgcctcctggtgctcgccgttccgacgcgcgtttcgccggaggactttgttcgcttctgcggcccccacctcgagtgtgcagccgacattcgtttcatcagggatgatggagtggaggaccggtacagcgttctagtggagtttgaggaccagagtagcgctgaatggttctacgccgatctcaatggctggaggttctcaacctctgagaaagattggatcaggacatcagtgggattttggcaactacttgtgatcactctttccgttgctcatgtgtttcagtgtggaccaattcatcctgtccggtatgccagttttgtcagaagcagtctgaaaattctacatgttctgtttgccaaaccactggaaacctctggatatgtgtgatatgtggttttgttggatgcggacggtatcaagaaggacatgcgaaacagcactggaaagatactcagcattgctattcgctagatttggaaacacaacgtgtttgggactatgttggtgacagttttgtacatcggctgaatcaatccaagagtgacgcaaagcatgctaagttcaaatcaaaaagtaaatattctggggatgaatgtgtaaactgctcgtgcaatgatgactctgatatgggtggagctatgttcagcagcaaagctgaaacaattgtggacgagtacaatcgtctcctggcaagccaacttgaaactcagagagaggtgcagacgtgcagttcattcctgctaagttttctatgtcactattgaaagcaaatattatgagggcctgttgtctgaggctaaaagaaacaaggagcaccagatttctgaagctgctgataaagctgtaagtgataagcttgaagagatgcaacttaagctcgagaatcttattgtggagaaaaagaaagttgcagatatgaacgaaaaactcactaggagccaagacatgtggcgccagacactaagagatatagaggaaagggaaagagcacagttgaagtcgaaggatgaaatgattctcgatctggaagaacagataaaggatttcaaattttccatcaaactgcagaagtcaatagagaagaacgatggtgtcaagggtggtacgctggttccactccctacggtttcagattctggaggcaagggtaaaaggtcatcaagaacaagcaagaggaggaattagtatcctttgctgagtagcaattagtcttgactggaacagacgtatacgaaccttattggcatgtatttactagcctgttatgatgaactacagcgtgatgtttgatngtcacg

SEQ ID NO: 5478 - protein, 261 aa, Zea mays subsp. mays
  peptide (1)..(261): Ceres Seq. ID no. 12382235
  misc_feature (14)..(202): Homolog of NCBI NO: 38345493 NR Description: OSJNBa0010D21.6 [Oryza sativa (japonica
  misc_feature (127)..(204): Homolog of NCBI NO: 15227893 NR Description: hypothetical protein; protein id: At2g42160.1
  misc_feature (111)..(207): Homolog of NCBI NO: 15225236 NR Description: hypothetical protein; protein id: At2g26000.1
  misc_feature (130)..(204): Homolog of NCBI NO: 10800417 NR Description: BRCA1 associated protein [Homo sapiens]
  misc_feature (130)..(204): Homolog of NCBI NO: 3252872 NR Description: BRCA1-associated protein 2 [Homo sapiens]
ARDHYLEHPNRKVLRIQSVDFPDAAVAAVAADEVGTSSGGVTTSRPLSSHPPPSTTTSSILTLELPGANPVAPSRSPRILHTRGVIHLYHSSSSTSTSSSYASAVAATSSSSSGPATPQPASDSHLPLCRGTRLLVLAVPTRVSPEDFVRFCGPHLECAADIRFIRDDGVEDRYSVLVEFEDQSSAEWFYADLNGWRFSTSEKDWIRTSVGFWQLLVITLSVAHVFQCGPIHPVRYASFVRSSLKILHVLFAKPLETSGYV

SEQ ID NO: 5479 - DNA, 1662 bp, Zea mays subsp. mays
  misc_feature (1)..(1662): Ceres Seq. ID no. 12404887
  misc_feature: MA Experiment ID: 108689 Result: Down-regulated in Transcription
  misc_feature: MA Experiment 108689 PARAMETER Experiment Name: Zm_Drought_Roots_P Parameter: Age (day) Value: 9
  misc_feature: MA Experiment 108689 PARAMETER Experiment Name: Zm_Drought_Roots_P Parameter: Organism Value: Zea mays
  misc_feature: MA Experiment 108689 PARAMETER Experiment Name: Zm_Drought_Roots_P Parameter: Plant Line Value: 35A19
  misc_feature: MA Experiment 108689 PARAMETER Experiment Name: Zm_Drought_Roots_P Parameter: Timepoint (hr) Value: 24
  misc_feature: MA Experiment 108689 PARAMETER Experiment Name: Zm_Drought_Roots_P Parameter: Tissue Value: Roots
  misc_feature: MA Experiment 108689 PARAMETER Experiment Name: Zm_Drought_Roots_P Parameter: Treatment Value: Drought vs. No Drought
  misc_feature: MA Experiment ID: 20000626 Result: Up-regulated in Transcription
  misc_feature: MA Experiment 20000626 PARAMETER Experiment Name: Zm_Herbicide-Treatments_P Parameter: Timepoint (hr) Value: 12
  misc_feature: MA Experiment 20000626 PARAMETER Experiment Name: Zm_Herbicide-Treatments_P Parameter: Tissue Value: Aerial
  misc_feature: MA Experiment 20000626 PARAMETER Experiment Name: Zm_Herbicide-Treatments_P Parameter: Treatment Value: Roundup vs. No Treatment
ctaaaccgctatggtccatccacatccacagtcgccatcgcccccacctctcaccgtcgtcttcgtgcaccactcggcctccactgccggtcgcgcctcccagccacctcgtgccgctctgccaccccgcgcatcctccaccgcccctatggctgcnacgggcgagcnctgcccgagcagtcgaccgccctttccgtgccgccccgcctccccgctaggcctccactgcccactgctccggcgcctacagtggaaggcaaggagaaggacatcgggcggcggtagctggatctggcaagcacaaggccgcgcccccggggcgcctggatctgcgttgcttgcaacccccccccccccccccccacacacacacacacacaacagatctgctacagggacaatctgatggtcggcgcatcgcctagaggccggtggtggcgagtcacgcctcctcagccctcatcctcacgtcgtcgccaccgcagatccgcccaacggcccctgacccgacaatgacgattatcttattgctagcaccgatggggtggggacaaagctgaagcttgctttcgaaactggtattcatgatacaatcgacattgacctggtggcaatgagcgtcaatgacattgtaactctaggtgcaaaaccattgttcttcctagattactatgcaacgagcaagcttgatgttgatcttgcagagaaggttatcaaggggattagggatggctgcgaacaatcagattgtgctctcctaggaggggagacagcagaaatgcctggtttctatgcagagggtgaatatgatctaagtggttttgctgtgggtgttgtgaagaaggataaaatcattgatggaaaaacattgttaagggagatgtgcttataggtcttccttccagtggtgttcattctaacgggttctctcttgttagaaggagtactgagaaaagtggactttctttggatgattagctcccaagaaatgatggcataacaactacagttggtgaagctctaatggcaccaaccttcatctatgttaagcaggtgcttgagattattagcaaaggtggtgtgaaaggactagcccacatcactggtggtggctttactagcaatatcccaagagtattcccctctggatgcggggcaaaaaatttactgggtcatgggaaatacctccaatcttcagttggcttcaacaggcaagaacaaatgatcttcaaacttcgcctttgattttcagtagcaactattctgagaaacatcaggcactgcattggcgtactggtcataaaaatgattgcctccagataataagttctgctgcttcaaattcagttctgccagctgtaggaatagggtttgtccgctggtttgctaaggcaagcaacgtacatagactgctcgtcttggatcctttaggaatcataaaagcatatagaggaactatgtataggctacaaagaagcataagaagcatttttatagcagaagccaagtgttctgatgattttgttttttcaattgtgttttctgttattggttcagtatgcacatatattgacatgatttatggcatggcatctgccatctttgttatatttatgacatcgttcttgattgatgtgtgcgacatgaatgatagatcttttt

SEQ ID NO: 5480 - protein, 171 aa, Zea mays subsp. mays
  peptide (1)..(171): Ceres Seq. ID no. 12404888
  misc_feature (1)..(21): Homolog of NCBI NO: 23029993 NR Description: hypothetical protein [Microbulbifer degradans
  misc_feature (1)..(21): Homolog of NCBI NO: 34897250 NR Description: putative 5'-phosphoribosyl-5-aminoimidazole
  misc_feature (1)..(22): Homolog of NCBI NO: 1709925 NR Description: Phosphoribosylformylglycinamidine cyclo-ligase,
MRGKKFTGSWEIPPIFSWLQQARTNDLQTSPLIFSSNYSEKHQALHWRTGHKNDCLQIISSAASNSVLPAVGIGFVRWFAKASNVHRLLVLDPLGIIKAYRGTMYRLQRSIRSIFIAEAKCSDDFVFSIVFSVIGSVCTYIDMIYGMASAIFVIFMTSFLIDVCDMNDRSF

SEQ ID NO: 5481 - protein, 131 aa, Zea mays subsp. mays
  peptide (1)..(131): Ceres Seq. ID no. 12404889
  misc_feature (49)..(49): Xaa is any aa, unknown or other
  misc_feature (53)..(53): Xaa is any aa, unknown or other
MVHPHPQSPSPPPLTVVFVHHSASTAGRASQPPRAALPPRASSTAPMAXTGEXCPSSRPPFPCRPASPLGLHCPLLRRLQWKARRRTSGGGSWIWQAQGRAPGAPGSALLATPPPPPPHTHTHNRSATGTI

SEQ ID NO: 5482 - protein, 94 aa, Zea mays subsp. mays
  peptide (1)..(94): Ceres Seq. ID no. 12404890
  misc_feature (53)..(53): Xaa is any aa, unknown or other
  misc_feature (56)..(56): Xaa is any aa, unknown or other
LNRYGPSTSTVAIAPTSHRRLRAPLGLHCRSRLPATSCRSATPRILHRPYGCXGRXLPEQSTALSVPPRLPARPPLPTAPAPTVEGKEKDIGRR

SEQ ID NO: 5483 - DNA, 920 bp, Zea mays subsp. mays
  misc_feature (1)..(920): Ceres Seq. ID no. 12359483
  misc_feature: MA Experiment ID: 108527 Result: Up-regulated in Transcription
  misc_feature: MA Experiment 108527 PARAMETER Experiment Name: Zm_5mM_NO_P Parameter: Age (day) Value: 8
  misc_feature: MA Experiment 108527 PARAMETER Experiment Name: Zm_5mM_NO_P Parameter: Organism Value: Zea mays
  misc_feature: MA Experiment 108527 PARAMETER Experiment Name: Zm_5mM_NO_P Parameter: Plant Line Value: 35A19
  misc_feature: MA Experiment 108527 PARAMETER Experiment Name: Zm_5mM_NO_P Parameter: Timepoint (hr) Value: 6
  misc_feature: MA Experiment 108527 PARAMETER Experiment Name: Zm_5mM_NO_P Parameter: Tissue Value: Aerial
  misc_feature: MA Experiment 108527 PARAMETER Experiment Name: Zm_5mM_NO_P Parameter: Treatment Value: 5mM NO vs. No Treatment
  misc_feature: MA Experiment ID: 108556 Result: Down-regulated in Transcription
  misc_feature: MA Experiment 108556 PARAMETER Experiment Name: Zm_Drought_P Parameter: Age (day) Value: 9
  misc_feature: MA Experiment 108556 PARAMETER Experiment Name: Zm_Drought_P Parameter: Organism Value: Zea mays
  misc_feature: MA Experiment 108556 PARAMETER Experiment Name: Zm_Drought_P Parameter: Plant Line Value: 35A19
  misc_feature: MA Experiment 108556 PARAMETER Experiment Name: Zm_Drought_P Parameter: Timepoint (hr) Value: 24
  misc_feature: MA Experiment 108556 PARAMETER Experiment Name: Zm_Drought_P Parameter: Tissue Value: Aerial
  misc_feature: MA Experiment 108556 PARAMETER Experiment Name: Zm_Drought_P Parameter: Treatment Value: Drought vs. No Drought
gtttttcccctcctcttcctttcccccccacccccactactctctctcgccccaaaaccagatcgccacgaccaagggcagagggccccggaggggcgcgtagcaatggcggcaggctaccgggccgaggacgattacgattacctcttcaaggtggtcctgatcggcgactccggcgtcggcaagtccaacttgctctcacgcttcacgcgcaacgagttcagcctcgagtccaagtccacaatcggcgtcgagttcgccacccgctctctccaggtcgacggcaaggtcgtcaaggcccagatttgggacaccgccggccaggaacgataccgtgcaatcactagtgcgtattaccgaggcgctgttggggcgttgcttgtatatgacgtcactcgccactcaacctttgagaacgttgagcgttggctgaaggagctgagagaccacacagaccccaatatagttgttatgctggttggcaacaaatctgatctccgccatcttgtagcagttcaaaccgacgaaggaaaagcattcgcagagagggaatcgttgtacttcatggagacctctgcgcttgagtcgaccaacgttgagaatgcatttgcagaagtcctagctcagatctaccgtattgtgagcaagagagcagttgaagcaggtgaagatgcagcatctgggcctggcaggggcgagaagataaacattaaggatgacgtctcggcagtgaagaagggtggctgctgctctagctgagctgccgtgctgtaattttttttggggagttgtgggatgtagcttatgttatggcattttcagcgactggaaattggtagtggcatttagcagcctctattacctagagaggttattgtcaaactgaaaaaaaaaactgaaggttagatcagtttagagct

SEQ ID NO: 5484 - protein, 252 aa, Zea mays subsp. mays
  peptide (1)..(252): Ceres Seq. ID no. 12359484
  misc_feature (51)..(212): Pfam Name: Ras family Pfam Description: Ras family
  misc_feature (36)..(251): Homolog of NCBI NO: 13195452 NR Description: GTP-binding protein [Oryza sativa]
  misc_feature (36)..(251): Homolog of NCBI NO: 730512 NR Description: RAS-RELATED PROTEIN RIC2 >gi|481506|pir||S38741
  misc_feature (38)..(252): Homolog of NCBI NO: 15234020 NR Description: ras-related GTP binding protein, putative;
  misc_feature (38)..(252): Homolog of NCBI NO: 15242483 NR Description: GTP-binding protein, putative; protein id: supported by cDNA: 102017., supported by cDNA: gi_13877912,
  misc_feature (38)..(252): Homolog of NCBI NO: 21536533 NR Description: Rab-type small GTP-binding protein-like
  misc_feature (39)..(252): Homolog of NCBI NO: 34909538 NR Description: putative GTP-binding protein [Oryza sativa
  misc_feature (38)..(252): Homolog of NCBI NO: 541979 NR Description: GTP-binding protein, ras-like - fava bean
VFPLLFLSPPPPLLSLAPKPDRHDQGQRAPEGRVAMAAGYRAEDDYDYLFKVVLIGDSGVGKSNLLSRFTRNEFSLESKSTIGVEFATRSLQVDGKVVKAQIWDTAGQERYRAITSAYYRGAVGALLVYDVTRHSTFENVERWLKELRDHTDPNIVVMLVGNKSDLRHLVAVQTDEGKAFAERESLYFMETSALESTNVENAFAEVLAQIYRIVSKRAVEAGEDAASGPGRGEKINIKDDVSAVKKGGCCSS

SEQ ID NO: 5485 - protein, 217 aa, Zea mays subsp. mays
  peptide (1)..(217): Ceres Seq. ID no. 12359485
  misc_feature (16)..(177): Pfam Name: Ras family Pfam Description: Ras family
  misc_feature (1)..(216): Homolog of NCBI NO: 13195452 NR Description: GTP-binding protein [Oryza sativa]
  misc_feature (1)..(216): Homolog of NCBI NO: 730512 NR Description: RAS-RELATED PROTEIN RIC2 >gi|481506|pir||S38741
  misc_feature (3)..(217): Homolog of NCBI NO: 15234020 NR Description: ras-related GTP binding protein, putative;
  misc_feature (3)..(217): Homolog of NCBI NO: 15242483 NR Description: GTP-binding protein, putative; protein id: supported by cDNA: 102017., supported by cDNA: gi_13877912,
  misc_feature (3)..(217): Homolog of NCBI NO: 21536533 NR Description: Rab-type small GTP-binding protein-like
  misc_feature (4)..(217): Homolog of NCBI NO: 34909538 NR Description: putative GTP-binding protein [Oryza sativa
  misc_feature (3)..(217): Homolog of NCBI NO: 541979 NR Description: GTP-binding protein, ras-like - fava bean
MAAGYRAEDDYDYLFKVVLIGDSGVGKSNLLSRFTRNEFSLESKSTIGVEFATRSLQVDGKVVKAQIWDTAGQERYRAITSAYYRGAVGALLVYDVTRHSTFENVERWLKELRDHTDPNIVVMLVGNKSDLRHLVAVQTDEGKAFAERESLYFMETSALESTNVENAFAEVLAQIYRIVSKRAVEAGEDAASGPGRGEKINIKDDVSAVKKGGCCSS

SEQ ID NO: 5486 - DNA, 1550 bp, Zea mays subsp. mays
  misc_feature (1)..(1550): Ceres Seq. ID no. 12409494
  misc_feature: MA Experiment ID: 20000487 Result: Up-regulated in Transcription
  misc_feature: MA Experiment 20000487 PARAMETER Experiment Name: Zm_50mM_NH4NO3_L_to_H_P Parameter: Organism Value: Zea mays
  misc_feature: MA Experiment 20000487 PARAMETER Experiment Name: Zm_50mM_NH4NO3_L_to_H_P Parameter: Timepoint (hr) Value: 4
  misc_feature: MA Experiment 20000487 PARAMETER Experiment Name: Zm_50mM_NH4NO3_L_to_H_P Parameter: Tissue Value: Leaves
  misc_feature: MA Experiment 20000487 PARAMETER Experiment Name: Zm_50mM_NH4NO3_L_to_H_P Parameter: Treatment Value: 50mM NH4NO3 vs. 100mM Mannitol
acactccaaaccacaagcgcagccgccgtcacttctgccccatcgcggccccatcctgccgctcgtcgacgacgccaccccgcccctcgaccgcggctaacgccgccagtgtcgcaagcaagctttggtgccgccgccttcacacaggctttgaaggaggtggagcgccgggagcacgaggccgagacgaagacccgccacctccagggatggcccaagcaccgccatgacccgaggagtgaggatgaggatcccgaggaggtggagtcatatgtggaggattcccgcgaggagaacgcggaggcggtgcccgtagctgtagggaaccgggccaagagcactggaaaggggaaggcgcagatgtaccgccacctggtgttccccgtgctggagttcctccaggagcggcagctcttctcggagtcagagatcctggaggccaagatccgcctcctcagcggcacgggccacgtcaggggtagcctccccaagggaaatggaggatagcttctgggtccggcgacaagttgcagttgcagcagtgctccaatgttttggtcaatggatttgttctaaaagaatacacagaaagatagtcagaagcacaccaatatagggcatttccacttacttggatggtaaagaagacactcctacaaattgaaatgcacgtacttcgggcttcacgacaactggactggacaggtgtctgcacgcttcagttgaagccccagatatcacagagctcatgctgtccatggagctgcttggtgatgcacggtcaacatggcccttagttgggatcctgttccctgatgatcttgagggtatagtttttctgatataagattttgatgacggacgaacagggaccctctgagcagttccctttactttcaaaaagtgcctttcttgaacggtcaattgaagaaaattctgaccaagaagaatgcatcatcaagctaaatgacattcctaggggtgccaagtcatttgagctagttgcaaggttctgctatggtgtgaaaatagagctttcacctgcaaatgttgtctacctacggtgtgcctcaaagcatctagaaatgactgaagaagtagctgaggaaaacctgattgcacagtcagaaatgtttctcaaccaagtggttctccgtaactggaaagattatttggcagcattggaaacacgtgatgacctactcccccatgctgaagacctccagattgtgaacagatgtatcgagccattggcatcaaaagctactagagtgaacagatgcttttgtgactgatcagctctggagcagctagagtgatgtagttgtgggcttttgaacaatagttagagtgatatgaaacattagtgatgtagttgtgggcttttgaactacttcaagctggagtgatgtcgctgtggtgtttttgtgactgatcatctctggagcttttgtgaatgatctagctagctatccgtaaatgatctagttatgaatgatattataattgtgatgcttttgtgaatatataattgtggtgcttttgtgttc

SEQ ID NO: 5487 - protein, 168 aa, Zea mays subsp. mays
  peptide (1)..(168): Ceres Seq. ID no. 12409495
TLQTTSAAAVTSAPSRPHPAARRRRHPAPRPRLTPPVSQASFGAAAFTQALKEVERREHEAETKTRHLQGWPKHRHDPRSEDEDPEEVESYVEDSREENAEAVPVAVGNRAKSTGKGKAQMYRHLVFPVLEFLQERQLFSESEILEAKIRLLSGTGHVRGSLPKGNGG

SEQ ID NO: 5488 - protein, 146 aa, Zea mays subsp. mays
  peptide (1)..(146): Ceres Seq. ID no. 12409496
  misc_feature (10)..(137): Homolog of NCBI NO: 18481720 NR Description: hypothetical protein [Sorghum bicolor]
  misc_feature (10)..(138): Homolog of NCBI NO: 15220750 NR Description: non-phototropic hypocotyl, putative; protein id:
  misc_feature (10)..(138): Homolog of NCBI NO: 25336228 NR Description: F26G16.2 protein - Arabidopsis thaliana Contains a bZIP transcription factor PF|00170 domain. ESTs gb|AA650964, gb|AI994521 come from this gene. [Arabidopsis
  misc_feature (10)..(137): Homolog of NCBI NO: 15242687 NR Description: photoreceptor-interacting protein - like; protein
  misc_feature (10)..(145): Homolog of NCBI NO: 15289880 NR Description: putative photoreceptor-interacting protein-like
  misc_feature (1)..(137): Homolog of NCBI NO: 15240666 NR Description: photoreceptor-interacting protein-like;
  misc_feature (10)..(137): Homolog of NCBI NO: 6224712 NR Description: non-phototropic hypocotyl 3 [Arabidopsis thaliana]
  misc_feature (10)..(137): Homolog of NCBI NO: 18424815 NR Description: non-phototropic hypocotyl 3 (gb|AAF05914.1); id: At5g64330.1, supported by cDNA: gi_6224711 [Arabidopsis
  misc_feature (10)..(137): Homolog of NCBI NO: 32492175 NR Description: OSJNBb0034I13.5 [Oryza sativa (japonica
  misc_feature (10)..(146): Homolog of NCBI NO: 22328160 NR Description: similar to non-phototropic hypocotyl-like
MTDEQGPSEQFPLLSKSAFLERSIEENSDQEECIIKLNDIPRGAKSFELVARFCYGVKIELSPANVVYLRCASKHLEMTEEVAEENLIAQSEMFLNQVVLRNWKDYLAALETRDDLLPHAEDLQIVNRCIEPLASKATRVNRCFCD

SEQ ID NO: 5489 - DNA, 1056 bp, Zea mays subsp. mays
  misc_feature (1)..(1056): Ceres Seq. ID no. 13498940
  misc_feature: MA Experiment ID: 108523 Result: Up-regulated in Transcription
  misc_feature: MA Experiment 108523 PARAMETER Experiment Name: Zm_42deg_Heat_P Parameter: Age (day) Value: 8
  misc_feature: MA Experiment 108523 PARAMETER Experiment Name: Zm_42deg_Heat_P Parameter: Organism Value: Zea mays
  misc_feature: MA Experiment 108523 PARAMETER Experiment Name: Zm_42deg_Heat_P Parameter: Plant Line Value: 35A19
  misc_feature: MA Experiment 108523 PARAMETER Experiment Name: Zm_42deg_Heat_P Parameter: Temperature (deg C) Value: 42 vs. 22
  misc_feature: MA Experiment 108523 PARAMETER Experiment Name: Zm_42deg_Heat_P Parameter: Timepoint (hr) Value: 6
  misc_feature: MA Experiment 108523 PARAMETER Experiment Name: Zm_42deg_Heat_P Parameter: Tissue Value: Aerial
  misc_feature: MA Experiment ID: 108689 Result: Up-regulated in Transcription
  misc_feature: MA Experiment 108689 PARAMETER Experiment Name: Zm_Drought_Roots_P Parameter: Age (day) Value: 9
  misc_feature: MA Experiment 108689 PARAMETER Experiment Name: Zm_Drought_Roots_P Parameter: Organism Value: Zea mays
  misc_feature: MA Experiment 108689 PARAMETER Experiment Name: Zm_Drought_Roots_P Parameter: Plant Line Value: 35A19
  misc_feature: MA Experiment 108689 PARAMETER Experiment Name: Zm_Drought_Roots_P Parameter: Timepoint (hr) Value: 24
  misc_feature: MA Experiment 108689 PARAMETER Experiment Name: Zm_Drought_Roots_P Parameter: Tissue Value: Roots
  misc_feature: MA Experiment 108689 PARAMETER Experiment Name: Zm_Drought_Roots_P Parameter: Treatment Value: Drought vs. No Drought
gcacgagaccattacctagaacatcctaatcaaaacaagaacagagcagtactgcaggagagcgagtgagctgtccaaagcgtccggccaaacccgcgtgtgtccaccactcctcctgcacaagcaccgccacaatgcggccgcacaccctggcgctgctcctgctcctgctggccacgccggcggcgacgcgtctggcatcggccgcctgcgcgggcgagaagttccccgcggggcgggcgtacgcggcgtgcgaggacctcccgaagctgggcgcgtcgctgcactggacgtacgacgcggcaaagagctccctgtccgtggcgttcgtggcggcgccggcggcggccggcgggtgggtggcgtgggggctgaacccgacgggcgagggcatggccggcnngcaggcgactgntgnngctnncggggtccgggtncggnnccgnggcgcccaccgtgcggacgtacaacatcacggggtacgtcccgctggggaacgtctcgacgccgctggacttcccggccaccgacctcgccgcggacgccgcagccgggggcaggatccgggtgtacggcacgctgcagctgcgcgaggggatgagggccgtgaaccaggtgtggcaggtcggcgcgtcatccaccgccggcgcccccgacaagcacgcgttccagccggacaacctcggcgccaagagcaagctcgtcctcgccggcaagtcccccgcggcggcgtccccgtcgcccgcccccgcgcctcatgcgtccggcggcggcgcggcgtcgtccaagtcccccaacgccgccgcggccgcggccggcgtggccgcgccggtagccctcgtgctcgcgctggtgggattcttggcgacggtatgatgacgcgtccacggtggctggatgggtgggcggtgagcaggggaggaagtattattgcactgttttctttatttttggttcgtttttcaggtttgttttaggctgtgaaataataataaaaacggttggctggctgcacttgttgttgagctgctgtttggtaggaatatacagtgattt

SEQ ID NO: 5490 - protein, 280 aa, Zea mays subsp. mays
  peptide (1)..(280): Ceres Seq. ID no. 13498941
  misc_feature (1)..(92): Homolog of NCBI NO: 30680258 NR Description: auxin-induced protein (AIR12) [Arabidopsis
  misc_feature (1)..(92): Homolog of NCBI NO: 11357190 NR Description: auxin-induced protein AIR12 [imported] - thaliana (fragment) >gi|3695023|gb|AAC62613.1| unknown
  misc_feature (3)..(98): Homolog of NCBI NO: 29647484 NR Description: OJ1191_A10.2 [Oryza sativa (japonica
  misc_feature (8)..(92): Homolog of NCBI NO: 15235545 NR Description: auxin-induced protein, putative [Arabidopsis
  misc_feature (8)..(92): Homolog of NCBI NO: 21593814 NR Description: unknown [Arabidopsis thaliana]
  misc_feature (1)..(92): Homolog of NCBI NO: 38424013 NR Description: auxin-induced protein-like [Oryza sativa
  misc_feature (12)..(106): Homolog of NCBI NO: 24414271 NR Description: Unknown protein [Oryza sativa (japonica
  misc_feature (1)..(91): Homolog of NCBI NO: 18404500 NR Description: auxin-induced protein family [Arabidopsis >gi|9294186|dbj|BAB02088.1| similarity to unknown protein [Arabidopsis thaliana]
  misc_feature (1)..(117): Homolog of NCBI NO: 18421491 NR Description: auxin-induced protein family [Arabidopsis >gi|9758647|dbj|BAB09271.1| gene_id:MXH1.11~pir||T10200~similar unknown protein [Arabidopsis thaliana]
  misc_feature (1)..(117): Homolog of NCBI NO: 21592781 NR Description: putative membrane protein [Arabidopsis thaliana]
  misc_feature (90)..(90): Xaa is any aa, unknown or other
  misc_feature (94)..(94): Xaa is any aa, unknown or other
  misc_feature (95)..(95): Xaa is any aa, unknown or other
  misc_feature (97)..(97): Xaa is any aa, unknown or other
  misc_feature (101)..(101): Xaa is any aa, unknown or other
  misc_feature (103)..(103): Xaa is any aa, unknown or other
  misc_feature (104)..(104): Xaa is any aa, unknown or other
MRPHTLALLLLLLATPAATRLASAACAGEKFPAGRAYAACEDLPKLGASLHWTYDAAKSSLSVAFVAAPAAAGGWVAWGLNPTGEGMAGXQATXXAXGVRXRXXGAHRADVQHHGVRPAGERLDAAGLPGHRPRRGRRSRGQDPGVRHAAAARGDEGREPGVAGRRVIHRRRPRQARVPAGQPRRQEQARPRRQVPRGGVPVARPRASCVRRRRGVVQVPQRRRGRGRRGRAGSPRARAGGILGDGMMTRPRWLDGWAVSRGGSIIALFSLFLVRFSGLF

SEQ ID NO: 5491 - protein, 194 aa, Zea mays subsp. mays
  peptide (1)..(194): Ceres Seq. ID no. 13498942
  misc_feature (1)..(12): Homolog of NCBI NO: 29647484 NR Description: OJ1191_A10.2 [Oryza sativa (japonica
  misc_feature (1)..(20): Homolog of NCBI NO: 24414271 NR Description: Unknown protein [Oryza sativa (japonica
  misc_feature (1)..(31): Homolog of NCBI NO: 18421491 NR Description: auxin-induced protein family [Arabidopsis >gi|9758647|dbj|BAB09271.1| gene_id:MXH1.11~pir||T10200~similar unknown protein [Arabidopsis thaliana]
  misc_feature (1)..(31): Homolog of NCBI NO: 21592781 NR Description: putative membrane protein [Arabidopsis thaliana]
  misc_feature (4)..(4): Xaa is any aa, unknown or other
  misc_feature (8)..(8): Xaa is any aa, unknown or other
  misc_feature (9)..(9): Xaa is any aa, unknown or other
  misc_feature (11)..(11): Xaa is any aa, unknown or other
  misc_feature (15)..(15): Xaa is any aa, unknown or other
  misc_feature (17)..(17): Xaa is any aa, unknown or other
  misc_feature (18)..(18): Xaa is any aa, unknown or other
MAGXQATXXAXGVRXRXXGAHRADVQHHGVRPAGERLDAAGLPGHRPRRGRRSRGQDPGVRHAAAARGDEGREPGVAGRRVIHRRRPRQARVPAGQPRRQEQARPRRQVPRGGVPVARPRASCVRRRRGVVQVPQRRRGRGRRGRAGSPRARAGGILGDGMMTRPRWLDGWAVSRGGSIIALFSLFLVRFSGLF

SEQ ID NO: 5492 - DNA, 1493 bp, Zea mays subsp. mays
  misc_feature (1)..(1493): Ceres Seq. ID no. 13495154
  misc_feature: MA Experiment ID: 108535 Result: Up-regulated in Transcription
  misc_feature: MA Experiment 108535 PARAMETER Experiment Name: Zm_Meristem_P Parameter: Age (day) Value: 8
  misc_feature: MA Experiment 108535 PARAMETER Experiment Name: Zm_Meristem_P Parameter: Organism Value: Zea mays
  misc_feature: MA Experiment 108535 PARAMETER Experiment Name: Zm_Meristem_P Parameter: Plant Line Value: 35A19
  misc_feature: MA Experiment 108535 PARAMETER Experiment Name: Zm_Meristem_P Parameter: Tissue Value: Root Meristem vs. Above Root Meristem
  misc_feature: MA Experiment ID: 108543 Result: Up-regulated in Transcription
  misc_feature: MA Experiment ID: 108556 Result: Down-regulated in Transcription
  misc_feature: MA Experiment 108556 PARAMETER Experiment Name: Zm_Drought_P Parameter: Age (day) Value: 9
  misc_feature: MA Experiment 108556 PARAMETER Experiment Name: Zm_Drought_P Parameter: Organism Value: Zea mays
  misc_feature: MA Experiment 108556 PARAMETER Experiment Name: Zm_Drought_P Parameter: Plant Line Value: 35A19
  misc_feature: MA Experiment 108556 PARAMETER Experiment Name: Zm_Drought_P Parameter: Timepoint (hr) Value: 24
  misc_feature: MA Experiment 108556 PARAMETER Experiment Name: Zm_Drought_P Parameter: Tissue Value: Aerial
  misc_feature: MA Experiment 108556 PARAMETER Experiment Name: Zm_Drought_P Parameter: Treatment Value: Drought vs. No Drought
  misc_feature: MA Experiment ID: 108689 Result: Down-regulated in Transcription
  misc_feature: MA Experiment 108689 PARAMETER Experiment Name: Zm_Drought_Roots_P Parameter: Age (day) Value: 9
  misc_feature: MA Experiment 108689 PARAMETER Experiment Name: Zm_Drought_Roots_P Parameter: Organism Value: Zea mays
  misc_feature: MA Experiment 108689 PARAMETER Experiment Name: Zm_Drought_Roots_P Parameter: Plant Line Value: 35A19
  misc_feature: MA Experiment 108689 PARAMETER Experiment Name: Zm_Drought_Roots_P Parameter: Timepoint (hr) Value: 24
  misc_feature: MA Experiment 108689 PARAMETER Experiment Name: Zm_Drought_Roots_P Parameter: Tissue Value: Roots
  misc_feature: MA Experiment 108689 PARAMETER Experiment Name: Zm_Drought_Roots_P Parameter: Treatment Value: Drought vs. No Drought
  misc_feature: MA Experiment ID: 20000108 Result: Up-regulated in Transcription
  misc_feature: MA Experiment 20000108 PARAMETER Experiment Name: Zm_Root-Tips_P Parameter: Age (day) Value: 12
  misc_feature: MA Experiment 20000108 PARAMETER Experiment Name: Zm_Root-Tips_P Parameter: Organism Value: Zea mays
  misc_feature: MA Experiment 20000108 PARAMETER Experiment Name: Zm_Root-Tips_P Parameter: Tissue Value: Root tips vs. Root mid region    35
  misc_feature: MA Experiment 20000108 PARAMETER Experiment Name: Zm_Root-Tips_P Parameter: Tissue Value: Root tips vs. Root mid region   Sequence Listing-Misc Features (4)
  misc_feature: MA Experiment ID: 20000478 Result: Down-regulated in Transcription
  misc_feature: MA Experiment 20000478 PARAMETER Experiment Name: Zm_5mM_SA_P Parameter: Age (day) Value: 11
  misc_feature: MA Experiment 20000478 PARAMETER Experiment Name: Zm_5mM_SA_P Parameter: Organism Value: Zea mays
  misc_feature: MA Experiment 20000478 PARAMETER Experiment Name: Zm_5mM_SA_P Parameter: Plant Line Value: 35A19
  misc_feature: MA Experiment 20000478 PARAMETER Experiment Name: Zm_5mM_SA_P Parameter: Timepoint (hr) Value: 72
  misc_feature: MA Experiment 20000478 PARAMETER Experiment Name: Zm_5mM_SA_P Parameter: Tissue Value: Aerial
  misc_feature: MA Experiment 20000478 PARAMETER Experiment Name: Zm_5mM_SA_P Parameter: Treatment Value: 5mM SA vs. No Treatment
  misc_feature: MA Experiment ID: 20000479 Result: Down-regulated in Transcription
  misc_feature: MA Experiment 20000479 PARAMETER Experiment Name: Zm_Drought_P Parameter: Age (day) Value: 10
  misc_feature: MA Experiment 20000479 PARAMETER Experiment Name: Zm_Drought_P Parameter: Organism Value: Zea mays
  misc_feature: MA Experiment 20000479 PARAMETER Experiment Name: Zm_Drought_P Parameter: Plant Line Value: 35A19
  misc_feature: MA Experiment 20000479 PARAMETER Experiment Name: Zm_Drought_P Parameter: Timepoint (hr) Value: 48
  misc_feature: MA Experiment 20000479 PARAMETER Experiment Name: Zm_Drought_P Parameter: Tissue Value: Aerial
  misc_feature: MA Experiment 20000479 PARAMETER Experiment Name: Zm_Drought_P Parameter: Treatment Value: Drought vs. No Drought
  misc_feature: MA Experiment ID: 20000480 Result: Down-regulated in Transcription
  misc_feature: MA Experiment 20000480 PARAMETER Experiment Name: Zm_Drought_P Parameter: Age (day) Value: 11
  misc_feature: MA Experiment 20000480 PARAMETER Experiment Name: Zm_Drought_P Parameter: Organism Value: Zea mays
  misc_feature: MA Experiment 20000480 PARAMETER Experiment Name: Zm_Drought_P Parameter: Plant Line Value: 35A19
  misc_feature: MA Experiment 20000480 PARAMETER Experiment Name: Zm_Drought_P Parameter: Timepoint (hr) Value: 72
  misc_feature: MA Experiment 20000480 PARAMETER Experiment Name: Zm_Drought_P Parameter: Tissue Value: Aerial
  misc_feature: MA Experiment 20000480 PARAMETER Experiment Name: Zm_Drought_P Parameter: Treatment Value: Drought vs. No Drought
  misc_feature: MA Experiment ID: 20000488 Result: Up-regulated in Transcription
  misc_feature: MA Experiment 20000488 PARAMETER Experiment Name: Zm_50mM_NH4NO3_L_to_H_P Parameter: Organism Value: Zea mays
  misc_feature: MA Experiment 20000488 PARAMETER Experiment Name: Zm_50mM_NH4NO3_L_to_H_P Parameter: Timepoint (hr) Value: 8
  misc_feature: MA Experiment 20000488 PARAMETER Experiment Name: Zm_50mM_NH4NO3_L_to_H_P Parameter: Tissue Value: Leaves
  misc_feature: MA Experiment 20000488 PARAMETER Experiment Name: Zm_50mM_NH4NO3_L_to_H_P Parameter: Treatment Value: 50mM NH4NO3 vs. 100mM Mannitol
ctgttcatttcctcctgctcccccctcctccctcccccccccctcctcgccgctcgccgttgaagaggtaggcccacgggccggcgagaatggaggcggcgacgatggcgtggacggcggcggtggtcggggcggggctggtgtactggttcgtctgggtgatgggcgcggcggaggtgaagggcaagcgggcggtggatctcaagatgggatccatcacgcgggacaaggtgcaggacaagtacacgcagtactggtccttcttccgccgccccaaggagacggccaccacggcggcgtcggcggagaaggtgccggccttcgtcgacaccttctacaacctcgtgaccgacatctacgagtgggggtggggccagtccttccacttctccccgtccctccccggccgctcccaccgcgacgccacgcgcgtccacgaggagcgcgtcgccgacctcctcggcgccaggccgggccaccgcctcctggacgtcggctgcggcgtcggcgggcccatgcgcgccatcgccgcgcactcggggatccaacgtcgtcggcatcaccatcaacgagtaccaggtgaaccgcgcccgcgcgcacaaccgcaaggccggcctcgactccccgcgctgcgaggtcgtctgcggcaacttcctctccatgccgttcccggacgcctccttcgacggcgcctactccatcgaggccacctgccacgcgcccaggctgcaggacgtgtacggcgaggtctaccgcgtgctcaagccggggggactctacgtctcctacgagtgggtcaccaccccgctgtaccgcgccgaggacccggaccacgtcgagtgcatccacggcatcgagcgcggcgacgcgctaccggggctccgccgccaggacgagatcgcgtccatcgctaaggaggtcgggttcgaggtgctcaaggagcaggacctggcgctgccccccgcgctgccctggtggacgcgcctcaagatgggccgcatcgcctactggcgcaactccctcgtcgtccgcgtgctcaccatgctccgggtcgcgcccaagggcgtctccgaggtgcacgagatgctgtacgagaccgcgcagcacctcacccgcggcggcgagaccggcatcttcacgcccatgcacatggtgctcctccgcaagcccgccgccgccgcctccaccgaggaggccaactagtgtaagactacacaccgccaccaatcagttactactcgcccaccgcaagggggagaaaatggggagggaggaaaaagatgcaagcagcagcagcaccagaggtaagaagagcaggctaatcggcgacttgaagaagttacaaattgatctattagagaagaagatactactaggaacgattcttctctccgtttactcttttccctgttcgtagctttgagttttaatttttgttttttggtggacggattgttccggggaggtcgaggttgggatctaaatttattttc

SEQ ID NO: 5493 - protein, 274 aa, Zea mays subsp. mays
  peptide (1)..(274): Ceres Seq. ID no. 13495155
  misc_feature (87)..(147): Pfam Name: ubiE/COQ5 methyltransferase family Pfam Description: ubiE/COQ5 methyltransferase family
  misc_feature (9)..(151): Homolog of NCBI NO: 7443717 NR Description: probable sterol 24-C-methyltransferase (EC
  misc_feature (1)..(150): Homolog of NCBI NO: 21555010 NR Description: sterol-C-methyltransferase [Arabidopsis thaliana]
  misc_feature (1)..(151): Homolog of NCBI NO: 3560533 NR Description: 24-methylene lophenol C24(1)methyltransferase
  misc_feature (82)..(151): Homolog of NCBI NO: 14192727 NR Description: S-adenosyl methionine:sterol methyl transferase
  misc_feature (79)..(150): Homolog of NCBI NO: 7443720 NR Description: probable sterol 24-C-methyltransferase (EC
  misc_feature (82)..(151): Homolog of NCBI NO: 12642580 NR Description: sterol methyl transferase [Pneumocystis carinii
  misc_feature (1)..(150): Homolog of NCBI NO: 7443718 NR Description: probable sterol 24-C-methyltransferase (EC
  misc_feature (79)..(150): Homolog of NCBI NO: 1872473 NR Description: delta-24-sterol methyltransferase [Triticum
  misc_feature (79)..(150): Homolog of NCBI NO: 7489677 NR Description: probable sterol 24-C-methyltransferase (EC
  misc_feature (1)..(150): Homolog of NCBI NO: 1061040 NR Description: sterol-C-methyltransferase [Arabidopsis thaliana]
MEAATMAWTAAVVGAGLVYWFVWVMGAAEVKGKRAVDLKMGSITRDKVQDKYTQYWSFFRRPKETATTAASAEKVPAFVDTFYNLVTDIYEWGWGQSFHFSPSLPGRSHRDATRVHEERVADLLGARPGHRLLDVGCGVGGPMRAIAAHSGIQRRRHHHQRVPGEPRPRAQPQGRPRLPALRGRLRQLPLHAVPGRLLRRRLLHRGHLPRAQAAGRVRRGLPRAQAGGTLRLLRVGHHPAVPRRGPGPRRVHPRHRARRRATGAPPPGRDRVHR

SEQ ID NO: 5494 - protein, 269 aa, Zea mays subsp. mays
  peptide (1)..(269): Ceres Seq. ID no. 13495156
  misc_feature (82)..(142): Pfam Name: ubiE/COQ5 methyltransferase family Pfam Description: ubiE/COQ5 methyltransferase family
  misc_feature (4)..(146): Homolog of NCBI NO: 7443717 NR Description: probable sterol 24-C-methyltransferase (EC
  misc_feature (1)..(145): Homolog of NCBI NO: 21555010 NR Description: sterol-C-methyltransferase [Arabidopsis thaliana]
  misc_feature (1)..(146): Homolog of NCBI NO: 3560533 NR Description: 24-methylene lophenol C24(1)methyltransferase
  misc_feature (77)..(146): Homolog of NCBI NO: 14192727 NR Description: S-adenosyl methionine:sterol methyl transferase
  misc_feature (74)..(145): Homolog of NCBI NO: 7443720 NR Description: probable sterol 24-C-methyltransferase (EC
  misc_feature (77)..(146): Homolog of NCBI NO: 12642580 NR Description: sterol methyl transferase [Pneumocystis carinii
  misc_feature (1)..(145): Homolog of NCBI NO: 7443718 NR Description: probable sterol 24-C-methyltransferase (EC
  misc_feature (74)..(145): Homolog of NCBI NO: 1872473 NR Description: delta-24-sterol methyltransferase [Triticum
  misc_feature (74)..(145): Homolog of NCBI NO: 7489677 NR Description: probable sterol 24-C-methyltransferase (EC
  misc_feature (1)..(145): Homolog of NCBI NO: 1061040 NR Description: sterol-C-methyltransferase [Arabidopsis thaliana]
MAWTAAVVGAGLVYWFVWVMGAAEVKGKRAVDLKMGSITRDKVQDKYTQYWSFFRRPKETATTAASAEKVPAFVDTFYNLVTDIYEWGWGQSFHFSPSLPGRSHRDATRVHEERVADLLGARPGHRLLDVGCGVGGPMRAIAAHSGIQRRRHHHQRVPGEPRPRAQPQGRPRLPALRGRLRQLPLHAVPGRLLRRRLLHRGHLPRAQAAGRVRRGLPRAQAGGTLRLLRVGHHPAVPRRGPGPRRVHPRHRARRRATGAPPPGRDRVHR

SEQ ID NO: 5495 - protein, 250 aa, Zea mays subsp. mays
  peptide (1)..(250): Ceres Seq. ID no. 13495157
  misc_feature (63)..(123): Pfam Name: ubiE/COQ5 methyltransferase family Pfam Description: ubiE/COQ5 methyltransferase family
  misc_feature (1)..(127): Homolog of NCBI NO: 7443717 NR Description: probable sterol 24-C-methyltransferase (EC
  misc_feature (1)..(126): Homolog of NCBI NO: 21555010 NR Description: sterol-C-methyltransferase [Arabidopsis thaliana]
  misc_feature (1)..(127): Homolog of NCBI NO: 3560533 NR Description: 24-methylene lophenol C24(1)methyltransferase
  misc_feature (58)..(127): Homolog of NCBI NO: 14192727 NR Description: S-adenosyl methionine:sterol methyl transferase
  misc_feature (55)..(126): Homolog of NCBI NO: 7443720 NR Description: probable sterol 24-C-methyltransferase (EC
  misc_feature (58)..(127): Homolog of NCBI NO: 12642580 NR Description: sterol methyl transferase [Pneumocystis carinii
  misc_feature (1)..(126): Homolog of NCBI NO: 7443718 NR Description: probable sterol 24-C-methyltransferase (EC
  misc_feature (55)..(126): Homolog of NCBI NO: 1872473 NR Description: delta-24-sterol methyltransferase [Triticum
  misc_feature (55)..(126): Homolog of NCBI NO: 7489677 NR Description: probable sterol 24-C-methyltransferase (EC
  misc_feature (1)..(126): Homolog of NCBI NO: 1061040 NR Description: sterol-C-methyltransferase [Arabidopsis thaliana]
MGAAEVKGKRAVDLKMGSITRDKVQDKYTQYWSFFRRPKETATTAASAEKVPAFVDTFYNLVTDIYEWGWGQSFHFSPSLPGRSHRDATRVHEERVADLLGARPGHRLLDVGCGVGGPMRAIAAHSGIQRRRHHHQRVPGEPRPRAQPQGRPRLPALRGRLRQLPLHAVPGRLLRRRLLHRGHLPRAQAAGRVRRGLPRAQAGGTLRLLRVGHHPAVPRRGPGPRRVHPRHRARRRATGAPPPGRDRVHR

SEQ ID NO: 5496 - DNA, 1681 bp, Zea mays subsp. mays
  misc_feature (1)..(1681): Ceres Seq. ID no. 13498741
  misc_feature: MA Experiment ID: 108504 Result: Up-regulated in Transcription
  misc_feature: MA Experiment 108504 PARAMETER Experiment Name: Zm_Drought_P Parameter: Age (day) Value: 8
  misc_feature: MA Experiment 108504 PARAMETER Experiment Name: Zm_Drought_P Parameter: Organism Value: Zea mays
  misc_feature: MA Experiment 108504 PARAMETER Experiment Name: Zm_Drought_P Parameter: Plant Line Value: 35A19
  misc_feature: MA Experiment 108504 PARAMETER Experiment Name: Zm_Drought_P Parameter: Timepoint (hr) Value: 12
  misc_feature: MA Experiment 108504 PARAMETER Experiment Name: Zm_Drought_P Parameter: Tissue Value: Aerial
  misc_feature: MA Experiment 108504 PARAMETER Experiment Name: Zm_Drought_P Parameter: Treatment Value: Drought vs. No Drought
  misc_feature: MA Experiment ID: 108515 Result: Up-regulated in Transcription
  misc_feature: MA Experiment 108515 PARAMETER Experiment Name: Zm_2mM_SA_P Parameter: Age (day) Value: 8
  misc_feature: MA Experiment 108515 PARAMETER Experiment Name: Zm_2mM_SA_P Parameter: Organism Value: Zea mays
  misc_feature: MA Experiment 108515 PARAMETER Experiment Name: Zm_2mM_SA_P Parameter: Plant Line Value: 35A19
  misc_feature: MA Experiment 108515 PARAMETER Experiment Name: Zm_2mM_SA_P Parameter: Timepoint (hr) Value: 12
  misc_feature: MA Experiment 108515 PARAMETER Experiment Name: Zm_2mM_SA_P Parameter: Tissue Value: Aerial
  misc_feature: MA Experiment 108515 PARAMETER Experiment Name: Zm_2mM_SA_P Parameter: Treatment Value: 2mM SA vs. No Treatment
  misc_feature: MA Experiment ID: 108522 Result: Up-regulated in Transcription
  misc_feature: MA Experiment 108522 PARAMETER Experiment Name: Zm_42deg_Heat_P Parameter: Age (day) Value: 8
  misc_feature: MA Experiment 108522 PARAMETER Experiment Name: Zm_42deg_Heat_P Parameter: Organism Value: Zea mays
  misc_feature: MA Experiment 108522 PARAMETER Experiment Name: Zm_42deg_Heat_P Parameter: Plant Line Value: 35A19
  misc_feature: MA Experiment 108522 PARAMETER Experiment Name: Zm_42deg_Heat_P Parameter: Temperature (deg C) Value: 42 vs. 22
  misc_feature: MA Experiment 108522 PARAMETER Experiment Name: Zm_42deg_Heat_P Parameter: Timepoint (hr) Value: 1
  misc_feature: MA Experiment 108522 PARAMETER Experiment Name: Zm_42deg_Heat_P Parameter: Tissue Value: Aerial
  misc_feature: MA Experiment ID: 108527 Result: Up-regulated in Transcription
  misc_feature: MA Experiment 108527 PARAMETER Experiment Name: Zm_5mM_NO_P Parameter: Age (day) Value: 8
  misc_feature: MA Experiment 108527 PARAMETER Experiment Name: Zm_5mM_NO_P Parameter: Organism Value: Zea mays
  misc_feature: MA Experiment 108527 PARAMETER Experiment Name: Zm_5mM_NO_P Parameter: Plant Line Value: 35A19
  misc_feature: MA Experiment 108527 PARAMETER Experiment Name: Zm_5mM_NO_P Parameter: Timepoint (hr) Value: 6
  misc_feature: MA Experiment 108527 PARAMETER Experiment Name: Zm_5mM_NO_P Parameter: Tissue Value: Aerial
  misc_feature: MA Experiment 108527 PARAMETER Experiment Name: Zm_5mM_NO_P Parameter: Treatment Value: 5mM NO vs. No Treatment
  misc_feature: MA Experiment ID: 108528 Result: Down-regulated in Transcription
  misc_feature: MA Experiment 108528 PARAMETER Experiment Name: Zm_Imbibed_Seeds_P Parameter: Age (day) Value: 5 vs. 2
  misc_feature: MA Experiment 108528 PARAMETER Experiment Name: Zm_Imbibed_Seeds_P Parameter: Organism Value: Zea mays
  misc_feature: MA Experiment 108528 PARAMETER Experiment Name: Zm_Imbibed_Seeds_P Parameter: Plant Line Value: 35A19
  misc_feature: MA Experiment 108528 PARAMETER Experiment Name: Zm_Imbibed_Seeds_P Parameter: Tissue Value: Aerial vs. Embryo
  misc_feature: MA Experiment ID: 108530 Result: Down-regulated in Transcription
  misc_feature: MA Experiment 108530 PARAMETER Experiment Name: Zm_Imbibed_Seeds_P Parameter: Age (day) Value: 6 vs. 2
  misc_feature: MA Experiment 108530 PARAMETER Experiment Name: Zm_Imbibed_Seeds_P Parameter: Organism Value: Zea mays
  misc_feature: MA Experiment 108530 PARAMETER Experiment Name: Zm_Imbibed_Seeds_P Parameter: Plant Line Value: 35A19
  misc_feature: MA Experiment 108530 PARAMETER Experiment Name: Zm_Imbibed_Seeds_P Parameter: Tissue Value: Aerial vs. Embryo
  misc_feature: MA Experiment ID: 108534 Result: Down-regulated in Transcription
  misc_feature: MA Experiment 108534 PARAMETER Experiment Name: Zm_4deg_Cold_P Parameter: Age (hr) Value: 8
  misc_feature: MA Experiment 108534 PARAMETER Experiment Name: Zm_4deg_Cold_P Parameter: Organism Value: Zea mays
  misc_feature: MA Experiment 108534 PARAMETER Experiment Name: Zm_4deg_Cold_P Parameter: Plant Line Value: 35A19
  misc_feature: MA Experiment 108534 PARAMETER Experiment Name: Zm_4deg_Cold_P Parameter: Temperature (deg C) Value: 4 vs. 22
  misc_feature: MA Experiment 108534 PARAMETER Experiment Name: Zm_4deg_Cold_P Parameter: Timepoint (hr) Value: 6
  misc_feature: MA Experiment 108534 PARAMETER Experiment Name: Zm_4deg_Cold_P Parameter: Tissue Value: Aerial
  misc_feature: MA Experiment ID: 108535 Result: Down-regulated in Transcription
  misc_feature: MA Experiment 108535 PARAMETER Experiment Name: Zm_Meristem_P Parameter: Age (day) Value: 8
  misc_feature: MA Experiment 108535 PARAMETER Experiment Name: Zm_Meristem_P Parameter: Organism Value: Zea mays
  misc_feature: MA Experiment 108535 PARAMETER Experiment Name: Zm_Meristem_P Parameter: Plant Line Value: 35A19
  misc_feature: MA Experiment 108535 PARAMETER Experiment Name: Zm_Meristem_P Parameter: Tissue Value: Root Meristem vs. Above Root Meristem
  misc_feature: MA Experiment ID: 108536 Result: Up-regulated in Transcription
  misc_feature: MA Experiment 108536 PARAMETER Experiment Name: Zm_Meristem_P Parameter: Age (day) Value: 8
  misc_feature: MA Experiment 108536 PARAMETER Experiment Name: Zm_Meristem_P Parameter: Organism Value: Zea mays
  misc_feature: MA Experiment 108536 PARAMETER Experiment Name: Zm_Meristem_P Parameter: Plant Line Value: 35A19
  misc_feature: MA Experiment 108536 PARAMETER Experiment Name: Zm_Meristem_P Parameter: Tissue Value: Shoot Meristem vs. Above Shoot Meristem
  misc_feature: MA Experiment ID: 108542 Result: Up-regulated in Transcription
  misc_feature: MA Experiment 108542 PARAMETER Experiment Name: Zm_150mM_NaCl_P Parameter: Age (day) Value: 8
  misc_feature: MA Experiment 108542 PARAMETER Experiment Name: Zm_150mM_NaCl_P Parameter: Organism Value: Zea mays
  misc_feature: MA Experiment 108542 PARAMETER Experiment Name: Zm_150mM_NaCl_P Parameter: Plant Line Value: 35A19
  misc_feature: MA Experiment 108542 PARAMETER Experiment Name: Zm_150mM_NaCl_P Parameter: Timepoint (hr) Value: 6
  misc_feature: MA Experiment 108542 PARAMETER Experiment Name: Zm_150mM_NaCl_P Parameter: Tissue Value: Aerial
  misc_feature: MA Experiment 108542 PARAMETER Experiment Name: Zm_150mM_NaCl_P Parameter: Treatment Value: 150mM NaCl vs. No Treatment
  misc_feature: MA Experiment ID: 108543 Result: Down-regulated in Transcription
  misc_feature: MA Experiment ID: 108556 Result: Up-regulated in Transcription
  misc_feature: MA Experiment 108556 PARAMETER Experiment Name: Zm_Drought_P Parameter: Age (day) Value: 9
  misc_feature: MA Experiment 108556 PARAMETER Experiment Name: Zm_Drought_P Parameter: Organism Value: Zea mays
  misc_feature: MA Experiment 108556 PARAMETER Experiment Name: Zm_Drought_P Parameter: Plant Line Value: 35A19
  misc_feature: MA Experiment 108556 PARAMETER Experiment Name: Zm_Drought_P Parameter: Timepoint (hr) Value: 24
  misc_feature: MA Experiment 108556 PARAMETER Experiment Name: Zm_Drought_P Parameter: Tissue Value: Aerial
  misc_feature: MA Experiment 108556 PARAMETER Experiment Name: Zm_Drought_P Parameter: Treatment Value: Drought vs. No Drought
  misc_feature: MA Experiment ID: 108559 Result: Up-regulated in Transcription
  misc_feature: MA Experiment 108559 PARAMETER Experiment Name: Zm_5mM_NO_P Parameter: Age (day) Value: 8
  misc_feature: MA Experiment 108559 PARAMETER Experiment Name: Zm_5mM_NO_P Parameter: Organism Value: Zea mays
  misc_feature: MA Experiment 108559 PARAMETER Experiment Name: Zm_5mM_NO_P Parameter: Plant Line Value: 35A19
  misc_feature: MA Experiment 108559 PARAMETER Experiment Name: Zm_5mM_NO_P Parameter: Timepoint (hr) Value: 12
  misc_feature: MA Experiment 108559 PARAMETER Experiment Name: Zm_5mM_NO_P Parameter: Tissue Value: Aerial
  misc_feature: MA Experiment 108559 PARAMETER Experiment Name: Zm_5mM_NO_P Parameter: Treatment Value: 5mM NO vs. No Treatment
  misc_feature: MA Experiment ID: 108597 Result: Up-regulated in Transcription
  misc_feature: MA Experiment 108597 PARAMETER Experiment Name: Zm_100uM_ABA_P Parameter: Age (day) Value: 9
  misc_feature: MA Experiment 108597 PARAMETER Experiment Name: Zm_100uM_ABA_P Parameter: Organism Value: Zea mays
  misc_feature: MA Experiment 108597 PARAMETER Experiment Name: Zm_100uM_ABA_P Parameter: Plant Line Value: 35A19
  misc_feature: MA Experiment 108597 PARAMETER Experiment Name: Zm_100uM_ABA_P Parameter: Timepoint (hr) Value: 24
  misc_feature: MA Experiment 108597 PARAMETER Experiment Name: Zm_100uM_ABA_P Parameter: Tissue Value: Aerial
  misc_feature: MA Experiment 108597 PARAMETER Experiment Name: Zm_100uM_ABA_P Parameter: Treatment Value: 100uM ABA vs. No Treatment
  misc_feature: MA Experiment ID: 108688 Result: Down-regulated in Transcription
  misc_feature: MA Experiment 108688 PARAMETER Experiment Name: Zm_Embryos-Flowers__P Parameter: Tissue Value: Immature Flowers vs. Aerial+
  misc_feature: MA Experiment ID: 20000478 Result: Up-regulated in Transcription
  misc_feature: MA Experiment 20000478 PARAMETER Experiment Name: Zm_5mM_SA_P Parameter: Age (day) Value: 11
  misc_feature: MA Experiment 20000478 PARAMETER Experiment Name: Zm_5mM_SA_P Parameter: Organism Value: Zea mays
  misc_feature: MA Experiment 20000478 PARAMETER Experiment Name: Zm_5mM_SA_P Parameter: Plant Line Value: 35A19
  misc_feature: MA Experiment 20000478 PARAMETER Experiment Name: Zm_5mM_SA_P Parameter: Timepoint (hr) Value: 72
  misc_feature: MA Experiment 20000478 PARAMETER Experiment Name: Zm_5mM_SA_P Parameter: Tissue Value: Aerial
  misc_feature: MA Experiment 20000478 PARAMETER Experiment Name: Zm_5mM_SA_P Parameter: Treatment Value: 5mM SA vs. No Treatment
  misc_feature: MA Experiment ID: 20000479 Result: Up-regulated in Transcription
  misc_feature: MA Experiment 20000479 PARAMETER Experiment Name: Zm_Drought_P Parameter: Age (day) Value: 10
  misc_feature: MA Experiment 20000479 PARAMETER Experiment Name: Zm_Drought_P Parameter: Organism Value: Zea mays
  misc_feature: MA Experiment 20000479 PARAMETER Experiment Name: Zm_Drought_P Parameter: Plant Line Value: 35A19
  misc_feature: MA Experiment 20000479 PARAMETER Experiment Name: Zm_Drought_P Parameter: Timepoint (hr) Value: 48
  misc_feature: MA Experiment 20000479 PARAMETER Experiment Name: Zm_Drought_P Parameter: Tissue Value: Aerial
  misc_feature: MA Experiment 20000479 PARAMETER Experiment Name: Zm_Drought_P Parameter: Treatment Value: Drought vs. No Drought
  misc_feature: MA Experiment ID: 20000480 Result: Up-regulated in Transcription
  misc_feature: MA Experiment 20000480 PARAMETER Experiment Name: Zm_Drought_P Parameter: Age (day) Value: 11
  misc_feature: MA Experiment 20000480 PARAMETER Experiment Name: Zm_Drought_P Parameter: Organism Value: Zea mays
  misc_feature: MA Experiment 20000480 PARAMETER Experiment Name: Zm_Drought_P Parameter: Plant Line Value: 35A19
  misc_feature: MA Experiment 20000480 PARAMETER Experiment Name: Zm_Drought_P Parameter: Timepoint (hr) Value: 72
  misc_feature: MA Experiment 20000480 PARAMETER Experiment Name: Zm_Drought_P Parameter: Tissue Value: Aerial
  misc_feature: MA Experiment 20000480 PARAMETER Experiment Name: Zm_Drought_P Parameter: Treatment Value: Drought vs. No Drought
  misc_feature: MA Experiment ID: 20000488 Result: Down-regulated in Transcription
  misc_feature: MA Experiment 20000488 PARAMETER Experiment Name: Zm_50mM_NH4NO3_L_to_H_P Parameter: Organism Value: Zea mays
  misc_feature: MA Experiment 20000488 PARAMETER Experiment Name: Zm_50mM_NH4NO3_L_to_H_P Parameter: Timepoint (hr) Value: 8
  misc_feature: MA Experiment 20000488 PARAMETER Experiment Name: Zm_50mM_NH4NO3_L_to_H_P Parameter: Tissue Value: Leaves
  misc_feature: MA Experiment 20000488 PARAMETER Experiment Name: Zm_50mM_NH4NO3_L_to_H_P Parameter: Treatment Value: 50mM NH4NO3 vs. 100mM Mannitol
  misc_feature: MA Experiment ID: 20000492 Result: Up-regulated in Transcription
  misc_feature: MA Experiment 20000492 PARAMETER Experiment Name: Zm_Hybrid_Seed_Dev_P Parameter: DAP Value: 12
  misc_feature: MA Experiment 20000492 PARAMETER Experiment Name: Zm_Hybrid_Seed_Dev_P Parameter: Organism Value: Zea mays
  misc_feature: MA Experiment 20000492 PARAMETER Experiment Name: Zm_Hybrid_Seed_Dev_P Parameter: Plant Line Value: 35A19
  misc_feature: MA Experiment 20000492 PARAMETER Experiment Name: Zm_Hybrid_Seed_Dev_P Parameter: Tissue Value: Fert Kernel vs. Unfert Floret
  misc_feature: MA Experiment ID: 20000532 Result: Up-regulated in Transcription
  misc_feature: MA Experiment 20000532 PARAMETER Experiment Name: Zm_0.001percent_MeJA_P Parameter: Age (day) Value: 10
  misc_feature: MA Experiment 20000532 PARAMETER Experiment Name: Zm_0.001percent_MeJA_P Parameter: Organism Value: Zea mays
  misc_feature: MA Experiment 20000532 PARAMETER Experiment Name: Zm_0.001percent_MeJA_P Parameter: Plant Line Value: 35A19
  misc_feature: MA Experiment 20000532 PARAMETER Experiment Name: Zm_0.001percent_MeJA_P Parameter: Timepoint (hr) Value: 48
  misc_feature: MA Experiment 20000532 PARAMETER Experiment Name: Zm_0.001percent_MeJA_P Parameter: Tissue Value: Aerial
  misc_feature: MA Experiment 20000532 PARAMETER Experiment Name: Zm_0.001percent_MeJA_P Parameter: Treatment Value: 0.001percent MeJA vs. No Treatment
  misc_feature: MA Experiment ID: 20000533 Result: Up-regulated in Transcription
  misc_feature: MA Experiment 20000533 PARAMETER Experiment Name: Zm_0.001percent_MeJA_P Parameter: Age (day) Value: 11
  misc_feature: MA Experiment 20000533 PARAMETER Experiment Name: Zm_0.001percent_MeJA_P Parameter: Organism Value: Zea mays
  misc_feature: MA Experiment 20000533 PARAMETER Experiment Name: Zm_0.001percent_MeJA_P Parameter: Plant Line Value: 35A19
  misc_feature: MA Experiment 20000533 PARAMETER Experiment Name: Zm_0.001percent_MeJA_P Parameter: Timepoint (hr) Value: 72
  misc_feature: MA Experiment 20000533 PARAMETER Experiment Name: Zm_0.001percent_MeJA_P Parameter: Tissue Value: Aerial
  misc_feature: MA Experiment 20000533 PARAMETER Experiment Name: Zm_0.001percent_MeJA_P Parameter: Treatment Value: 0.001percent MeJA vs. No Treatment
  misc_feature: MA Experiment ID: 20000535 Result: Up-regulated in Transcription
  misc_feature: MA Experiment 20000535 PARAMETER Experiment Name: Zm_Hybrid_Seed_Dev_P Parameter: DAP Value: 30 vs. 12
  misc_feature: MA Experiment 20000535 PARAMETER Experiment Name: Zm_Hybrid_Seed_Dev_P Parameter: Organism Value: Zea mays
  misc_feature: MA Experiment 20000535 PARAMETER Experiment Name: Zm_Hybrid_Seed_Dev_P Parameter: Plant Line Value: 35A19
  misc_feature: MA Experiment 20000535 PARAMETER Experiment Name: Zm_Hybrid_Seed_Dev_P Parameter: Tissue Value: Embryo vs. Unfert Floret
  misc_feature: MA Experiment ID: 20000626 Result: Up-regulated in Transcription
  misc_feature: MA Experiment 20000626 PARAMETER Experiment Name: Zm_Herbicide-Treatments_P Parameter: Timepoint (hr) Value: 12
  misc_feature: MA Experiment 20000626 PARAMETER Experiment Name: Zm_Herbicide-Treatments_P Parameter: Tissue Value: Aerial
  misc_feature: MA Experiment 20000626 PARAMETER Experiment Name: Zm_Herbicide-Treatments_P Parameter: Treatment Value: Roundup vs. No Treatment
atctattgaactccactcacagacagcagccacagcggagcttaattagcaatcattgactatgggtgcgctcttgccatggctggcatggttgctcgtctccctcgtcggcgtctacctcctcggccatctcgtgcaggcccgtcgtcgtcgtggtctaccgccgggaccccacccgctgcccatcatcggcagcctccacctgctcggtaaccaaccgcaccgctccctcgccaggctcgccaagacccacggcccgctcgtgtcgctccgcctgggctcggtgaccacggtggtcgcctcctccccggccgccgcccgggagatcctgcagcggcacgacgccgccttcagcaacaggtccgtgccggacgccccgggcgcccacgccaggaactccacggtgtggctgcccaacgcgccgcgctggcgcgcgctgcggaagatcatgggcacgcagctgttcgcgccgcacaggctggacgcgctccagcacctccggcgcgacaaggcgcgggagctcgtggaccacgtgcggcggctggcgcgcaggggcgagcccgtgaacgtcggccgcgtcgccttcaccaccagcctcaacctcgtctcgcgcaccatcttctcccgcgacctggccagcctcgaggacgacggcgcgtccaggaagttccaggaggtggtgacggacatcatggaggccgtgggcagccccaacgtctccgacttcttcccggcgctcgccgttgccgacctgcagggctgccggcgtcggctggcgcggctgttcgcgcggctgcaccggatcttcgacgaagagatcgacgcgaggctgcgtggccgcgacgctggcgagcccaagaagaacgacttcctcgacctgctgctggacgccgcagaggacgatgacaacacggccggcctggatcgcgacacgctccgttcactcttcacggacttgttttctgctgggagtgacacaagctccagctcagtggaatgggcaatggtggagctgcttcgaagccccggcttcaatggctaaagcatgcgacgagcttgcaacagtcatcggcccaagaaaagacatcgaggaatctgatattgggcggctgccctacctccaagccgtggtgaaagagaccttcaggctgcatcctgctgccccgctgttgctaccgcggcgtgcccaggccgacgtgaagatgatgggctacgtgattcccgaaggttctcgagtgttcgtaaacgtatgggcgatgggtcgagacgaggagacgtggcctgagcctgagaagtttttgcccgagaggttcctggggaagaagacgcagcaggcggttgatctcaggggcggggacttcgatctcatcccgttcggtggaggacgccggatctgccctgggatgccgctggcgatcaggatggtgcatctgctgcttgcgtcgctcttgaatcagtttgcatggaggcttccggctgagctagagaggaatggagttgacatggctgagaatttcggcatcacgttgaccaaggccgtgcctctttgtgctatagccacagagatctgagtcggcaagctattctattctagttaactattctatggtcgatatatgtacatgtatccttatcaaatttcgaaataaacttagcaaataggttagaggatgtttggttc

SEQ ID NO: 5497 - protein, 326 aa, Zea mays subsp. mays
  peptide (1)..(326): Ceres Seq. ID no. 13498742
  misc_feature (34)..(326): Pfam Name: Cytochrome P450 Pfam Description: Cytochrome P450
  misc_feature (1)..(326): Homolog of NCBI NO: 37531412 NR Description: putative cytochrome P450 [Oryza sativa (japonica group)] >gi|21672008|gb|AAM74370.1| Putative cytochrome P450
  misc_feature (4)..(326): Homolog of NCBI NO: 37531380 NR Description: putative Cytochrome P450 [Oryza sativa (japonica group)] >gi|15217274|gb|AAK92618.1| Putative Cytochrome P450 sativa] >gi|31430353|gb|AAP52279.1| putative Cytochrome P450
  misc_feature (5)..(322): Homolog of NCBI NO: 37531420 NR Description: putative cytochrome P450 [Oryza sativa (japonica group)] >gi|21672004|gb|AAM74366.1| Putative cytochrome P450
  misc_feature (3)..(308): Homolog of NCBI NO: 37531420 NR Description: putative cytochrome P450 [Oryza sativa (japonica group)] >gi|21672004|gb|AAM74366.1| Putative cytochrome P450
  misc_feature (27)..(322): Homolog of NCBI NO: 17065916 NR Description: geraniol 10-hydroxylase [Catharanthus roseus]
  misc_feature (4)..(322): Homolog of NCBI NO: 7406712 NR Description: putative ripening-related P-450 enzyme [Vitis
  misc_feature (3)..(322): Homolog of NCBI NO: 15225512 NR Description: cytochrome p450 family [Arabidopsis thaliana]
  misc_feature (18)..(322): Homolog of NCBI NO: 27529728 NR Description: cytochrome P450 [Petunia x hybrida]
  misc_feature (7)..(322): Homolog of NCBI NO: 33320161 NR Description: cytochrome P450 [Pastinaca sativa]
  misc_feature (11)..(322): Homolog of NCBI NO: 3929333 NR Description: Cytochrome P450 76B1 (7-ethoxycoumarin
MGALLPWLAWLLVSLVGVYLLGHLVQARRRRGLPPGPHPLPIIGSLHLLGNQPHRSLARLAKTHGPLVSLRLGSVTTVVASSPAAAREILQRHDAAFSNRSVPDAPGAHARNSTVWLPNAPRWRALRKIMGTQLFAPHRLDALQHLRRDKARELVDHVRRLARRGEPVNVGRVAFTTSLNLVSRTIFSRDLASLEDDGASRKFQEVVTDIMEAVGSPNVSDFFPALAVADLQGCRRRLARLFARLHRIFDEEIDARLRGRDAGEPKKNDFLDLLLDAAEDDDNTAGLDRDTLRSLFTDLFSAGSDTSSSSVEWAMVELLRSPGFNG

SEQ ID NO: 5498 - protein, 222 aa, Zea mays subsp. mays
  peptide (1)..(222): Ceres Seq. ID no. 13498743
  misc_feature (42)..(217): Pfam Name: Cytochrome P450 Pfam Description: Cytochrome P450
  misc_feature (42)..(219): Homolog of NCBI NO: 37531412 NR Description: putative cytochrome P450 [Oryza sativa (japonica group)] >gi|21672008|gb|AAM74370.1| Putative cytochrome P450
  misc_feature (44)..(220): Homolog of NCBI NO: 37531380 NR Description: putative Cytochrome P450 [Oryza sativa (japonica group)] >gi|15217274|gb|AAK92618.1| Putative Cytochrome P450 sativa] >gi|31430353|gb|AAP52279.1| putative Cytochrome P450
  misc_feature (42)..(211): Homolog of NCBI NO: 37531420 NR Description: putative cytochrome P450 [Oryza sativa (japonica group)] >gi|21672004|gb|AAM74366.1| Putative cytochrome P450
  misc_feature (14)..(222): Homolog of NCBI NO: 17065916 NR Description: geraniol 10-hydroxylase [Catharanthus roseus]
  misc_feature (42)..(222): Homolog of NCBI NO: 7406712 NR Description: putative ripening-related P-450 enzyme [Vitis
  misc_feature (42)..(218): Homolog of NCBI NO: 15225512 NR Description: cytochrome p450 family [Arabidopsis thaliana]
  misc_feature (42)..(212): Homolog of NCBI NO: 27529728 NR Description: cytochrome P450 [Petunia x hybrida]
  misc_feature (42)..(220): Homolog of NCBI NO: 33320161 NR Description: cytochrome P450 [Pastinaca sativa]
  misc_feature (42)..(218): Homolog of NCBI NO: 3929333 NR Description: Cytochrome P450 76B1 (7-ethoxycoumarin
  misc_feature (42)..(218): Homolog of NCBI NO: 7430634 NR Description: cytochrome P450 76B1, xenobiotic-inducible -
MTTRPAWIATRSVHSSRTCFLLGVTQAPAQWNGQWWSCFEAPASMAKACDELATVIGPRKDIEESDIGRLPYLQAVVKETFRLHPAAPLLLPRRAQADVKMMGYVIPEGSRVFVNVWAMGRDEETWPEPEKFLPERFLGKKTQQAVDLRGGDFDLIPFGGGRRICPGMPLAIRMVHLLLASLLNQFAWRLPAELERNGVDMAENFGITLTKAVPLCAIATEI

SEQ ID NO: 5499 - protein, 197 aa, Zea mays subsp. mays
  peptide (1)..(197): Ceres Seq. ID no. 13498744
  misc_feature (1)..(197): Pfam Name: Cytochrome P450 Pfam Description: Cytochrome P450
  misc_feature (1)..(179): Homolog of NCBI NO: 37531420 NR Description: putative cytochrome P450 [Oryza sativa (japonica group)] >gi|21672004|gb|AAM74366.1| Putative cytochrome P450
  misc_feature (1)..(193): Homolog of NCBI NO: 17065916 NR Description: geraniol 10-hydroxylase [Catharanthus roseus]
  misc_feature (1)..(193): Homolog of NCBI NO: 7406712 NR Description: putative ripening-related P-450 enzyme [Vitis
  misc_feature (1)..(193): Homolog of NCBI NO: 15225512 NR Description: cytochrome p450 family [Arabidopsis thaliana]
  misc_feature (1)..(197): Homolog of NCBI NO: 37531380 NR Description: putative Cytochrome P450 [Oryza sativa (japonica group)] >gi|15217274|gb|AAK92618.1| Putative Cytochrome P450 sativa] >gi|31430353|gb|AAP52279.1| putative Cytochrome P450
  misc_feature (1)..(193): Homolog of NCBI NO: 37531420 NR Description: putative cytochrome P450 [Oryza sativa (japonica group)] >gi|21672004|gb|AAM74366.1| Putative cytochrome P450
  misc_feature (1)..(197): Homolog of NCBI NO: 37531412 NR Description: putative cytochrome P450 [Oryza sativa (japonica group)] >gi|21672008|gb|AAM74370.1| Putative cytochrome P450
  misc_feature (1)..(193): Homolog of NCBI NO: 27529728 NR Description: cytochrome P450 [Petunia x hybrida]
  misc_feature (1)..(193): Homolog of NCBI NO: 33320161 NR Description: cytochrome P450 [Pastinaca sativa]
  misc_feature (1)..(193): Homolog of NCBI NO: 3929333 NR Description: Cytochrome P450 76B1 (7-ethoxycoumarin
MGTQLFAPHRLDALQHLRRDKARELVDHVRRLARRGEPVNVGRVAFTTSLNLVSRTIFSRDLASLEDDGASRKFQEVVTDIMEAVGSPNVSDFFPALAVADLQGCRRRLARLFARLHRIFDEEIDARLRGRDAGEPKKNDFLDLLLDAAEDDDNTAGLDRDTLRSLFTDLFSAGSDTSSSSVEWAMVELLRSPGFNG

SEQ ID NO: 5500 - DNA, 1421 bp, Zea mays subsp. mays
  misc_feature (1)..(1421): Ceres Seq. ID no. 12405097
  misc_feature: MA Experiment ID: 108522 Result: Up-regulated in Transcription
  misc_feature: MA Experiment 108522 PARAMETER Experiment Name: Zm_42deg_Heat_P Parameter: Age (day) Value: 8
  misc_feature: MA Experiment 108522 PARAMETER Experiment Name: Zm_42deg_Heat_P Parameter: Organism Value: Zea mays
  misc_feature: MA Experiment 108522 PARAMETER Experiment Name: Zm_42deg_Heat_P Parameter: Plant Line Value: 35A19
  misc_feature: MA Experiment 108522 PARAMETER Experiment Name: Zm_42deg_Heat_P Parameter: Temperature (deg C) Value: 42 vs. 22
  misc_feature: MA Experiment 108522 PARAMETER Experiment Name: Zm_42deg_Heat_P Parameter: Timepoint (hr) Value: 1
  misc_feature: MA Experiment 108522 PARAMETER Experiment Name: Zm_42deg_Heat_P Parameter: Tissue Value: Aerial
  misc_feature: MA Experiment ID: 108523 Result: Up-regulated in Transcription
  misc_feature: MA Experiment 108523 PARAMETER Experiment Name: Zm_42deg_Heat_P Parameter: Age (day) Value: 8
  misc_feature: MA Experiment 108523 PARAMETER Experiment Name: Zm_42deg_Heat_P Parameter: Organism Value: Zea mays
  misc_feature: MA Experiment 108523 PARAMETER Experiment Name: Zm_42deg_Heat_P Parameter: Plant Line Value: 35A19
  misc_feature: MA Experiment 108523 PARAMETER Experiment Name: Zm_42deg_Heat_P Parameter: Temperature (deg C) Value: 42 vs. 22
  misc_feature: MA Experiment 108523 PARAMETER Experiment Name: Zm_42deg_Heat_P Parameter: Timepoint (hr) Value: 6
  misc_feature: MA Experiment 108523 PARAMETER Experiment Name: Zm_42deg_Heat_P Parameter: Tissue Value: Aerial
  misc_feature: MA Experiment ID: 108527 Result: Up-regulated in Transcription
  misc_feature: MA Experiment 108527 PARAMETER Experiment Name: Zm_5mM_NO_P Parameter: Age (day) Value: 8
  misc_feature: MA Experiment 108527 PARAMETER Experiment Name: Zm_5mM_NO_P Parameter: Organism Value: Zea mays
  misc_feature: MA Experiment 108527 PARAMETER Experiment Name: Zm_5mM_NO_P Parameter: Plant Line Value: 35A19
  misc_feature: MA Experiment 108527 PARAMETER Experiment Name: Zm_5mM_NO_P Parameter: Timepoint (hr) Value: 6
  misc_feature: MA Experiment 108527 PARAMETER Experiment Name: Zm_5mM_NO_P Parameter: Tissue Value: Aerial
  misc_feature: MA Experiment 108527 PARAMETER Experiment Name: Zm_5mM_NO_P Parameter: Treatment Value: 5mM NO vs. No Treatment
  misc_feature: MA Experiment ID: 108556 Result: Up-regulated in Transcription
  misc_feature: MA Experiment 108556 PARAMETER Experiment Name: Zm_Drought_P Parameter: Age (day) Value: 9
  misc_feature: MA Experiment 108556 PARAMETER Experiment Name: Zm_Drought_P Parameter: Organism Value: Zea mays
  misc_feature: MA Experiment 108556 PARAMETER Experiment Name: Zm_Drought_P Parameter: Plant Line Value: 35A19
  misc_feature: MA Experiment 108556 PARAMETER Experiment Name: Zm_Drought_P Parameter: Timepoint (hr) Value: 24
  misc_feature: MA Experiment 108556 PARAMETER Experiment Name: Zm_Drought_P Parameter: Tissue Value: Aerial
  misc_feature: MA Experiment 108556 PARAMETER Experiment Name: Zm_Drought_P Parameter: Treatment Value: Drought vs. No Drought
  misc_feature: MA Experiment ID: 20000480 Result: Up-regulated in Transcription
  misc_feature: MA Experiment 20000480 PARAMETER Experiment Name: Zm_Drought_P Parameter: Age (day) Value: 11
  misc_feature: MA Experiment 20000480 PARAMETER Experiment Name: Zm_Drought_P Parameter: Organism Value: Zea mays
  misc_feature: MA Experiment 20000480 PARAMETER Experiment Name: Zm_Drought_P Parameter: Plant Line Value: 35A19
  misc_feature: MA Experiment 20000480 PARAMETER Experiment Name: Zm_Drought_P Parameter: Timepoint (hr) Value: 72
  misc_feature: MA Experiment 20000480 PARAMETER Experiment Name: Zm_Drought_P Parameter: Tissue Value: Aerial
  misc_feature: MA Experiment 20000480 PARAMETER Experiment Name: Zm_Drought_P Parameter: Treatment Value: Drought vs. No Drought
gaagctagaggctctctggcgccgacggtcgacccacacgcgcgtccagcgatttcgccggggggagatcttgccattccgtggagcaccatccgcggtagcctagccgcgactggagatcggggcttgcgggccgtggagccacccaagaaggtagccgcgaaaatcttgatccggccggggacggggcctttggaggttcgtccctcgatcgggtgtcgtctgcgaaagccgggtcgaacaaatcgtcgcgactggaggcggcgcgggggcatgggggcgtgggtctcggtcctgctcgggatggacggagccgcggcggccgggcctgctgctgtgggcctgggcgacctgccggagctctgcgccgcccaggtgctgctccggctcgacccgccggagatctgcaggctcgcgcaggtcaaccacgcgttccgcggcgccgcgggggctgacttcgtgtgggaagccaagctgccggagaactacagctacctgatggagttcgtggggagcggcgacgaggggaggcggaggcggcggcggaccgggaagaaggagatctacgcgaggctcgccaggcctgtgcctttttgtgacggcaagaaggaattctggttggacaagaacaaaggcatgatctgtatggcactgtcgtccaaagcactggtgattactgggattgatgacagaagatactggcaacacatgccaacttcagaatcgagattccagtctgtagcctaccttcagcaaatctggtggtttgaggtggttggtgaagtcgatttctgcttccctgttggaacatatagcttgtacttcagggtccatcttgggaagttctacagacgatttggccgccgccagtgcacctcagagcatgttcatggttgggacaagaagcctgttcgcttccagctatcgacctctgacgggcagcaggcattgtctcagtgctacctggaggagcccgggagctgggtcctgtaccatgctggcgattttgtggcctcaaagcctgaccagctgatgaagctgaagttctccatggcacagatcgactgcacgcacacaaaaggcggactgtgcatcgactcggttcttatctatccaaaagggaaggggtttcaccaggagagggtggtcaggtctcagaaatgagggttgtagatgttgtggaggtactcacattaggatgttagagcaaatgcagcttgcagcctgatcttatttttactttgggctctagttcgcagcagaggtgaagtgtatgtggttgtagaactcaggtattgtgtggtcaggtgaccaccagagtgctctgtcagtcctttggcaaggtcgttttcgccccccttcagctgaatttggacagcgagatagccatgaaactgtactgaaatgagttcgaaggtgcc

SEQ ID NO: 5501 - protein, 387 aa, Zea mays subsp. mays
  peptide (1)..(387): Ceres Seq. ID no. 12405098
  misc_feature (115)..(160): Pfam Name: F-box domain Pfam Description: F-box domain
  misc_feature (92)..(387): Homolog of NCBI NO: 37536186 NR Description: unknown protein [Oryza sativa (japonica
  misc_feature (118)..(374): Homolog of NCBI NO: 38567911 NR Description: OSJNBa0088I22.7 [Oryza sativa (japonica
  misc_feature (115)..(373): Homolog of NCBI NO: 23397334 NR Description: unknown protein [Arabidopsis thaliana]
  misc_feature (115)..(373): Homolog of NCBI NO: 30695337 NR Description: F-box protein (lectin-related) [Arabidopsis
  misc_feature (114)..(372): Homolog of NCBI NO: 15222051 NR Description: hypothetical protein; protein id: At1g12710.1 thaliana] >gi|9502385|gb|AAF88092.1|AC025417_20 T12C24.23 thaliana] >gi|26450401|dbj|BAC42315.1| unknown protein
  misc_feature (114)..(372): Homolog of NCBI NO: 15221677 NR Description: unknown protein; protein id: At1g63090.1
  misc_feature (92)..(374): Homolog of NCBI NO: 15231726 NR Description: putative protein; protein id: At3g53000.1
  misc_feature (114)..(372): Homolog of NCBI NO: 15242282 NR Description: putative protein; protein id: At5g52120.1, by cDNA: gi_18175687, supported by cDNA: gi_20465820 [Arabidopsis >gi|18175688|gb|AAL59911.1| unknown protein [Arabidopsis
  misc_feature (198)..(372): Homolog of NCBI NO: 27754673 NR Description: unknown protein [Arabidopsis thaliana]
  misc_feature (118)..(283): Homolog of NCBI NO: 15226908 NR Description: putative phloem-specific lectin; protein id:
EARGSLAPTVDPHARPAISPGGDLAIPWSTIRGSLAATGDRGLRAVEPPKKVAAKILIRPGTGPLEVRPSIGCRLRKPGRTNRRDWRRRGGMGAWVSVLLGMDGAAAAGPAAVGLGDLPELCAAQVLLRLDPPEICRLAQVNHAFRGAAGADFVWEAKLPENYSYLMEFVGSGDEGRRRRRRTGKKEIYARLARPVPFCDGKKEFWLDKNKGMICMALSSKALVITGIDDRRYWQHMPTSESRFQSVAYLQQIWWFEVVGEVDFCFPVGTYSLYFRVHLGKFYRRFGRRQCTSEHVHGWDKKPVRFQLSTSDGQQALSQCYLEEPGSWVLYHAGDFVASKPDQLMKLKFSMAQIDCTHTKGGLCIDSVLIYPKGKGFHQERVVRSQK

SEQ ID NO: 5502 - protein, 296 aa, Zea mays subsp. mays
  peptide (1)..(296): Ceres Seq. ID no. 12405099
  misc_feature (24)..(69): Pfam Name: F-box domain Pfam Description: F-box domain
  misc_feature (1)..(296): Homolog of NCBI NO: 37536186 NR Description: unknown protein [Oryza sativa (japonica
  misc_feature (27)..(283): Homolog of NCBI NO: 38567911 NR Description: OSJNBa0088I22.7 [Oryza sativa (japonica
  misc_feature (24)..(282): Homolog of NCBI NO: 23397334 NR Description: unknown protein [Arabidopsis thaliana]
  misc_feature (24)..(282): Homolog of NCBI NO: 30695337 NR Description: F-box protein (lectin-related) [Arabidopsis
  misc_feature (23)..(281): Homolog of NCBI NO: 15222051 NR Description: hypothetical protein; protein id: At1g12710.1 thaliana] >gi|9502385|gb|AAF88092.1|AC025417_20 T12C24.23 thaliana] >gi|26450401|dbj|BAC42315.1| unknown protein
  misc_feature (23)..(281): Homolog of NCBI NO: 15221677 NR Description: unknown protein; protein id: At1g63090.1
  misc_feature (1)..(283): Homolog of NCBI NO: 15231726 NR Description: putative protein; protein id: At3g53000.1
  misc_feature (23)..(281): Homolog of NCBI NO: 15242282 NR Description: putative protein; protein id: At5g52120.1, by cDNA: gi_18175687, supported by cDNA: gi_20465820 [Arabidopsis >gi|18175688|gb|AAL59911.1| unknown protein [Arabidopsis
  misc_feature (107)..(281): Homolog of NCBI NO: 27754673 NR Description: unknown protein [Arabidopsis thaliana]
  misc_feature (27)..(192): Homolog of NCBI NO: 15226908 NR Description: putative phloem-specific lectin; protein id:
MGAWVSVLLGMDGAAAAGPAAVGLGDLPELCAAQVLLRLDPPEICRLAQVNHAFRGAAGADFVWEAKLPENYSYLMEFVGSGDEGRRRRRRTGKKEIYARLARPVPFCDGKKEFWLDKNKGMICMALSSKALVITGIDDRRYWQHMPTSESRFQSVAYLQQIWWFEVVGEVDFCFPVGTYSLYFRVHLGKFYRRFGRRQCTSEHVHGWDKKPVRFQLSTSDGQQALSQCYLEEPGSWVLYHAGDFVASKPDQLMKLKFSMAQIDCTHTKGGLCIDSVLIYPKGKGFHQERVVRSQK

SEQ ID NO: 5503 - protein, 286 aa, Zea mays subsp. mays
  peptide (1)..(286): Ceres Seq. ID no. 12405100
  misc_feature (14)..(59): Pfam Name: F-box domain Pfam Description: F-box domain
  misc_feature (1)..(286): Homolog of NCBI NO: 37536186 NR Description: unknown protein [Oryza sativa (japonica
  misc_feature (17)..(273): Homolog of NCBI NO: 38567911 NR Description: OSJNBa0088I22.7 [Oryza sativa (japonica
  misc_feature (14)..(272): Homolog of NCBI NO: 23397334 NR Description: unknown protein [Arabidopsis thaliana]
  misc_feature (14)..(272): Homolog of NCBI NO: 30695337 NR Description: F-box protein (lectin-related) [Arabidopsis
  misc_feature (13)..(271): Homolog of NCBI NO: 15222051 NR Description: hypothetical protein; protein id: At1g12710.1 thaliana] >gi|9502385|gb|AAF88092.1|AC025417_20 T12C24.23 thaliana] >gi|26450401|dbj|BAC42315.1| unknown protein
  misc_feature (13)..(271): Homolog of NCBI NO: 15221677 NR Description: unknown protein; protein id: At1g63090.1
  misc_feature (1)..(273): Homolog of NCBI NO: 15231726 NR Description: putative protein; protein id: At3g53000.1
  misc_feature (13)..(271): Homolog of NCBI NO: 15242282 NR Description: putative protein; protein id: At5g52120.1, by cDNA: gi_18175687, supported by cDNA: gi_20465820 [Arabidopsis >gi|18175688|gb|AAL59911.1| unknown protein [Arabidopsis
  misc_feature (97)..(271): Homolog of NCBI NO: 27754673 NR Description: unknown protein [Arabidopsis thaliana]
  misc_feature (17)..(182): Homolog of NCBI NO: 15226908 NR Description: putative phloem-specific lectin; protein id:
MDGAAAAGPAAVGLGDLPELCAAQVLLRLDPPEICRLAQVNHAFRGAAGADFVWEAKLPENYSYLMEFVGSGDEGRRRRRRTGKKEIYARLARPVPFCDGKKEFWLDKNKGMICMALSSKALVITGIDDRRYWQHMPTSESRFQSVAYLQQIWWFEVVGEVDFCFPVGTYSLYFRVHLGKFYRRFGRRQCTSEHVHGWDKKPVRFQLSTSDGQQALSQCYLEEPGSWVLYHAGDFVASKPDQLMKLKFSMAQIDCTHTKGGLCIDSVLIYPKGKGFHQERVVRSQK

SEQ ID NO: 5504 - DNA, 1450 bp, Zea mays subsp. mays
  misc_feature (1)..(1450): Ceres Seq. ID no. 12373657
  misc_feature: MA Experiment ID: 108528 Result: Up-regulated in Transcription
  misc_feature: MA Experiment 108528 PARAMETER Experiment Name: Zm_Imbibed_Seeds_P Parameter: Age (day) Value: 5 vs. 2
  misc_feature: MA Experiment 108528 PARAMETER Experiment Name: Zm_Imbibed_Seeds_P Parameter: Organism Value: Zea mays
  misc_feature: MA Experiment 108528 PARAMETER Experiment Name: Zm_Imbibed_Seeds_P Parameter: Plant Line Value: 35A19
  misc_feature: MA Experiment 108528 PARAMETER Experiment Name: Zm_Imbibed_Seeds_P Parameter: Tissue Value: Aerial vs. Embryo
  misc_feature: MA Experiment ID: 108529 Result: Down-regulated in Transcription
  misc_feature: MA Experiment 108529 PARAMETER Experiment Name: Zm_Imbibed_Seeds_P Parameter: Age (day) Value: 5 vs. 2
  misc_feature: MA Experiment 108529 PARAMETER Experiment Name: Zm_Imbibed_Seeds_P Parameter: Organism Value: Zea mays
  misc_feature: MA Experiment 108529 PARAMETER Experiment Name: Zm_Imbibed_Seeds_P Parameter: Plant Line Value: 35A19
  misc_feature: MA Experiment 108529 PARAMETER Experiment Name: Zm_Imbibed_Seeds_P Parameter: Tissue Value: Roots vs. Embryo
  misc_feature: MA Experiment ID: 108530 Result: Up-regulated in Transcription
  misc_feature: MA Experiment 108530 PARAMETER Experiment Name: Zm_Imbibed_Seeds_P Parameter: Age (day) Value: 6 vs. 2
  misc_feature: MA Experiment 108530 PARAMETER Experiment Name: Zm_Imbibed_Seeds_P Parameter: Organism Value: Zea mays
  misc_feature: MA Experiment 108530 PARAMETER Experiment Name: Zm_Imbibed_Seeds_P Parameter: Plant Line Value: 35A19
  misc_feature: MA Experiment 108530 PARAMETER Experiment Name: Zm_Imbibed_Seeds_P Parameter: Tissue Value: Aerial vs. Embryo
  misc_feature: MA Experiment ID: 108536 Result: Down-regulated in Transcription
  misc_feature: MA Experiment 108536 PARAMETER Experiment Name: Zm_Meristem_P Parameter: Age (day) Value: 8
  misc_feature: MA Experiment 108536 PARAMETER Experiment Name: Zm_Meristem_P Parameter: Organism Value: Zea mays
  misc_feature: MA Experiment 108536 PARAMETER Experiment Name: Zm_Meristem_P Parameter: Plant Line Value: 35A19
  misc_feature: MA Experiment 108536 PARAMETER Experiment Name: Zm_Meristem_P Parameter: Tissue Value: Shoot Meristem vs. Above Shoot Meristem
  misc_feature: MA Experiment ID: 108543 Result: Up-regulated in Transcription
  misc_feature: MA Experiment ID: 108544 Result: Up-regulated in Transcription
  misc_feature: MA Experiment ID: 108545 Result: Up-regulated in Transcription
  misc_feature: MA Experiment 108545 PARAMETER Experiment Name: Zm_Imbibed_Seeds_P Parameter: Age (day) Value: 3 vs. 2
  misc_feature: MA Experiment 108545 PARAMETER Experiment Name: Zm_Imbibed_Seeds_P Parameter: Organism Value: Zea mays
  misc_feature: MA Experiment 108545 PARAMETER Experiment Name: Zm_Imbibed_Seeds_P Parameter: Plant Line Value: 35A19
  misc_feature: MA Experiment 108545 PARAMETER Experiment Name: Zm_Imbibed_Seeds_P Parameter: Tissue Value: Aerial vs. Embryo
  misc_feature: MA Experiment ID: 108546 Result: Down-regulated in Transcription
  misc_feature: MA Experiment 108546 PARAMETER Experiment Name: Zm_Imbibed_Seeds_P Parameter: Age (day) Value: 3 vs. 2
  misc_feature: MA Experiment 108546 PARAMETER Experiment Name: Zm_Imbibed_Seeds_P Parameter: Organism Value: Zea mays
  misc_feature: MA Experiment 108546 PARAMETER Experiment Name: Zm_Imbibed_Seeds_P Parameter: Plant Line Value: 35A19
  misc_feature: MA Experiment 108546 PARAMETER Experiment Name: Zm_Imbibed_Seeds_P Parameter: Tissue Value: Roots vs. Embryo
  misc_feature: MA Experiment ID: 108547 Result: Up-regulated in Transcription
  misc_feature: MA Experiment 108547 PARAMETER Experiment Name: Zm_Imbibed_Seeds_P Parameter: Age (day) Value: 4 vs. 2
  misc_feature: MA Experiment 108547 PARAMETER Experiment Name: Zm_Imbibed_Seeds_P Parameter: Organism Value: Zea mays
  misc_feature: MA Experiment 108547 PARAMETER Experiment Name: Zm_Imbibed_Seeds_P Parameter: Plant Line Value: 35A19
  misc_feature: MA Experiment 108547 PARAMETER Experiment Name: Zm_Imbibed_Seeds_P Parameter: Tissue Value: Aerial vs. Embryo
  misc_feature: MA Experiment ID: 108559 Result: Down-regulated in Transcription
  misc_feature: MA Experiment 108559 PARAMETER Experiment Name: Zm_5mM_NO_P Parameter: Age (day) Value: 8
  misc_feature: MA Experiment 108559 PARAMETER Experiment Name: Zm_5mM_NO_P Parameter: Organism Value: Zea mays
  misc_feature: MA Experiment 108559 PARAMETER Experiment Name: Zm_5mM_NO_P Parameter: Plant Line Value: 35A19
  misc_feature: MA Experiment 108559 PARAMETER Experiment Name: Zm_5mM_NO_P Parameter: Timepoint (hr) Value: 12
  misc_feature: MA Experiment 108559 PARAMETER Experiment Name: Zm_5mM_NO_P Parameter: Tissue Value: Aerial
  misc_feature: MA Experiment 108559 PARAMETER Experiment Name: Zm_5mM_NO_P Parameter: Treatment Value: 5mM NO vs. No Treatment
  misc_feature: MA Experiment ID: 108687 Result: Down-regulated in Transcription
  misc_feature: MA Experiment 108687 PARAMETER Experiment Name: Zm_Embryos-Flowers__P Parameter: Tissue Value: Embryo vs. Aerial+
  misc_feature: MA Experiment ID: 108688 Result: Down-regulated in Transcription
  misc_feature: MA Experiment 108688 PARAMETER Experiment Name: Zm_Embryos-Flowers__P Parameter: Tissue Value: Immature Flowers vs. Aerial+
  misc_feature: MA Experiment ID: 20000478 Result: Up-regulated in Transcription
  misc_feature: MA Experiment 20000478 PARAMETER Experiment Name: Zm_5mM_SA_P Parameter: Age (day) Value: 11
  misc_feature: MA Experiment 20000478 PARAMETER Experiment Name: Zm_5mM_SA_P Parameter: Organism Value: Zea mays
  misc_feature: MA Experiment 20000478 PARAMETER Experiment Name: Zm_5mM_SA_P Parameter: Plant Line Value: 35A19
  misc_feature: MA Experiment 20000478 PARAMETER Experiment Name: Zm_5mM_SA_P Parameter: Timepoint (hr) Value: 72
  misc_feature: MA Experiment 20000478 PARAMETER Experiment Name: Zm_5mM_SA_P Parameter: Tissue Value: Aerial
  misc_feature: MA Experiment 20000478 PARAMETER Experiment Name: Zm_5mM_SA_P Parameter: Treatment Value: 5mM SA vs. No Treatment
  misc_feature: MA Experiment ID: 20000532 Result: Up-regulated in Transcription
  misc_feature: MA Experiment 20000532 PARAMETER Experiment Name: Zm_0.001percent_MeJA_P Parameter: Age (day) Value: 10
  misc_feature: MA Experiment 20000532 PARAMETER Experiment Name: Zm_0.001percent_MeJA_P Parameter: Organism Value: Zea mays
  misc_feature: MA Experiment 20000532 PARAMETER Experiment Name: Zm_0.001percent_MeJA_P Parameter: Plant Line Value: 35A19
  misc_feature: MA Experiment 20000532 PARAMETER Experiment Name: Zm_0.001percent_MeJA_P Parameter: Timepoint (hr) Value: 48
  misc_feature: MA Experiment 20000532 PARAMETER Experiment Name: Zm_0.001percent_MeJA_P Parameter: Tissue Value: Aerial
  misc_feature: MA Experiment 20000532 PARAMETER Experiment Name: Zm_0.001percent_MeJA_P Parameter: Treatment Value: 0.001percent MeJA vs. No Treatment
  misc_feature: MA Experiment ID: 20000535 Result: Down-regulated in Transcription
  misc_feature: MA Experiment 20000535 PARAMETER Experiment Name: Zm_Hybrid_Seed_Dev_P Parameter: DAP Value: 30 vs. 12
  misc_feature: MA Experiment 20000535 PARAMETER Experiment Name: Zm_Hybrid_Seed_Dev_P Parameter: Organism Value: Zea mays
  misc_feature: MA Experiment 20000535 PARAMETER Experiment Name: Zm_Hybrid_Seed_Dev_P Parameter: Plant Line Value: 35A19
  misc_feature: MA Experiment 20000535 PARAMETER Experiment Name: Zm_Hybrid_Seed_Dev_P Parameter: Tissue Value: Embryo vs. Unfert Floret
gcacgagaccattacctagaacatcctaatcgaaaactcactccaaagccaacaaacagagctccaactcagaaagcatccgtcccttggcagcagcaacaagctactagctatgtgtgtttacagcgagcgaggggaaaaaaaagaaaacatctaagatatactccatcatcttcgtttgattaacccgcccagtaaagccatgggtactaatgatagagcggtcatttctctagtactcctcgtgtgcatcgctagccgctcgtccttgggtgccgctgaaactgacgttgagcagaagcgctcgtcagtcccgttgatgtttgtgttcggtgattcgctggtcgatgtcggaaacaataacttcctgccgccgcctgcaccccgtgctgcatctccgtacggcatcgacttccctgctggcacccccggcgccgtctcaggacggttcacgaatggctacaaccttgccgatttagtcgcgcgacgtctggggttcaagatgagtccacctgcttacctctcgttgacaccgttatcaaagtttgacctgttcacgtgccgaattggtgccaattacgcgtctggcggatctggcattctcaacaccacgggaaacgggacactcacgctgcagaaacaaatcacgctgttctcgaaaactaaagcaagaatgtcgtggggccgctgcaagctcagctctatggtatcgaggtcgttgttccttatcagcgccggcggcaatgacttctccgccttcagtgaaatgggcatgggcgaacaagacgccccagcctacatcagtagcatggtctcaacctatgtccagcatatcgacgcgttgtacaagttgggagcacggaggttggggatcctagacgtgccagcgatcggctgtaccccaggctccagagtccccatggccaacggcggatgcaacgacgctgccaactctatggcgcagaacttcaacaaactcctaaggctcgaggtggcgaaagccgtcgcatcctccatgcccggcatgagatactccattgcaagcacctacaattttgtcaccgacttgatggacagccatctagtggctgggctccgggtggtcgacagggcatgctgcggatcgggaaaactgaacgccgcggtcatgtgcgcccagccaaacacgacttactgttcggatcgcgacgactacatgttctgggacatgctacatcctacgcaggcaacaaatgaacgtggggtggtcgccatcttctacggcccgcaggagtacgcggatcccatcaactttgcacagttggccgctgccacagcaaatgatgatgatgatataaatactgctatggccgcaggcgtctatgccgccatatgataaaccctatttatgtcgattggcatgcagctgcgacatgtcactacctgagtactatatacgtaattcagttgg

SEQ ID NO: 5505 - protein, 390 aa, Zea mays subsp. mays
  peptide (1)..(390): Ceres Seq. ID no. 12373658
  misc_feature (40)..(345): Pfam Name: GDSL-like Lipase/Acylhydrolase Pfam Description: GDSL-like Lipase/Acylhydrolase
  misc_feature (6)..(368): Homolog of NCBI NO: 38345853 NR Description: OSJNBa0084K11.17 [Oryza sativa (japonica
  misc_feature (2)..(369): Homolog of NCBI NO: 29837765 NR Description: putative GDSL-like lipase/acylhydrolase [Oryza
  misc_feature (20)..(367): Homolog of NCBI NO: 38345537 NR Description: OSJNBa0020J04.12 [Oryza sativa (japonica
  misc_feature (9)..(369): Homolog of NCBI NO: 15235421 NR Description: Proline-rich APG - like protein; protein id:
  misc_feature (32)..(345): Homolog of NCBI NO: 13174242 NR Description: putative proline-rich protein [Oryza sativa]
  misc_feature (1)..(369): Homolog of NCBI NO: 15240452 NR Description: GDSL-motif lipase/hydrolase-like protein; protein At5g55050.1, supported by cDNA: gi_18175651 [Arabidopsis
  misc_feature (8)..(345): Homolog of NCBI NO: 30693137 NR Description: lipase family [Arabidopsis thaliana]
  misc_feature (8)..(345): Homolog of NCBI NO: 21537293 NR Description: GDSL-motif lipase/hydrolase-like protein
  misc_feature (11)..(367): Homolog of NCBI NO: 15227849 NR Description: putative GDSL-motif lipase/hydrolase; protein id:
  misc_feature (8)..(368): Homolog of NCBI NO: 18398991 NR Description: unknown protein; protein id: At1g33811.1, by cDNA: gi_20466731 [Arabidopsis thaliana] unknown protein [Arabidopsis thaliana]
MGTNDRAVISLVLLVCIASRSSLGAAETDVEQKRSSVPLMFVFGDSLVDVGNNNFLPPPAPRAASPYGIDFPAGTPGAVSGRFTNGYNLADLVARRLGFKMSPPAYLSLTPLSKFDLFTCRIGANYASGGSGILNTTGNGTLTLQKQITLFSKTKARMSWGRCKLSSMVSRSLFLISAGGNDFSAFSEMGMGEQDAPAYISSMVSTYVQHIDALYKLGARRLGILDVPAIGCTPGSRVPMANGGCNDAANSMAQNFNKLLRLEVAKAVASSMPGMRYSIASTYNFVTDLMDSHLVAGLRVVDRACCGSGKLNAAVMCAQPNTTYCSDRDDYMFWDMLHPTQATNERGVVAIFYGPQEYADPINFAQLAAATANDDDDINTAMAAGVYAAI

SEQ ID NO: 5506 - protein, 351 aa, Zea mays subsp. mays
  peptide (1)..(351): Ceres Seq. ID no. 12373659
  misc_feature (1)..(306): Pfam Name: GDSL-like Lipase/Acylhydrolase Pfam Description: GDSL-like Lipase/Acylhydrolase
  misc_feature (1)..(329): Homolog of NCBI NO: 38345853 NR Description: OSJNBa0084K11.17 [Oryza sativa (japonica
  misc_feature (1)..(330): Homolog of NCBI NO: 29837765 NR Description: putative GDSL-like lipase/acylhydrolase [Oryza
  misc_feature (1)..(328): Homolog of NCBI NO: 38345537 NR Description: OSJNBa0020J04.12 [Oryza sativa (japonica
  misc_feature (1)..(330): Homolog of NCBI NO: 15235421 NR Description: Proline-rich APG - like protein; protein id:
  misc_feature (1)..(306): Homolog of NCBI NO: 13174242 NR Description: putative proline-rich protein [Oryza sativa]
  misc_feature (1)..(330): Homolog of NCBI NO: 15240452 NR Description: GDSL-motif lipase/hydrolase-like protein; protein At5g55050.1, supported by cDNA: gi_18175651 [Arabidopsis
  misc_feature (1)..(306): Homolog of NCBI NO: 30693137 NR Description: lipase family [Arabidopsis thaliana]
  misc_feature (1)..(306): Homolog of NCBI NO: 21537293 NR Description: GDSL-motif lipase/hydrolase-like protein
  misc_feature (1)..(328): Homolog of NCBI NO: 15227849 NR Description: putative GDSL-motif lipase/hydrolase; protein id:
  misc_feature (1)..(329): Homolog of NCBI NO: 18398991 NR Description: unknown protein; protein id: At1g33811.1, by cDNA: gi_20466731 [Arabidopsis thaliana] unknown protein [Arabidopsis thaliana]
MFVFGDSLVDVGNNNFLPPPAPRAASPYGIDFPAGTPGAVSGRFTNGYNLADLVARRLGFKMSPPAYLSLTPLSKFDLFTCRIGANYASGGSGILNTTGNGTLTLQKQITLFSKTKARMSWGRCKLSSMVSRSLFLISAGGNDFSAFSEMGMGEQDAPAYISSMVSTYVQHIDALYKLGARRLGILDVPAIGCTPGSRVPMANGGCNDAANSMAQNFNKLLRLEVAKAVASSMPGMRYSIASTYNFVTDLMDSHLVAGLRVVDRACCGSGKLNAAVMCAQPNTTYCSDRDDYMFWDMLHPTQATNERGVVAIFYGPQEYADPINFAQLAAATANDDDDINTAMAAGVYAAI

SEQ ID NO: 5507 - protein, 290 aa, Zea mays subsp. mays
  peptide (1)..(290): Ceres Seq. ID no. 12373660
  misc_feature (1)..(245): Pfam Name: GDSL-like Lipase/Acylhydrolase Pfam Description: GDSL-like Lipase/Acylhydrolase
  misc_feature (1)..(268): Homolog of NCBI NO: 38345853 NR Description: OSJNBa0084K11.17 [Oryza sativa (japonica
  misc_feature (1)..(269): Homolog of NCBI NO: 29837765 NR Description: putative GDSL-like lipase/acylhydrolase [Oryza
  misc_feature (1)..(267): Homolog of NCBI NO: 38345537 NR Description: OSJNBa0020J04.12 [Oryza sativa (japonica
  misc_feature (1)..(269): Homolog of NCBI NO: 15235421 NR Description: Proline-rich APG - like protein; protein id:
  misc_feature (1)..(245): Homolog of NCBI NO: 13174242 NR Description: putative proline-rich protein [Oryza sativa]
  misc_feature (1)..(269): Homolog of NCBI NO: 15240452 NR Description: GDSL-motif lipase/hydrolase-like protein; protein At5g55050.1, supported by cDNA: gi_18175651 [Arabidopsis
  misc_feature (1)..(245): Homolog of NCBI NO: 30693137 NR Description: lipase family [Arabidopsis thaliana]
  misc_feature (1)..(245): Homolog of NCBI NO: 21537293 NR Description: GDSL-motif lipase/hydrolase-like protein
  misc_feature (1)..(267): Homolog of NCBI NO: 15227849 NR Description: putative GDSL-motif lipase/hydrolase; protein id:
  misc_feature (1)..(268): Homolog of NCBI NO: 18398991 NR Description: unknown protein; protein id: At1g33811.1, by cDNA: gi_20466731 [Arabidopsis thaliana] unknown protein [Arabidopsis thaliana]
MSPPAYLSLTPLSKFDLFTCRIGANYASGGSGILNTTGNGTLTLQKQITLFSKTKARMSWGRCKLSSMVSRSLFLISAGGNDFSAFSEMGMGEQDAPAYISSMVSTYVQHIDALYKLGARRLGILDVPAIGCTPGSRVPMANGGCNDAANSMAQNFNKLLRLEVAKAVASSMPGMRYSIASTYNFVTDLMDSHLVAGLRVVDRACCGSGKLNAAVMCAQPNTTYCSDRDDYMFWDMLHPTQATNERGVVAIFYGPQEYADPINFAQLAAATANDDDDINTAMAAGVYAAI

SEQ ID NO: 5508 - DNA, 3550 bp, Zea mays subsp. mays
  misc_feature (1)..(3550): Ceres Seq. ID no. 12404984
  misc_feature: MA Experiment ID: 20000477 Result: Down-regulated in Transcription
  misc_feature: MA Experiment 20000477 PARAMETER Experiment Name: Zm_5mM_SA_P Parameter: Age (day) Value: 10
  misc_feature: MA Experiment 20000477 PARAMETER Experiment Name: Zm_5mM_SA_P Parameter: Organism Value: Zea mays
  misc_feature: MA Experiment 20000477 PARAMETER Experiment Name: Zm_5mM_SA_P Parameter: Plant Line Value: 35A19
  misc_feature: MA Experiment 20000477 PARAMETER Experiment Name: Zm_5mM_SA_P Parameter: Timepoint (hr) Value: 48
  misc_feature: MA Experiment 20000477 PARAMETER Experiment Name: Zm_5mM_SA_P Parameter: Tissue Value: Aerial
  misc_feature: MA Experiment 20000477 PARAMETER Experiment Name: Zm_5mM_SA_P Parameter: Treatment Value: 5mM SA vs. No Treatment
  misc_feature: MA Experiment ID: 20000478 Result: Down-regulated in Transcription
  misc_feature: MA Experiment 20000478 PARAMETER Experiment Name: Zm_5mM_SA_P Parameter: Age (day) Value: 11
  misc_feature: MA Experiment 20000478 PARAMETER Experiment Name: Zm_5mM_SA_P Parameter: Organism Value: Zea mays
  misc_feature: MA Experiment 20000478 PARAMETER Experiment Name: Zm_5mM_SA_P Parameter: Plant Line Value: 35A19
  misc_feature: MA Experiment 20000478 PARAMETER Experiment Name: Zm_5mM_SA_P Parameter: Timepoint (hr) Value: 72
  misc_feature: MA Experiment 20000478 PARAMETER Experiment Name: Zm_5mM_SA_P Parameter: Tissue Value: Aerial
  misc_feature: MA Experiment 20000478 PARAMETER Experiment Name: Zm_5mM_SA_P Parameter: Treatment Value: 5mM SA vs. No Treatment
  misc_feature: MA Experiment ID: 20000535 Result: Up-regulated in Transcription
  misc_feature: MA Experiment 20000535 PARAMETER Experiment Name: Zm_Hybrid_Seed_Dev_P Parameter: DAP Value: 30 vs. 12
  misc_feature: MA Experiment 20000535 PARAMETER Experiment Name: Zm_Hybrid_Seed_Dev_P Parameter: Organism Value: Zea mays
  misc_feature: MA Experiment 20000535 PARAMETER Experiment Name: Zm_Hybrid_Seed_Dev_P Parameter: Plant Line Value: 35A19
  misc_feature: MA Experiment 20000535 PARAMETER Experiment Name: Zm_Hybrid_Seed_Dev_P Parameter: Tissue Value: Embryo vs. Unfert Floret
gcacgagaccattacctagaacatcctaatcgaaaagccacgctaccaccgcttcctttcctcttcggctgctccgcctcgcctcccagttcacagcccctcccaggctccgaatcggcggccacttctcattcctcacttccgtcctcgcgcaccaccccctccatccgttccggatggtgccttcggaatcccgtccggcgccctagcgtagctcgggctcggccaggctccgggcccgccgcgccgttccgcagtccagctccacctccagtggttactagtggaagtttagcacactgattccgtcatagtgggatccttgccaaatgaagtgtccatccaaccaacccaactaactgtactgaaatctcattgctttcagaatggtacggttagtaaattgaggttggtggtgggttggtggccatactaggggaagatcttttcttgagtttaaggaagatgcttgcctttatttgagaaggccctttttggtacgtcagcagtgttctttcctataggagtaaatgccattccgtagcatcgtgcgtgatgtaagggatggtttcgggagcttgtctaggaggggatttgaggtcaggtttctgagtcatcgcagagggaaatctcatggtgctgtccatgagctgcacgacccagtgcttgtggtacagagtagctgctgggctagcttgcctcctgaattacttcgagatgtgattgagaggttggagaccagtgaggatacatggccttctaggaaacatgtagttgcttgtgcagctgtctgcagaacatggagagagatgtgtagagagattgtcaagagcccagagttttctggaaaaatcacttttcctgtttccttgaagcagcctgggcctcgagatggaactattcagtgttttattaagagggataaatctacccaaatctacagtctgtaccttagttttagctctgccgtgcctgtcgaaaatggcaaattccttctatccgcaaaaaggaactgccgtgcaacatatacagaatatataatatcaataaattctggtgatacatctaggtgtacaagtaacaacacatacattgggaaattaaggtcaaatttccttggcacaaaatttgtaatatacgatactcatccgccatacaatggaactagtcaaacagtggcagggaaaacaagtcagagattctactccaagaagggatcaaccaaggtttcttgcaggtggtacagtattgcacaaatctcatacgagctgaatgtcttgggaactcgaggcccaaggcggatgaactgtgtaatgcactccatcccagcttcatgccttgaggctggtggcagtgtcccttgccagccggacagcattgcagcccactctgttggcggatcattcagcagtgtgtccttgtcaaagtcatcgactatggaccactctatgcatttcaccagttcccggctctctgatgccataacaggagatggcattgtgaacagaggccaggcattgaatgatgctgacgatgaagagtgcaaggacatgcctttgatcctccgcaacaaggccccaaggtggcacgagcagcttcagtgctggtgcctcaacttccggggccgggtgactgtcgcctcggtcaagaacttccagctagtcgcggcgacacagcctgccgccggagccctgaccccatcacaggcagccccgcagccagctccgcctcctccgccggaccaagagaaggtcatactgcagtttgggaaggtcggcaaggacatcttcaccatggactactgctacccgctgttagccttccaggccttcgccatctgcctgagcagcttcgacaccaagttggcctgcgaataaatcctacctacaattctggtacctaccaaataatcaaaaacactgattgtcgtggtgttcgtccaagaaccgagtttagctgagacgccattgggcaccatgtgctggtgccttgttaactcagaaacgcgtgggggctgaatctgtttcagcagcttccttgtgataatctgtagctgctgcttcgctgctgttgtatcctatgctttcatttctttccggttccgctgtagcttcttaccccccggtgacattagttcggtacccgtatctggatatttttttagccttcttcgttggattgttcaccggtgatggcatgtattaacagagatagttacatacagatgtaatgaattcatgacatctgatcactcatatgtatcacggaagcatgaggaggataaggtgatcatctttgagagaggagatttggtcttcgtgttcaacttccactggagcaatagctattttgactatcgcgttggttgtttcaagcctgggaagtacaagatcgttttagattctgacgatggccttttcggtggatttattaataaacaccccgttcaaaagtagtcatcgataccagaccatattcaagagcgccactacaaaaatactcctaaaggcttatttcaaggagaaccatccgtcctctagattgctagctacatcaaaattgcacaccatgcttgcaacttcaaacatacattcgcacctagagcttgaggaaaacaaactcttcgatcgctggaatctccccgatcttcgtcagtgtgccattgcttggttcctcatcaacaccaattgccatgacagcatgcttgcgaggagcaattcttccgacactcatgaaactgacattaacattctcctcacccaagacgcttccgactgacccaatcatacctggttgatcaacctgcctgcaaaggatgaggcttccttccaagctcacatccacctggaatgctccaacctttgttagatgaggaacaccatccttcactctgccctccacagtgatctctccagtctcagatatcgcactgggaaatttggactcgacattggcaatctgaacttgaatgtatcacggaagcatgaggaggataaggtgatcatctttgagagaggagatttggtcttcgtgttcaacttccactggagcaatagctattttgactatcgcgttggttgtttcaagcctgggaagtacaagatcgttttagattctgacgatggccttttcggtggatttagtcggcttgatcatgatgctgagtacttcactgctgactggccgcatgacaacaggccgtgttctttctcggtctatgcacccagcagaacagccgtcgtatatgcacctgcaggtgcagaggacgaatagggcacaacagcggttgttggggaagaacttcagagggatgtactgctggtggactgacaccactgccacgcgcgatgctgccagatgttgccctcgagaccacgtggcaggacgatcagctattcaggtggataggttagcttaccgatgagctctcgctttcgagtgactggaaggaaatggacctcgcacaccgcattttcactatgcaatctgaaaatgtaccgtgtggttttgtacatatggatcagtaggcattatatcattcatctctctg

SEQ ID NO: 5509 - protein, 448 aa, Zea mays subsp. mays
  peptide (1)..(448): Ceres Seq. ID no. 12404985
  misc_feature (117)..(448): Pfam Name: Tub family Pfam Description: Tub family
  misc_feature (1)..(448): Homolog of NCBI NO: 15223772 NR Description: Tub family protein, putative; protein id: [Arabidopsis thaliana] >gi|25406477|pir||H96797 hypothetical
  misc_feature (1)..(448): Homolog of NCBI NO: 34908598 NR Description: putative tubby protein [Oryza sativa (japonica group)] >gi|21644661|dbj|BAC01219.1| putative tubby protein
  misc_feature (1)..(448): Homolog of NCBI NO: 5777631 NR Description: CAA303719.1 protein [Oryza sativa]
  misc_feature (1)..(448): Homolog of NCBI NO: 32480039 NR Description: OSJNBa0039K24.2 [Oryza sativa (japonica
  misc_feature (1)..(448): Homolog of NCBI NO: 15222543 NR Description: F-box containing tubby family protein; protein At1g25280.1 [Arabidopsis thaliana] >gi|25518577|pir||E86382
  misc_feature (1)..(448): Homolog of NCBI NO: 38637048 NR Description: putative chain A, C-terminal domain of mouse
  misc_feature (1)..(310): Homolog of NCBI NO: 18400968 NR Description: expressed protein; protein id: At1g43640.1, by cDNA: gi_15983381, supported by cDNA: gi_18176057 [Arabidopsis >gi|15983382|gb|AAL11559.1|AF424565_1 At1g43640/T10P12_16
  misc_feature (291)..(448): Homolog of NCBI NO: 18400968 NR Description: expressed protein; protein id: At1g43640.1, by cDNA: gi_15983381, supported by cDNA: gi_18176057 [Arabidopsis >gi|15983382|gb|AAL11559.1|AF424565_1 At1g43640/T10P12_16
  misc_feature (18)..(435): Homolog of NCBI NO: 28188613 NR Description: unknown protein [Arabidopsis thaliana]
  misc_feature (18)..(435): Homolog of NCBI NO: 28188595 NR Description: unknown protein [Arabidopsis thaliana] unknown protein [Arabidopsis thaliana] unknown protein [Arabidopsis thaliana]
MPFRSIVRDVRDGFGSLSRRGFEVRFLSHRRGKSHGAVHELHDPVLVVQSSCWASLPPELLRDVIERLETSEDTWPSRKHVVACAAVCRTWREMCREIVKSPEFSGKITFPVSLKQPGPRDGTIQCFIKRDKSTQIYSLYLSFSSAVPVENGKFLLSAKRNCRATYTEYIISINSGDTSRCTSNNTYIGKLRSNFLGTKFVIYDTHPPYNGTSQTVAGKTSQRFYSKKGSTKVSCRWYSIAQISYELNVLGTRGPRRMNCVMHSIPASCLEAGGSVPCQPDSIAAHSVGGSFSSVSLSKSSTMDHSMHFTSSRLSDAITGDGIVNRGQALNDADDEECKDMPLILRNKAPRWHEQLQCWCLNFRGRVTVASVKNFQLVAATQPAAGALTPSQAAPQPAPPPPPDQEKVILQFGKVGKDIFTMDYCYPLLAFQAFAICLSSFDTKLACE

SEQ ID NO: 5510 - protein, 355 aa, Zea mays subsp. mays
  peptide (1)..(355): Ceres Seq. ID no. 12404986
  misc_feature (24)..(355): Pfam Name: Tub family Pfam Description: Tub family
  misc_feature (1)..(355): Homolog of NCBI NO: 15223772 NR Description: Tub family protein, putative; protein id: [Arabidopsis thaliana] >gi|25406477|pir||H96797 hypothetical
  misc_feature (1)..(355): Homolog of NCBI NO: 34908598 NR Description: putative tubby protein [Oryza sativa (japonica group)] >gi|21644661|dbj|BAC01219.1| putative tubby protein
  misc_feature (1)..(355): Homolog of NCBI NO: 5777631 NR Description: CAA303719.1 protein [Oryza sativa]
  misc_feature (1)..(355): Homolog of NCBI NO: 32480039 NR Description: OSJNBa0039K24.2 [Oryza sativa (japonica
  misc_feature (1)..(355): Homolog of NCBI NO: 15222543 NR Description: F-box containing tubby family protein; protein At1g25280.1 [Arabidopsis thaliana] >gi|25518577|pir||E86382
  misc_feature (1)..(355): Homolog of NCBI NO: 38637048 NR Description: putative chain A, C-terminal domain of mouse
  misc_feature (1)..(217): Homolog of NCBI NO: 18400968 NR Description: expressed protein; protein id: At1g43640.1, by cDNA: gi_15983381, supported by cDNA: gi_18176057 [Arabidopsis >gi|15983382|gb|AAL11559.1|AF424565_1 At1g43640/T10P12_16
  misc_feature (198)..(355): Homolog of NCBI NO: 18400968 NR Description: expressed protein; protein id: At1g43640.1, by cDNA: gi_15983381, supported by cDNA: gi_18176057 [Arabidopsis >gi|15983382|gb|AAL11559.1|AF424565_1 At1g43640/T10P12_16
  misc_feature (1)..(342): Homolog of NCBI NO: 28188613 NR Description: unknown protein [Arabidopsis thaliana]
  misc_feature (1)..(342): Homolog of NCBI NO: 28188595 NR Description: unknown protein [Arabidopsis thaliana] unknown protein [Arabidopsis thaliana] unknown protein [Arabidopsis thaliana]
MCREIVKSPEFSGKITFPVSLKQPGPRDGTIQCFIKRDKSTQIYSLYLSFSSAVPVENGKFLLSAKRNCRATYTEYIISINSGDTSRCTSNNTYIGKLRSNFLGTKFVIYDTHPPYNGTSQTVAGKTSQRFYSKKGSTKVSCRWYSIAQISYELNVLGTRGPRRMNCVMHSIPASCLEAGGSVPCQPDSIAAHSVGGSFSSVSLSKSSTMDHSMHFTSSRLSDAITGDGIVNRGQALNDADDEECKDMPLILRNKAPRWHEQLQCWCLNFRGRVTVASVKNFQLVAATQPAAGALTPSQAAPQPAPPPPPDQEKVILQFGKVGKDIFTMDYCYPLLAFQAFAICLSSFDTKLACE

SEQ ID NO: 5511 - DNA, 1398 bp, Zea mays subsp. mays
  misc_feature (1)..(1398): Ceres Seq. ID no. 12386788
  misc_feature: MA Experiment ID: 108528 Result: Down-regulated in Transcription
  misc_feature: MA Experiment 108528 PARAMETER Experiment Name: Zm_Imbibed_Seeds_P Parameter: Age (day) Value: 5 vs. 2
  misc_feature: MA Experiment 108528 PARAMETER Experiment Name: Zm_Imbibed_Seeds_P Parameter: Organism Value: Zea mays
  misc_feature: MA Experiment 108528 PARAMETER Experiment Name: Zm_Imbibed_Seeds_P Parameter: Plant Line Value: 35A19
  misc_feature: MA Experiment 108528 PARAMETER Experiment Name: Zm_Imbibed_Seeds_P Parameter: Tissue Value: Aerial vs. Embryo
  misc_feature: MA Experiment ID: 108530 Result: Down-regulated in Transcription
  misc_feature: MA Experiment 108530 PARAMETER Experiment Name: Zm_Imbibed_Seeds_P Parameter: Age (day) Value: 6 vs. 2
  misc_feature: MA Experiment 108530 PARAMETER Experiment Name: Zm_Imbibed_Seeds_P Parameter: Organism Value: Zea mays
  misc_feature: MA Experiment 108530 PARAMETER Experiment Name: Zm_Imbibed_Seeds_P Parameter: Plant Line Value: 35A19
  misc_feature: MA Experiment 108530 PARAMETER Experiment Name: Zm_Imbibed_Seeds_P Parameter: Tissue Value: Aerial vs. Embryo
  misc_feature: MA Experiment ID: 108534 Result: Up-regulated in Transcription
  misc_feature: MA Experiment 108534 PARAMETER Experiment Name: Zm_4deg_Cold_P Parameter: Age (hr) Value: 8
  misc_feature: MA Experiment 108534 PARAMETER Experiment Name: Zm_4deg_Cold_P Parameter: Organism Value: Zea mays
  misc_feature: MA Experiment 108534 PARAMETER Experiment Name: Zm_4deg_Cold_P Parameter: Plant Line Value: 35A19
  misc_feature: MA Experiment 108534 PARAMETER Experiment Name: Zm_4deg_Cold_P Parameter: Temperature (deg C) Value: 4 vs. 22
  misc_feature: MA Experiment 108534 PARAMETER Experiment Name: Zm_4deg_Cold_P Parameter: Timepoint (hr) Value: 6
  misc_feature: MA Experiment 108534 PARAMETER Experiment Name: Zm_4deg_Cold_P Parameter: Tissue Value: Aerial
  misc_feature: MA Experiment ID: 108535 Result: Down-regulated in Transcription
  misc_feature: MA Experiment 108535 PARAMETER Experiment Name: Zm_Meristem_P Parameter: Age (day) Value: 8
  misc_feature: MA Experiment 108535 PARAMETER Experiment Name: Zm_Meristem_P Parameter: Organism Value: Zea mays
  misc_feature: MA Experiment 108535 PARAMETER Experiment Name: Zm_Meristem_P Parameter: Plant Line Value: 35A19
  misc_feature: MA Experiment 108535 PARAMETER Experiment Name: Zm_Meristem_P Parameter: Tissue Value: Root Meristem vs. Above Root Meristem
  misc_feature: MA Experiment ID: 108543 Result: Up-regulated in Transcription
  misc_feature: MA Experiment ID: 108544 Result: Up-regulated in Transcription
  misc_feature: MA Experiment ID: 108545 Result: Down-regulated in Transcription
  misc_feature: MA Experiment 108545 PARAMETER Experiment Name: Zm_Imbibed_Seeds_P Parameter: Age (day) Value: 3 vs. 2
  misc_feature: MA Experiment 108545 PARAMETER Experiment Name: Zm_Imbibed_Seeds_P Parameter: Organism Value: Zea mays
  misc_feature: MA Experiment 108545 PARAMETER Experiment Name: Zm_Imbibed_Seeds_P Parameter: Plant Line Value: 35A19
  misc_feature: MA Experiment 108545 PARAMETER Experiment Name: Zm_Imbibed_Seeds_P Parameter: Tissue Value: Aerial vs. Embryo
  misc_feature: MA Experiment ID: 108546 Result: Up-regulated in Transcription
  misc_feature: MA Experiment 108546 PARAMETER Experiment Name: Zm_Imbibed_Seeds_P Parameter: Age (day) Value: 3 vs. 2
  misc_feature: MA Experiment 108546 PARAMETER Experiment Name: Zm_Imbibed_Seeds_P Parameter: Organism Value: Zea mays
  misc_feature: MA Experiment 108546 PARAMETER Experiment Name: Zm_Imbibed_Seeds_P Parameter: Plant Line Value: 35A19
  misc_feature: MA Experiment 108546 PARAMETER Experiment Name: Zm_Imbibed_Seeds_P Parameter: Tissue Value: Roots vs. Embryo
  misc_feature: MA Experiment ID: 108547 Result: Down-regulated in Transcription
  misc_feature: MA Experiment 108547 PARAMETER Experiment Name: Zm_Imbibed_Seeds_P Parameter: Age (day) Value: 4 vs. 2
  misc_feature: MA Experiment 108547 PARAMETER Experiment Name: Zm_Imbibed_Seeds_P Parameter: Organism Value: Zea mays
  misc_feature: MA Experiment 108547 PARAMETER Experiment Name: Zm_Imbibed_Seeds_P Parameter: Plant Line Value: 35A19
  misc_feature: MA Experiment 108547 PARAMETER Experiment Name: Zm_Imbibed_Seeds_P Parameter: Tissue Value: Aerial vs. Embryo
  misc_feature: MA Experiment ID: 108597 Result: Down-regulated in Transcription
  misc_feature: MA Experiment 108597 PARAMETER Experiment Name: Zm_100uM_ABA_P Parameter: Age (day) Value: 9
  misc_feature: MA Experiment 108597 PARAMETER Experiment Name: Zm_100uM_ABA_P Parameter: Organism Value: Zea mays
  misc_feature: MA Experiment 108597 PARAMETER Experiment Name: Zm_100uM_ABA_P Parameter: Plant Line Value: 35A19
  misc_feature: MA Experiment 108597 PARAMETER Experiment Name: Zm_100uM_ABA_P Parameter: Timepoint (hr) Value: 24
  misc_feature: MA Experiment 108597 PARAMETER Experiment Name: Zm_100uM_ABA_P Parameter: Tissue Value: Aerial
  misc_feature: MA Experiment 108597 PARAMETER Experiment Name: Zm_100uM_ABA_P Parameter: Treatment Value: 100uM ABA vs. No Treatment
  misc_feature: MA Experiment ID: 20000108 Result: Down-regulated in Transcription
  misc_feature: MA Experiment 20000108 PARAMETER Experiment Name: Zm_Root-Tips_P Parameter: Age (day) Value: 12
  misc_feature: MA Experiment 20000108 PARAMETER Experiment Name: Zm_Root-Tips_P Parameter: Organism Value: Zea mays
  misc_feature: MA Experiment 20000108 PARAMETER Experiment Name: Zm_Root-Tips_P Parameter: Tissue Value: Root tips vs. Root mid region    35
  misc_feature: MA Experiment 20000108 PARAMETER Experiment Name: Zm_Root-Tips_P Parameter: Tissue Value: Root tips vs. Root mid region   Sequence Listing-Misc Features (4)
  misc_feature: MA Experiment ID: 20000479 Result: Down-regulated in Transcription
  misc_feature: MA Experiment 20000479 PARAMETER Experiment Name: Zm_Drought_P Parameter: Age (day) Value: 10
  misc_feature: MA Experiment 20000479 PARAMETER Experiment Name: Zm_Drought_P Parameter: Organism Value: Zea mays
  misc_feature: MA Experiment 20000479 PARAMETER Experiment Name: Zm_Drought_P Parameter: Plant Line Value: 35A19
  misc_feature: MA Experiment 20000479 PARAMETER Experiment Name: Zm_Drought_P Parameter: Timepoint (hr) Value: 48
  misc_feature: MA Experiment 20000479 PARAMETER Experiment Name: Zm_Drought_P Parameter: Tissue Value: Aerial
  misc_feature: MA Experiment 20000479 PARAMETER Experiment Name: Zm_Drought_P Parameter: Treatment Value: Drought vs. No Drought
  misc_feature: MA Experiment ID: 20000492 Result: Down-regulated in Transcription
  misc_feature: MA Experiment 20000492 PARAMETER Experiment Name: Zm_Hybrid_Seed_Dev_P Parameter: DAP Value: 12
  misc_feature: MA Experiment 20000492 PARAMETER Experiment Name: Zm_Hybrid_Seed_Dev_P Parameter: Organism Value: Zea mays
  misc_feature: MA Experiment 20000492 PARAMETER Experiment Name: Zm_Hybrid_Seed_Dev_P Parameter: Plant Line Value: 35A19
  misc_feature: MA Experiment 20000492 PARAMETER Experiment Name: Zm_Hybrid_Seed_Dev_P Parameter: Tissue Value: Fert Kernel vs. Unfert Floret
  misc_feature: MA Experiment ID: 20000532 Result: Up-regulated in Transcription
  misc_feature: MA Experiment 20000532 PARAMETER Experiment Name: Zm_0.001percent_MeJA_P Parameter: Age (day) Value: 10
  misc_feature: MA Experiment 20000532 PARAMETER Experiment Name: Zm_0.001percent_MeJA_P Parameter: Organism Value: Zea mays
  misc_feature: MA Experiment 20000532 PARAMETER Experiment Name: Zm_0.001percent_MeJA_P Parameter: Plant Line Value: 35A19
  misc_feature: MA Experiment 20000532 PARAMETER Experiment Name: Zm_0.001percent_MeJA_P Parameter: Timepoint (hr) Value: 48
  misc_feature: MA Experiment 20000532 PARAMETER Experiment Name: Zm_0.001percent_MeJA_P Parameter: Tissue Value: Aerial
  misc_feature: MA Experiment 20000532 PARAMETER Experiment Name: Zm_0.001percent_MeJA_P Parameter: Treatment Value: 0.001percent MeJA vs. No Treatment
  misc_feature: MA Experiment ID: 20000535 Result: Down-regulated in Transcription
  misc_feature: MA Experiment 20000535 PARAMETER Experiment Name: Zm_Hybrid_Seed_Dev_P Parameter: DAP Value: 30 vs. 12
  misc_feature: MA Experiment 20000535 PARAMETER Experiment Name: Zm_Hybrid_Seed_Dev_P Parameter: Organism Value: Zea mays
  misc_feature: MA Experiment 20000535 PARAMETER Experiment Name: Zm_Hybrid_Seed_Dev_P Parameter: Plant Line Value: 35A19
  misc_feature: MA Experiment 20000535 PARAMETER Experiment Name: Zm_Hybrid_Seed_Dev_P Parameter: Tissue Value: Embryo vs. Unfert Floret
  misc_feature: MA Experiment ID: 20000630 Result: Up-regulated in Transcription
  misc_feature: MA Experiment 20000630 PARAMETER Experiment Name: Zm_Herbicide-Treatments_P Parameter: Timepoint (hr) Value: 4
  misc_feature: MA Experiment 20000630 PARAMETER Experiment Name: Zm_Herbicide-Treatments_P Parameter: Tissue Value: Aerial
  misc_feature: MA Experiment 20000630 PARAMETER Experiment Name: Zm_Herbicide-Treatments_P Parameter: Treatment Value: Roundup vs. No Treatment
ctcgatcatctcccatcacttcctagctagtcgttcttactcaacacattattcgatcttgagtggaagcaaagcaggcagacatggcggcggctactgcaccaaagacgatgccgtcgtccgttttcgccgccgcactgctgctcctagccgcggcggcgtgccaggccagcccttactaccctctggagctagggtactaccgttacacttgtccccaggccgaggctatcgtcaaggccagcatggagaaggccatcgctcagaaccctggcaatggcgccgccgtcatccgcatgctcttccatgactgcttcgtcgagggctgcgacgcttccgtgcttctcgacccgaccccgttcagcccgacgccggagaagctggccgcacccaacaacccgagcctgcgcgggttcgagctgatcgacgccatcaaggacgccctcgaggccgcgtgccccggggtcgtctcctgcgccgacatcatcgccttcgcggcgcgcgacgcgtcctgcttcctgagccagggcaaggtctccttcgacatgccgtcgggccgcctcgacggcaccttctccaacgcctccgagtcggtcaagttcctcgtcccgcccacgtccaacctcagcgacctcgcctccagcttcgccgtcaagggcatgtcgctggaggacctggtcgtcctctccggcgcgcacaccgtcggccgctcccactgctcctccttcgtctccgaccgcctcgacgtcccctccgacatcaaccctgcgctggccgccttcctcaggacccgctgcccgcccaacacgaccaccagcgacgaccccaccgtgatgcaggacgtggtcacgcccaacgccatggacatccagtactacaagaacgtgctctcgcacaccgtgctcttcacctccgacgccgcgctcctcacgtcgccggagacggccaagttggtgctggacaacgccaagatccccgggtggtgggaggacaagttcgagaaggccatggtcaagatggctagcctcgaagtcaagactgggcaccaaggacaagtcaggaagaactgcagggcgatcaatcactactagctaacagctggttgttgatcagcttgcaccactgcaatgtggaagaccttcagaaaagaaaaactgcacagtacgggtgatggatggtgaaggatcaatcggttcagttgtgttggtgtttaatttgttcatgacctgcaagagtgtggtttgttgtgtatgatatggcaactgttgttattatctttccatttgcctttgatttgttgaaaacctggagaggtttgtatctgctattattctttggtttgtgtttctatatttggattataaaataaagttgaatatataagtgttcagttctttt

SEQ ID NO: 5512 - protein, 335 aa, Zea mays subsp. mays
  peptide (1)..(335): Ceres Seq. ID no. 12386789
  misc_feature (51)..(297): Pfam Name: Peroxidase Pfam Description: Peroxidase
  misc_feature (1)..(335): Homolog of NCBI NO: 12056450 NR Description: peroxidase [Zea mays]
  misc_feature (4)..(334): Homolog of NCBI NO: 12039355 NR Description: putative peroxidase [Oryza sativa]
  misc_feature (12)..(334): Homolog of NCBI NO: 34896266 NR Description: putative peroxidase [Oryza sativa]
  misc_feature (1)..(333): Homolog of NCBI NO: 34896268 NR Description: putative peroxidase [Oryza sativa]
  misc_feature (17)..(334): Homolog of NCBI NO: 34896944 NR Description: putative peroxidase [Oryza sativa]
  misc_feature (6)..(333): Homolog of NCBI NO: 12039346 NR Description: putative peroxidase [Oryza sativa]
  misc_feature (16)..(333): Homolog of NCBI NO: 12039354 NR Description: putative peroxidase [Oryza sativa]
  misc_feature (16)..(333): Homolog of NCBI NO: 12039335 NR Description: putative peroxidase [Oryza sativa]
  misc_feature (18)..(333): Homolog of NCBI NO: 27261094 NR Description: putative peroxidase [Oryza sativa (japonica
  misc_feature (35)..(333): Homolog of NCBI NO: 27261097 NR Description: putative peroxidase [Oryza sativa (japonica
MAAATAPKTMPSSVFAAALLLLAAAACQASPYYPLELGYYRYTCPQAEAIVKASMEKAIAQNPGNGAAVIRMLFHDCFVEGCDASVLLDPTPFSPTPEKLAAPNNPSLRGFELIDAIKDALEAACPGVVSCADIIAFAARDASCFLSQGKVSFDMPSGRLDGTFSNASESVKFLVPPTSNLSDLASSFAVKGMSLEDLVVLSGAHTVGRSHCSSFVSDRLDVPSDINPALAAFLRTRCPPNTTTSDDPTVMQDVVTPNAMDIQYYKNVLSHTVLFTSDAALLTSPETAKLVLDNAKIPGWWEDKFEKAMVKMASLEVKTGHQGQVRKNCRAINHY

SEQ ID NO: 5513 - protein, 326 aa, Zea mays subsp. mays
  peptide (1)..(326): Ceres Seq. ID no. 12386790
  misc_feature (42)..(288): Pfam Name: Peroxidase Pfam Description: Peroxidase
  misc_feature (1)..(326): Homolog of NCBI NO: 12056450 NR Description: peroxidase [Zea mays]
  misc_feature (1)..(325): Homolog of NCBI NO: 12039355 NR Description: putative peroxidase [Oryza sativa]
  misc_feature (3)..(325): Homolog of NCBI NO: 34896266 NR Description: putative peroxidase [Oryza sativa]
  misc_feature (1)..(324): Homolog of NCBI NO: 34896268 NR Description: putative peroxidase [Oryza sativa]
  misc_feature (8)..(325): Homolog of NCBI NO: 34896944 NR Description: putative peroxidase [Oryza sativa]
  misc_feature (1)..(324): Homolog of NCBI NO: 12039346 NR Description: putative peroxidase [Oryza sativa]
  misc_feature (7)..(324): Homolog of NCBI NO: 12039354 NR Description: putative peroxidase [Oryza sativa]
  misc_feature (7)..(324): Homolog of NCBI NO: 12039335 NR Description: putative peroxidase [Oryza sativa]
  misc_feature (9)..(324): Homolog of NCBI NO: 27261094 NR Description: putative peroxidase [Oryza sativa (japonica
  misc_feature (26)..(324): Homolog of NCBI NO: 27261097 NR Description: putative peroxidase [Oryza sativa (japonica
MPSSVFAAALLLLAAAACQASPYYPLELGYYRYTCPQAEAIVKASMEKAIAQNPGNGAAVIRMLFHDCFVEGCDASVLLDPTPFSPTPEKLAAPNNPSLRGFELIDAIKDALEAACPGVVSCADIIAFAARDASCFLSQGKVSFDMPSGRLDGTFSNASESVKFLVPPTSNLSDLASSFAVKGMSLEDLVVLSGAHTVGRSHCSSFVSDRLDVPSDINPALAAFLRTRCPPNTTTSDDPTVMQDVVTPNAMDIQYYKNVLSHTVLFTSDAALLTSPETAKLVLDNAKIPGWWEDKFEKAMVKMASLEVKTGHQGQVRKNCRAINHY

SEQ ID NO: 5514 - protein, 281 aa, Zea mays subsp. mays
  peptide (1)..(281): Ceres Seq. ID no. 12386791
  misc_feature (1)..(243): Pfam Name: Peroxidase Pfam Description: Peroxidase
  misc_feature (1)..(279): Homolog of NCBI NO: 27261094 NR Description: putative peroxidase [Oryza sativa (japonica
  misc_feature (1)..(281): Homolog of NCBI NO: 12056450 NR Description: peroxidase [Zea mays]
  misc_feature (1)..(280): Homolog of NCBI NO: 34896266 NR Description: putative peroxidase [Oryza sativa]
  misc_feature (1)..(280): Homolog of NCBI NO: 34896944 NR Description: putative peroxidase [Oryza sativa]
  misc_feature (1)..(279): Homolog of NCBI NO: 12039354 NR Description: putative peroxidase [Oryza sativa]
  misc_feature (1)..(279): Homolog of NCBI NO: 12039335 NR Description: putative peroxidase [Oryza sativa]
  misc_feature (1)..(279): Homolog of NCBI NO: 12039346 NR Description: putative peroxidase [Oryza sativa]
  misc_feature (1)..(279): Homolog of NCBI NO: 34896268 NR Description: putative peroxidase [Oryza sativa]
  misc_feature (1)..(280): Homolog of NCBI NO: 12039355 NR Description: putative peroxidase [Oryza sativa]
  misc_feature (1)..(279): Homolog of NCBI NO: 27261097 NR Description: putative peroxidase [Oryza sativa (japonica
MEKAIAQNPGNGAAVIRMLFHDCFVEGCDASVLLDPTPFSPTPEKLAAPNNPSLRGFELIDAIKDALEAACPGVVSCADIIAFAARDASCFLSQGKVSFDMPSGRLDGTFSNASESVKFLVPPTSNLSDLASSFAVKGMSLEDLVVLSGAHTVGRSHCSSFVSDRLDVPSDINPALAAFLRTRCPPNTTTSDDPTVMQDVVTPNAMDIQYYKNVLSHTVLFTSDAALLTSPETAKLVLDNAKIPGWWEDKFEKAMVKMASLEVKTGHQGQVRKNCRAINHY

SEQ ID NO: 5515 - DNA, 1324 bp, Zea mays subsp. mays
  misc_feature (1)..(1324): Ceres Seq. ID no. 13492565
  misc_feature: MA Experiment ID: 108522 Result: Down-regulated in Transcription
  misc_feature: MA Experiment 108522 PARAMETER Experiment Name: Zm_42deg_Heat_P Parameter: Age (day) Value: 8
  misc_feature: MA Experiment 108522 PARAMETER Experiment Name: Zm_42deg_Heat_P Parameter: Organism Value: Zea mays
  misc_feature: MA Experiment 108522 PARAMETER Experiment Name: Zm_42deg_Heat_P Parameter: Plant Line Value: 35A19
  misc_feature: MA Experiment 108522 PARAMETER Experiment Name: Zm_42deg_Heat_P Parameter: Temperature (deg C) Value: 42 vs. 22
  misc_feature: MA Experiment 108522 PARAMETER Experiment Name: Zm_42deg_Heat_P Parameter: Timepoint (hr) Value: 1
  misc_feature: MA Experiment 108522 PARAMETER Experiment Name: Zm_42deg_Heat_P Parameter: Tissue Value: Aerial
  misc_feature: MA Experiment ID: 108527 Result: Down-regulated in Transcription
  misc_feature: MA Experiment 108527 PARAMETER Experiment Name: Zm_5mM_NO_P Parameter: Age (day) Value: 8
  misc_feature: MA Experiment 108527 PARAMETER Experiment Name: Zm_5mM_NO_P Parameter: Organism Value: Zea mays
  misc_feature: MA Experiment 108527 PARAMETER Experiment Name: Zm_5mM_NO_P Parameter: Plant Line Value: 35A19
  misc_feature: MA Experiment 108527 PARAMETER Experiment Name: Zm_5mM_NO_P Parameter: Timepoint (hr) Value: 6
  misc_feature: MA Experiment 108527 PARAMETER Experiment Name: Zm_5mM_NO_P Parameter: Tissue Value: Aerial
  misc_feature: MA Experiment 108527 PARAMETER Experiment Name: Zm_5mM_NO_P Parameter: Treatment Value: 5mM NO vs. No Treatment
  misc_feature: MA Experiment ID: 108535 Result: Down-regulated in Transcription
  misc_feature: MA Experiment 108535 PARAMETER Experiment Name: Zm_Meristem_P Parameter: Age (day) Value: 8
  misc_feature: MA Experiment 108535 PARAMETER Experiment Name: Zm_Meristem_P Parameter: Organism Value: Zea mays
  misc_feature: MA Experiment 108535 PARAMETER Experiment Name: Zm_Meristem_P Parameter: Plant Line Value: 35A19
  misc_feature: MA Experiment 108535 PARAMETER Experiment Name: Zm_Meristem_P Parameter: Tissue Value: Root Meristem vs. Above Root Meristem
  misc_feature: MA Experiment ID: 108536 Result: Up-regulated in Transcription
  misc_feature: MA Experiment 108536 PARAMETER Experiment Name: Zm_Meristem_P Parameter: Age (day) Value: 8
  misc_feature: MA Experiment 108536 PARAMETER Experiment Name: Zm_Meristem_P Parameter: Organism Value: Zea mays
  misc_feature: MA Experiment 108536 PARAMETER Experiment Name: Zm_Meristem_P Parameter: Plant Line Value: 35A19
  misc_feature: MA Experiment 108536 PARAMETER Experiment Name: Zm_Meristem_P Parameter: Tissue Value: Shoot Meristem vs. Above Shoot Meristem
  misc_feature: MA Experiment ID: 108689 Result: Down-regulated in Transcription
  misc_feature: MA Experiment 108689 PARAMETER Experiment Name: Zm_Drought_Roots_P Parameter: Age (day) Value: 9
  misc_feature: MA Experiment 108689 PARAMETER Experiment Name: Zm_Drought_Roots_P Parameter: Organism Value: Zea mays
  misc_feature: MA Experiment 108689 PARAMETER Experiment Name: Zm_Drought_Roots_P Parameter: Plant Line Value: 35A19
  misc_feature: MA Experiment 108689 PARAMETER Experiment Name: Zm_Drought_Roots_P Parameter: Timepoint (hr) Value: 24
  misc_feature: MA Experiment 108689 PARAMETER Experiment Name: Zm_Drought_Roots_P Parameter: Tissue Value: Roots
  misc_feature: MA Experiment 108689 PARAMETER Experiment Name: Zm_Drought_Roots_P Parameter: Treatment Value: Drought vs. No Drought
aacaagaaagcgaccaccgctgtgaatcagcagagctgcagtgagagcaagtgagaggatcagaggaggcatccgtgaccaaagatcgagtagccaagaagaagagagatgaacgccgacttcggcgcgccccaaggagctcgcgggaggcctgcagcagcggcgggccctctaccagccccgcctcccgccatgcctccagggaccgacggtaagggcggagtacggtgacgcgaccacaaccatagatcccacctgtgcccaagccgtcgcgcaggccttcccgcacacctttggccagccgctcgtcagcttcgtcgcgccggccgccggcgccggcgccgttgaggagcgccacccgatcagggtgggcgtggtgttctctgggaggcagtcgccgggagggcacaacgtcgtctggggcctccatgacgcacttaaagcctacaatcctcagagcttgctctacggattcgtcggtggcacggagggactgtttgcaaacaagacgttggagatcacagacgatgttcttgcttcctataagaaccaaggtggtttcgatttgctcggtaggagtatcgatcagatccgcactactaagcaagtgaatgctgcaatgacaacatgccacagtctgaacttggatgggttggtcatcattggaggtgtgacctccaattcagatgctgcacagcttgcggagacccttattcagaataactgtaagaccaaggttgttggtgtgccagtttcattgaatggtgacctcaagaaccagtttgttgaaacaacagttggatttgatacagtatgtaaggttaattcacagcttgtaagcaatgtttgtcttgatgcgatctcagctggaaagtactattattttgttcgtctgatgggacgaaaagcatctcatgttgcctttgaatgtgcacttcaatcacacccaaacatgctcatcttaggcgaggaggtagcattgtcaaaactcacactgatggaaattataagcaagatttgtgatggagtacaagcaagggcaaaattagggaaatatcatggtgtgcttgttattcccgaaggacttatagaaagcattccagaaatgtatgctcttattcaggaaatcaatatccttcacaacagtaatgttcctgtggctgagatgtcatcacaactgtctccgtgggcagctgctctgttccagttcttgccacccttcatcaggagagagctgctgctccaccaagaatcagataactctgcgcagctgtcccaaattgacacggagcaactgctggcccatctagtagaaacagaaatg

SEQ ID NO: 5516 - protein, 235 aa, Zea mays subsp. mays
  peptide (1)..(235): Ceres Seq. ID no. 13492566
  misc_feature (1)..(196): Pfam Name: Phosphofructokinase Pfam Description: Phosphofructokinase
  misc_feature (1)..(196): Pfam Name: Phosphofructokinase Pfam Description: Phosphofructokinase
  misc_feature (1)..(234): Homolog of NCBI NO: 29647436 NR Description: putative pyrophosphate--fructose 6-phosphate 1-
  misc_feature (1)..(234): Homolog of NCBI NO: 29367525 NR Description: fructose-6-phosphate 1-phosphotransferase [Oryza
  misc_feature (1)..(234): Homolog of NCBI NO: 3790102 NR Description: pyrophosphate-dependent phosphofructokinase alpha
  misc_feature (1)..(234): Homolog of NCBI NO: 2499488 NR Description: Pyrophosphate--fructose 6-phosphate
  misc_feature (1)..(234): Homolog of NCBI NO: 129881 NR Description: Pyrophosphate--fructose 6-phosphate
  misc_feature (1)..(234): Homolog of NCBI NO: 29367525 NR Description: fructose-6-phosphate 1-phosphotransferase [Oryza
  misc_feature (1)..(234): Homolog of NCBI NO: 2499488 NR Description: Pyrophosphate--fructose 6-phosphate
  misc_feature (1)..(234): Homolog of NCBI NO: 2507174 NR Description: PYROPHOSPHATE--FRUCTOSE 6-PHOSPHATE
  misc_feature (1)..(234): Homolog of NCBI NO: 3790100 NR Description: pyrophosphate-dependent phosphofructokinase beta
  misc_feature (1)..(234): Homolog of NCBI NO: 2499489 NR Description: Pyrophosphate--fructose 6-phosphate
  misc_feature (1)..(234): Homolog of NCBI NO: 15218074 NR Description: pyrophosphate-dependent phosphofructokinase alpha - related [Arabidopsis thaliana] >gi|25314966|pir||D86342
  misc_feature (1)..(234): Homolog of NCBI NO: 15223082 NR Description: pyrophosphate-dependent phosphofructokinase alpha - related [Arabidopsis thaliana] >gi|25314958|pir||E96793
  misc_feature (1)..(234): Homolog of NCBI NO: 129881 NR Description: Pyrophosphate--fructose 6-phosphate
  misc_feature (1)..(234): Homolog of NCBI NO: 3790102 NR Description: pyrophosphate-dependent phosphofructokinase alpha
  misc_feature (1)..(234): Homolog of NCBI NO: 29647436 NR Description: putative pyrophosphate--fructose 6-phosphate 1-
  misc_feature (1)..(234): Homolog of NCBI NO: 15223082 NR Description: pyrophosphate-dependent phosphofructokinase alpha - related [Arabidopsis thaliana] >gi|25314958|pir||E96793
  misc_feature (1)..(234): Homolog of NCBI NO: 15218074 NR Description: pyrophosphate-dependent phosphofructokinase alpha - related [Arabidopsis thaliana] >gi|25314966|pir||D86342
  misc_feature (1)..(234): Homolog of NCBI NO: 2499489 NR Description: Pyrophosphate--fructose 6-phosphate
  misc_feature (1)..(234): Homolog of NCBI NO: 3790100 NR Description: pyrophosphate-dependent phosphofructokinase beta
  misc_feature (1)..(234): Homolog of NCBI NO: 2507174 NR Description: PYROPHOSPHATE--FRUCTOSE 6-PHOSPHATE
MTTCHSLNLDGLVIIGGVTSNSDAAQLAETLIQNNCKTKVVGVPVSLNGDLKNQFVETTVGFDTVCKVNSQLVSNVCLDAISAGKYYYFVRLMGRKASHVAFECALQSHPNMLILGEEVALSKLTLMEIISKICDGVQARAKLGKYHGVLVIPEGLIESIPEMYALIQEINILHNSNVPVAEMSSQLSPWAAALFQFLPPFIRRELLLHQESDNSAQLSQIDTEQLLAHLVETEM

SEQ ID NO: 5517 - protein, 143 aa, Zea mays subsp. mays
  peptide (1)..(143): Ceres Seq. ID no. 13492567
  misc_feature (1)..(104): Pfam Name: Phosphofructokinase Pfam Description: Phosphofructokinase
  misc_feature (1)..(104): Pfam Name: Phosphofructokinase Pfam Description: Phosphofructokinase
  misc_feature (1)..(142): Homolog of NCBI NO: 29647436 NR Description: putative pyrophosphate--fructose 6-phosphate 1-
  misc_feature (1)..(142): Homolog of NCBI NO: 29367525 NR Description: fructose-6-phosphate 1-phosphotransferase [Oryza
  misc_feature (1)..(142): Homolog of NCBI NO: 3790102 NR Description: pyrophosphate-dependent phosphofructokinase alpha
  misc_feature (1)..(142): Homolog of NCBI NO: 2499488 NR Description: Pyrophosphate--fructose 6-phosphate
  misc_feature (1)..(142): Homolog of NCBI NO: 129881 NR Description: Pyrophosphate--fructose 6-phosphate
  misc_feature (1)..(142): Homolog of NCBI NO: 29367525 NR Description: fructose-6-phosphate 1-phosphotransferase [Oryza
  misc_feature (1)..(142): Homolog of NCBI NO: 2499488 NR Description: Pyrophosphate--fructose 6-phosphate
  misc_feature (1)..(142): Homolog of NCBI NO: 2507174 NR Description: PYROPHOSPHATE--FRUCTOSE 6-PHOSPHATE
  misc_feature (1)..(142): Homolog of NCBI NO: 3790100 NR Description: pyrophosphate-dependent phosphofructokinase beta
  misc_feature (1)..(142): Homolog of NCBI NO: 2499489 NR Description: Pyrophosphate--fructose 6-phosphate
  misc_feature (1)..(142): Homolog of NCBI NO: 15218074 NR Description: pyrophosphate-dependent phosphofructokinase alpha - related [Arabidopsis thaliana] >gi|25314966|pir||D86342
  misc_feature (1)..(142): Homolog of NCBI NO: 15223082 NR Description: pyrophosphate-dependent phosphofructokinase alpha - related [Arabidopsis thaliana] >gi|25314958|pir||E96793
  misc_feature (1)..(142): Homolog of NCBI NO: 129881 NR Description: Pyrophosphate--fructose 6-phosphate
  misc_feature (1)..(142): Homolog of NCBI NO: 3790102 NR Description: pyrophosphate-dependent phosphofructokinase alpha
  misc_feature (1)..(142): Homolog of NCBI NO: 29647436 NR Description: putative pyrophosphate--fructose 6-phosphate 1-
  misc_feature (1)..(142): Homolog of NCBI NO: 15223082 NR Description: pyrophosphate-dependent phosphofructokinase alpha - related [Arabidopsis thaliana] >gi|25314958|pir||E96793
  misc_feature (1)..(142): Homolog of NCBI NO: 15218074 NR Description: pyrophosphate-dependent phosphofructokinase alpha - related [Arabidopsis thaliana] >gi|25314966|pir||D86342
  misc_feature (1)..(142): Homolog of NCBI NO: 2499489 NR Description: Pyrophosphate--fructose 6-phosphate
  misc_feature (1)..(142): Homolog of NCBI NO: 3790100 NR Description: pyrophosphate-dependent phosphofructokinase beta
  misc_feature (1)..(142): Homolog of NCBI NO: 2507174 NR Description: PYROPHOSPHATE--FRUCTOSE 6-PHOSPHATE
MGRKASHVAFECALQSHPNMLILGEEVALSKLTLMEIISKICDGVQARAKLGKYHGVLVIPEGLIESIPEMYALIQEINILHNSNVPVAEMSSQLSPWAAALFQFLPPFIRRELLLHQESDNSAQLSQIDTEQLLAHLVETEM

SEQ ID NO: 5518 - protein, 124 aa, Zea mays subsp. mays
  peptide (1)..(124): Ceres Seq. ID no. 13492568
  misc_feature (1)..(85): Pfam Name: Phosphofructokinase Pfam Description: Phosphofructokinase
  misc_feature (1)..(85): Pfam Name: Phosphofructokinase Pfam Description: Phosphofructokinase
  misc_feature (1)..(123): Homolog of NCBI NO: 29647436 NR Description: putative pyrophosphate--fructose 6-phosphate 1-
  misc_feature (1)..(123): Homolog of NCBI NO: 29367525 NR Description: fructose-6-phosphate 1-phosphotransferase [Oryza
  misc_feature (1)..(123): Homolog of NCBI NO: 3790102 NR Description: pyrophosphate-dependent phosphofructokinase alpha
  misc_feature (1)..(123): Homolog of NCBI NO: 2499488 NR Description: Pyrophosphate--fructose 6-phosphate
  misc_feature (1)..(123): Homolog of NCBI NO: 129881 NR Description: Pyrophosphate--fructose 6-phosphate
  misc_feature (1)..(123): Homolog of NCBI NO: 29367525 NR Description: fructose-6-phosphate 1-phosphotransferase [Oryza
  misc_feature (1)..(123): Homolog of NCBI NO: 2499488 NR Description: Pyrophosphate--fructose 6-phosphate
  misc_feature (1)..(123): Homolog of NCBI NO: 2507174 NR Description: PYROPHOSPHATE--FRUCTOSE 6-PHOSPHATE
  misc_feature (1)..(123): Homolog of NCBI NO: 3790100 NR Description: pyrophosphate-dependent phosphofructokinase beta
  misc_feature (1)..(123): Homolog of NCBI NO: 2499489 NR Description: Pyrophosphate--fructose 6-phosphate
  misc_feature (1)..(123): Homolog of NCBI NO: 15218074 NR Description: pyrophosphate-dependent phosphofructokinase alpha - related [Arabidopsis thaliana] >gi|25314966|pir||D86342
  misc_feature (1)..(123): Homolog of NCBI NO: 15223082 NR Description: pyrophosphate-dependent phosphofructokinase alpha - related [Arabidopsis thaliana] >gi|25314958|pir||E96793
  misc_feature (1)..(123): Homolog of NCBI NO: 129881 NR Description: Pyrophosphate--fructose 6-phosphate
  misc_feature (1)..(123): Homolog of NCBI NO: 3790102 NR Description: pyrophosphate-dependent phosphofructokinase alpha
  misc_feature (1)..(123): Homolog of NCBI NO: 29647436 NR Description: putative pyrophosphate--fructose 6-phosphate 1-
  misc_feature (1)..(123): Homolog of NCBI NO: 15223082 NR Description: pyrophosphate-dependent phosphofructokinase alpha - related [Arabidopsis thaliana] >gi|25314958|pir||E96793
  misc_feature (1)..(123): Homolog of NCBI NO: 15218074 NR Description: pyrophosphate-dependent phosphofructokinase alpha - related [Arabidopsis thaliana] >gi|25314966|pir||D86342
  misc_feature (1)..(123): Homolog of NCBI NO: 2499489 NR Description: Pyrophosphate--fructose 6-phosphate
  misc_feature (1)..(123): Homolog of NCBI NO: 3790100 NR Description: pyrophosphate-dependent phosphofructokinase beta
  misc_feature (1)..(123): Homolog of NCBI NO: 2507174 NR Description: PYROPHOSPHATE--FRUCTOSE 6-PHOSPHATE
MLILGEEVALSKLTLMEIISKICDGVQARAKLGKYHGVLVIPEGLIESIPEMYALIQEINILHNSNVPVAEMSSQLSPWAAALFQFLPPFIRRELLLHQESDNSAQLSQIDTEQLLAHLVETEM

SEQ ID NO: 5519 - DNA, 1553 bp, Zea mays subsp. mays
  misc_feature (1)..(1553): Ceres Seq. ID no. 12350501
  misc_feature: MA Experiment ID: 108522 Result: Up-regulated in Transcription
  misc_feature: MA Experiment 108522 PARAMETER Experiment Name: Zm_42deg_Heat_P Parameter: Age (day) Value: 8
  misc_feature: MA Experiment 108522 PARAMETER Experiment Name: Zm_42deg_Heat_P Parameter: Organism Value: Zea mays
  misc_feature: MA Experiment 108522 PARAMETER Experiment Name: Zm_42deg_Heat_P Parameter: Plant Line Value: 35A19
  misc_feature: MA Experiment 108522 PARAMETER Experiment Name: Zm_42deg_Heat_P Parameter: Temperature (deg C) Value: 42 vs. 22
  misc_feature: MA Experiment 108522 PARAMETER Experiment Name: Zm_42deg_Heat_P Parameter: Timepoint (hr) Value: 1
  misc_feature: MA Experiment 108522 PARAMETER Experiment Name: Zm_42deg_Heat_P Parameter: Tissue Value: Aerial
  misc_feature: MA Experiment ID: 108533 Result: Up-regulated in Transcription
  misc_feature: MA Experiment 108533 PARAMETER Experiment Name: Zm_4deg_Cold_P Parameter: Age (hr) Value: 8
  misc_feature: MA Experiment 108533 PARAMETER Experiment Name: Zm_4deg_Cold_P Parameter: Organism Value: Zea mays
  misc_feature: MA Experiment 108533 PARAMETER Experiment Name: Zm_4deg_Cold_P Parameter: Plant Line Value: 35A19
  misc_feature: MA Experiment 108533 PARAMETER Experiment Name: Zm_4deg_Cold_P Parameter: Temperature (deg C) Value: 4 vs. 22
  misc_feature: MA Experiment 108533 PARAMETER Experiment Name: Zm_4deg_Cold_P Parameter: Timepoint (hr) Value: 1
  misc_feature: MA Experiment 108533 PARAMETER Experiment Name: Zm_4deg_Cold_P Parameter: Tissue Value: Aerial
  misc_feature: MA Experiment ID: 108534 Result: Up-regulated in Transcription
  misc_feature: MA Experiment 108534 PARAMETER Experiment Name: Zm_4deg_Cold_P Parameter: Age (hr) Value: 8
  misc_feature: MA Experiment 108534 PARAMETER Experiment Name: Zm_4deg_Cold_P Parameter: Organism Value: Zea mays
  misc_feature: MA Experiment 108534 PARAMETER Experiment Name: Zm_4deg_Cold_P Parameter: Plant Line Value: 35A19
  misc_feature: MA Experiment 108534 PARAMETER Experiment Name: Zm_4deg_Cold_P Parameter: Temperature (deg C) Value: 4 vs. 22
  misc_feature: MA Experiment 108534 PARAMETER Experiment Name: Zm_4deg_Cold_P Parameter: Timepoint (hr) Value: 6
  misc_feature: MA Experiment 108534 PARAMETER Experiment Name: Zm_4deg_Cold_P Parameter: Tissue Value: Aerial
  misc_feature: MA Experiment ID: 108543 Result: Down-regulated in Transcription
  misc_feature: MA Experiment ID: 20000480 Result: Down-regulated in Transcription
  misc_feature: MA Experiment 20000480 PARAMETER Experiment Name: Zm_Drought_P Parameter: Age (day) Value: 11
  misc_feature: MA Experiment 20000480 PARAMETER Experiment Name: Zm_Drought_P Parameter: Organism Value: Zea mays
  misc_feature: MA Experiment 20000480 PARAMETER Experiment Name: Zm_Drought_P Parameter: Plant Line Value: 35A19
  misc_feature: MA Experiment 20000480 PARAMETER Experiment Name: Zm_Drought_P Parameter: Timepoint (hr) Value: 72
  misc_feature: MA Experiment 20000480 PARAMETER Experiment Name: Zm_Drought_P Parameter: Tissue Value: Aerial
  misc_feature: MA Experiment 20000480 PARAMETER Experiment Name: Zm_Drought_P Parameter: Treatment Value: Drought vs. No Drought
aaaaaaacttcccctgtcacgagagtacgagaccacgccttccgtgggatcaatcggctagggtttcggagatgttcggccgccgccgaagaagagcgacaacacccggtactacgagatcctgggggtttccaaggacgcgtcacaggatgacctcaagaaggcctaccgcaaggccgccatcaagaaccaccccgacaagggcggcgaccccgagaagttcaaggagctagctcaggcttatgaggtcctcagcgaccctgaaaagagagagatctatgaccagtatggcgaggatgccctcaaggagggaatgggaggcggtggtgggatgcatgatccctttgacatattccagtcattctttggtggtggaagcccttttggaggtggcagcagtaggggcagaaggcaacgacggggagatgatgtggttcatcctctgaaggtttctctggaggatttgtacaatggcacatcaaagaagctctctctgtcccgcaatgtcctctgctccaagtgcaatggtaagggttccaagtctggagcttcgtcgaggtgtgctggttgtcaaggttctggcttcaaggtccaaatccggcagttgggacctggaatgattcagcaaatgcagcatccttgcaatgagtgcaagggttctggagagaccatcagcgataaggatagatgcccacaatgcaaaggtgataaagttgtgccggagaagaaagttcttgaagtggtagttgagaaaggtatgcagaacgggcagaagatcacattccctggcgaagctgatgaagcgcctgatactgccactggagatatcatctttgttctccagcagaaggagcatcccaagttcaagagaaagggcgatgacctcttctacgagcacacactgaccttgactgaatctctgtgtggcttccagtttgttctgactcacttggataacaggcagctgctgatcaaatcgaaccctggcgaagttgtgaagcctgattctttcaaggcaatcaacgatgaaggcatgcccatgtatcagaggcccttcatgaagggcaagctgtacatccacttctcggtggagttcccggactcgttgagcccggagcagtgcaaggccttggaggctgttctcccgcccaagccagtatcacagtacactgacatggagctggacgagtgcgaggagacaatgtcgtacgacgtgaacatcgaagaggagatgcggaggcggcaacagcagcaccaggaggcctacgacgaggatgatgatgtgccaggcggtgggcagagggtgcagtgcgcccagcagtaggcagcttgcggtaagtctacccgcttgtattggcctgatgatacttcggttacacgagtgcagttatcggtctgttagttcaagttctgcgtttggggtgttagatccaccagaattagatttgttcggcaagctacgctcgaatacatctcaatggtgacaccttaatggtgctctgaaaacgtttgctagcttctcatgaagttgacaactcacggcttgtttgtgt

SEQ ID NO: 5520 - protein, 336 aa, Zea mays subsp. mays
  peptide (1)..(336): Ceres Seq. ID no. 12350502
  misc_feature (153)..(277): Pfam Name: DnaJ C terminal region Pfam Description: DnaJ C terminal region
MGGGGGMHDPFDIFQSFFGGGSPFGGGSSRGRRQRRGDDVVHPLKVSLEDLYNGTSKKLSLSRNVLCSKCNGKGSKSGASSRCAGCQGSGFKVQIRQLGPGMIQQMQHPCNECKGSGETISDKDRCPQCKGDKVVPEKKVLEVVVEKGMQNGQKITFPGEADEAPDTATGDIIFVLQQKEHPKFKRKGDDLFYEHTLTLTESLCGFQFVLTHLDNRQLLIKSNPGEVVKPDSFKAINDEGMPMYQRPFMKGKLYIHFSVEFPDSLSPEQCKALEAVLPPKPVSQYTDMELDECEETMSYDVNIEEEMRRRQQQHQEAYDEDDDVPGGGQRVQCAQQ

SEQ ID NO: 5521 - protein, 330 aa, Zea mays subsp. mays
  peptide (1)..(330): Ceres Seq. ID no. 12350503
  misc_feature (147)..(271): Pfam Name: DnaJ C terminal region Pfam Description: DnaJ C terminal region
MHDPFDIFQSFFGGGSPFGGGSSRGRRQRRGDDVVHPLKVSLEDLYNGTSKKLSLSRNVLCSKCNGKGSKSGASSRCAGCQGSGFKVQIRQLGPGMIQQMQHPCNECKGSGETISDKDRCPQCKGDKVVPEKKVLEVVVEKGMQNGQKITFPGEADEAPDTATGDIIFVLQQKEHPKFKRKGDDLFYEHTLTLTESLCGFQFVLTHLDNRQLLIKSNPGEVVKPDSFKAINDEGMPMYQRPFMKGKLYIHFSVEFPDSLSPEQCKALEAVLPPKPVSQYTDMELDECEETMSYDVNIEEEMRRRQQQHQEAYDEDDDVPGGGQRVQCAQQ

SEQ ID NO: 5522 - protein, 235 aa, Zea mays subsp. mays
  peptide (1)..(235): Ceres Seq. ID no. 12350504
  misc_feature (52)..(176): Pfam Name: DnaJ C terminal region Pfam Description: DnaJ C terminal region
MIQQMQHPCNECKGSGETISDKDRCPQCKGDKVVPEKKVLEVVVEKGMQNGQKITFPGEADEAPDTATGDIIFVLQQKEHPKFKRKGDDLFYEHTLTLTESLCGFQFVLTHLDNRQLLIKSNPGEVVKPDSFKAINDEGMPMYQRPFMKGKLYIHFSVEFPDSLSPEQCKALEAVLPPKPVSQYTDMELDECEETMSYDVNIEEEMRRRQQQHQEAYDEDDDVPGGGQRVQCAQQ

SEQ ID NO: 5523 - DNA, 1663 bp, Zea mays subsp. mays
  misc_feature (1)..(1663): Ceres Seq. ID no. 12556784
  misc_feature: MA Experiment ID: 108523 Result: Up-regulated in Transcription
  misc_feature: MA Experiment 108523 PARAMETER Experiment Name: Zm_42deg_Heat_P Parameter: Age (day) Value: 8
  misc_feature: MA Experiment 108523 PARAMETER Experiment Name: Zm_42deg_Heat_P Parameter: Organism Value: Zea mays
  misc_feature: MA Experiment 108523 PARAMETER Experiment Name: Zm_42deg_Heat_P Parameter: Plant Line Value: 35A19
  misc_feature: MA Experiment 108523 PARAMETER Experiment Name: Zm_42deg_Heat_P Parameter: Temperature (deg C) Value: 42 vs. 22
  misc_feature: MA Experiment 108523 PARAMETER Experiment Name: Zm_42deg_Heat_P Parameter: Timepoint (hr) Value: 6
  misc_feature: MA Experiment 108523 PARAMETER Experiment Name: Zm_42deg_Heat_P Parameter: Tissue Value: Aerial
  misc_feature: MA Experiment ID: 108530 Result: Down-regulated in Transcription
  misc_feature: MA Experiment 108530 PARAMETER Experiment Name: Zm_Imbibed_Seeds_P Parameter: Age (day) Value: 6 vs. 2
  misc_feature: MA Experiment 108530 PARAMETER Experiment Name: Zm_Imbibed_Seeds_P Parameter: Organism Value: Zea mays
  misc_feature: MA Experiment 108530 PARAMETER Experiment Name: Zm_Imbibed_Seeds_P Parameter: Plant Line Value: 35A19
  misc_feature: MA Experiment 108530 PARAMETER Experiment Name: Zm_Imbibed_Seeds_P Parameter: Tissue Value: Aerial vs. Embryo
  misc_feature: MA Experiment ID: 108559 Result: Up-regulated in Transcription
  misc_feature: MA Experiment 108559 PARAMETER Experiment Name: Zm_5mM_NO_P Parameter: Age (day) Value: 8
  misc_feature: MA Experiment 108559 PARAMETER Experiment Name: Zm_5mM_NO_P Parameter: Organism Value: Zea mays
  misc_feature: MA Experiment 108559 PARAMETER Experiment Name: Zm_5mM_NO_P Parameter: Plant Line Value: 35A19
  misc_feature: MA Experiment 108559 PARAMETER Experiment Name: Zm_5mM_NO_P Parameter: Timepoint (hr) Value: 12
  misc_feature: MA Experiment 108559 PARAMETER Experiment Name: Zm_5mM_NO_P Parameter: Tissue Value: Aerial
  misc_feature: MA Experiment 108559 PARAMETER Experiment Name: Zm_5mM_NO_P Parameter: Treatment Value: 5mM NO vs. No Treatment
  misc_feature: MA Experiment ID: 108597 Result: Up-regulated in Transcription
  misc_feature: MA Experiment 108597 PARAMETER Experiment Name: Zm_100uM_ABA_P Parameter: Age (day) Value: 9
  misc_feature: MA Experiment 108597 PARAMETER Experiment Name: Zm_100uM_ABA_P Parameter: Organism Value: Zea mays
  misc_feature: MA Experiment 108597 PARAMETER Experiment Name: Zm_100uM_ABA_P Parameter: Plant Line Value: 35A19
  misc_feature: MA Experiment 108597 PARAMETER Experiment Name: Zm_100uM_ABA_P Parameter: Timepoint (hr) Value: 24
  misc_feature: MA Experiment 108597 PARAMETER Experiment Name: Zm_100uM_ABA_P Parameter: Tissue Value: Aerial
  misc_feature: MA Experiment 108597 PARAMETER Experiment Name: Zm_100uM_ABA_P Parameter: Treatment Value: 100uM ABA vs. No Treatment
  misc_feature: MA Experiment ID: 20000535 Result: Up-regulated in Transcription
  misc_feature: MA Experiment 20000535 PARAMETER Experiment Name: Zm_Hybrid_Seed_Dev_P Parameter: DAP Value: 30 vs. 12
  misc_feature: MA Experiment 20000535 PARAMETER Experiment Name: Zm_Hybrid_Seed_Dev_P Parameter: Organism Value: Zea mays
  misc_feature: MA Experiment 20000535 PARAMETER Experiment Name: Zm_Hybrid_Seed_Dev_P Parameter: Plant Line Value: 35A19
  misc_feature: MA Experiment 20000535 PARAMETER Experiment Name: Zm_Hybrid_Seed_Dev_P Parameter: Tissue Value: Embryo vs. Unfert Floret
atcgctacccagaaccctagccccctccaaaaacccttgtggcatcgtcatctccattgtccactcgctgccccgcccgagcccccgcttgtttccgcggcctcgccatttgcgtggttgaagaagcgaaagatgctcggcgcctctaggcgatccctcagtgccgccgcccgcagccgcgtggctgccggcgtagcctccgccgtcaccgccgacgcctcagtgccggcccgccccataagtgtagccatcctttttgctttctttattgatggcggttagccatgttaggtgagcaatggagcccgtggggttcctcagcagcagaataggttgctctcagtgcttgtggcacccaagattgcaggaatgagcaatgttgtggccctcaagctgatggatggtgcccttattggtagacgctatgaatcgagtgcagcagcagttgattctacggaccagctagctgagaagcacgagtaccaggctgaggtcaacaggctcatggatttgattgtgcacagcttgtatagtaacaaggaagttttccttcgagaactggtcagcaatgctagtgatgcacttgataagttgcgttatctgagtgtcacggaccctgagcttctgaaggatggtccccaacttgacattcgcattcaatcagacaaggataatggagtaataacaattactgattctgggattggtatgacgaaacaagagcttattgattctcttgggactattgaaagcagtggaactgccaagttccttaaagcattgaaggagagtcaagaagcgggcatggacaacaacttgattggccaatttggtgttggtttctattccacatttcttgtttcagagaaggttgttgtgtcaacaaagagcccaaaatctgacaaacaatatgtttgggaaggacaagcagattctggttcttataccattagagaggaaaaagacccagagaagctaattcctaggggaactcgccttactctctatcttaagcatgatgataagggctttgctcaccctgagaggattcaaaaacttttaaagaattattctcagtttgtttcctttcccatttacacatggcaagagaaaggcttcacaaaagaggtcgaggttgatgaggatccagcggaagccaaaaaaggggatgatgatatcaaaactgagcctaagaaaaagaccaaaaccgttgttgagaagtattgggattgggagctttcaaatgagacacaacctatttggcttcgaaaccctaaagaggtttcaactgaggagtacaatgaattttacaagaaaaccttcaatgagtacttgaatcctttggcctcctcacacttcactacagagggtgaggtagaatttaggtcaattctttatgttcctgctacaaggaaggatgatataactgataataggaagaccaagaatatcagactatatgttaaacgtgtattcatatcggatgactttgatggagaattgttcccaagatatttgagctttgtgaagggtgttgttgactcaaatgaccttccgttgaatgtttctcgtgagattcttcaagaaagtcgaattgttcgtataatgagaaagaggctagtgcggaaagccttcgatatgatacttggcatttcttgcagtg

SEQ ID NO: 5524 - protein, 431 aa, Zea mays subsp. mays
  peptide (1)..(431): Ceres Seq. ID no. 12556785
  misc_feature (221)..(430): Pfam Name: Hsp90 protein Pfam Description: Hsp90 protein
  misc_feature (1)..(430): Homolog of NCBI NO: 15231505 NR Description: putative heat-shock protein; protein id:
  misc_feature (1)..(429): Homolog of NCBI NO: 1076758 NR Description: heat-shock protein, 82K, precursor - rye
  misc_feature (20)..(429): Homolog of NCBI NO: 15228059 NR Description: putative heat shock protein; protein id: supported by cDNA: gi_15450722, supported by cDNA: gi_16930684, by cDNA: gi_20453105 [Arabidopsis thaliana]
  misc_feature (20)..(429): Homolog of NCBI NO: 30678090 NR Description: heat shock protein, putative [Arabidopsis
  misc_feature (20)..(429): Homolog of NCBI NO: 20453106 NR Description: At2g04030/F3C11.14 [Arabidopsis thaliana]
  misc_feature (1)..(429): Homolog of NCBI NO: 1906830 NR Description: heat shock protein [Arabidopsis thaliana]
  misc_feature (22)..(425): Homolog of NCBI NO: 17542208 NR Description: Endoplasmin (87.1 kD) [Caenorhabditis elegans]
  misc_feature (22)..(425): Homolog of NCBI NO: 39593714 NR Description: Hypothetical protein CBG06014 [Caenorhabditis
  misc_feature (33)..(424): Homolog of NCBI NO: 15237214 NR Description: heat-shock protein; protein id: At5g52640.1,
  misc_feature (33)..(424): Homolog of NCBI NO: 26454635 NR Description: Heat shock protein 81-1 (HSP81-1) (Heat shock
MSNVVALKLMDGALIGRRYESSAAAVDSTDQLAEKHEYQAEVNRLMDLIVHSLYSNKEVFLRELVSNASDALDKLRYLSVTDPELLKDGPQLDIRIQSDKDNGVITITDSGIGMTKQELIDSLGTIESSGTAKFLKALKESQEAGMDNNLIGQFGVGFYSTFLVSEKVVVSTKSPKSDKQYVWEGQADSGSYTIREEKDPEKLIPRGTRLTLYLKHDDKGFAHPERIQKLLKNYSQFVSFPIYTWQEKGFTKEVEVDEDPAEAKKGDDDIKTEPKKKTKTVVEKYWDWELSNETQPIWLRNPKEVSTEEYNEFYKKTFNEYLNPLASSHFTTEGEVEFRSILYVPATRKDDITDNRKTKNIRLYVKRVFISDDFDGELFPRYLSFVKGVVDSNDLPLNVSREILQESRIVRIMRKRLVRKAFDMILGISCS

SEQ ID NO: 5525 - protein, 422 aa, Zea mays subsp. mays
  peptide (1)..(422): Ceres Seq. ID no. 12556786
  misc_feature (212)..(421): Pfam Name: Hsp90 protein Pfam Description: Hsp90 protein
  misc_feature (1)..(421): Homolog of NCBI NO: 15231505 NR Description: putative heat-shock protein; protein id:
  misc_feature (1)..(420): Homolog of NCBI NO: 1076758 NR Description: heat-shock protein, 82K, precursor - rye
  misc_feature (11)..(420): Homolog of NCBI NO: 15228059 NR Description: putative heat shock protein; protein id: supported by cDNA: gi_15450722, supported by cDNA: gi_16930684, by cDNA: gi_20453105 [Arabidopsis thaliana]
  misc_feature (11)..(420): Homolog of NCBI NO: 30678090 NR Description: heat shock protein, putative [Arabidopsis
  misc_feature (11)..(420): Homolog of NCBI NO: 20453106 NR Description: At2g04030/F3C11.14 [Arabidopsis thaliana]
  misc_feature (1)..(420): Homolog of NCBI NO: 1906830 NR Description: heat shock protein [Arabidopsis thaliana]
  misc_feature (13)..(416): Homolog of NCBI NO: 17542208 NR Description: Endoplasmin (87.1 kD) [Caenorhabditis elegans]
  misc_feature (13)..(416): Homolog of NCBI NO: 39593714 NR Description: Hypothetical protein CBG06014 [Caenorhabditis
  misc_feature (24)..(415): Homolog of NCBI NO: 15237214 NR Description: heat-shock protein; protein id: At5g52640.1,
  misc_feature (24)..(415): Homolog of NCBI NO: 26454635 NR Description: Heat shock protein 81-1 (HSP81-1) (Heat shock
MDGALIGRRYESSAAAVDSTDQLAEKHEYQAEVNRLMDLIVHSLYSNKEVFLRELVSNASDALDKLRYLSVTDPELLKDGPQLDIRIQSDKDNGVITITDSGIGMTKQELIDSLGTIESSGTAKFLKALKESQEAGMDNNLIGQFGVGFYSTFLVSEKVVVSTKSPKSDKQYVWEGQADSGSYTIREEKDPEKLIPRGTRLTLYLKHDDKGFAHPERIQKLLKNYSQFVSFPIYTWQEKGFTKEVEVDEDPAEAKKGDDDIKTEPKKKTKTVVEKYWDWELSNETQPIWLRNPKEVSTEEYNEFYKKTFNEYLNPLASSHFTTEGEVEFRSILYVPATRKDDITDNRKTKNIRLYVKRVFISDDFDGELFPRYLSFVKGVVDSNDLPLNVSREILQESRIVRIMRKRLVRKAFDMILGISCS

SEQ ID NO: 5526 - protein, 386 aa, Zea mays subsp. mays
  peptide (1)..(386): Ceres Seq. ID no. 12556787
  misc_feature (176)..(385): Pfam Name: Hsp90 protein Pfam Description: Hsp90 protein
  misc_feature (1)..(385): Homolog of NCBI NO: 15231505 NR Description: putative heat-shock protein; protein id:
  misc_feature (1)..(384): Homolog of NCBI NO: 1076758 NR Description: heat-shock protein, 82K, precursor - rye
  misc_feature (1)..(384): Homolog of NCBI NO: 15228059 NR Description: putative heat shock protein; protein id: supported by cDNA: gi_15450722, supported by cDNA: gi_16930684, by cDNA: gi_20453105 [Arabidopsis thaliana]
  misc_feature (1)..(384): Homolog of NCBI NO: 30678090 NR Description: heat shock protein, putative [Arabidopsis
  misc_feature (1)..(384): Homolog of NCBI NO: 20453106 NR Description: At2g04030/F3C11.14 [Arabidopsis thaliana]
  misc_feature (1)..(384): Homolog of NCBI NO: 1906830 NR Description: heat shock protein [Arabidopsis thaliana]
  misc_feature (1)..(380): Homolog of NCBI NO: 17542208 NR Description: Endoplasmin (87.1 kD) [Caenorhabditis elegans]
  misc_feature (1)..(380): Homolog of NCBI NO: 39593714 NR Description: Hypothetical protein CBG06014 [Caenorhabditis
  misc_feature (1)..(379): Homolog of NCBI NO: 15237214 NR Description: heat-shock protein; protein id: At5g52640.1,
  misc_feature (1)..(379): Homolog of NCBI NO: 26454635 NR Description: Heat shock protein 81-1 (HSP81-1) (Heat shock
MDLIVHSLYSNKEVFLRELVSNASDALDKLRYLSVTDPELLKDGPQLDIRIQSDKDNGVITITDSGIGMTKQELIDSLGTIESSGTAKFLKALKESQEAGMDNNLIGQFGVGFYSTFLVSEKVVVSTKSPKSDKQYVWEGQADSGSYTIREEKDPEKLIPRGTRLTLYLKHDDKGFAHPERIQKLLKNYSQFVSFPIYTWQEKGFTKEVEVDEDPAEAKKGDDDIKTEPKKKTKTVVEKYWDWELSNETQPIWLRNPKEVSTEEYNEFYKKTFNEYLNPLASSHFTTEGEVEFRSILYVPATRKDDITDNRKTKNIRLYVKRVFISDDFDGELFPRYLSFVKGVVDSNDLPLNVSREILQESRIVRIMRKRLVRKAFDMILGISCS

SEQ ID NO: 5527 - DNA, 1609 bp, Zea mays subsp. mays
  misc_feature (1)..(1609): Ceres Seq. ID no. 12383197
  misc_feature: MA Experiment ID: 108522 Result: Up-regulated in Transcription
  misc_feature: MA Experiment 108522 PARAMETER Experiment Name: Zm_42deg_Heat_P Parameter: Age (day) Value: 8
  misc_feature: MA Experiment 108522 PARAMETER Experiment Name: Zm_42deg_Heat_P Parameter: Organism Value: Zea mays
  misc_feature: MA Experiment 108522 PARAMETER Experiment Name: Zm_42deg_Heat_P Parameter: Plant Line Value: 35A19
  misc_feature: MA Experiment 108522 PARAMETER Experiment Name: Zm_42deg_Heat_P Parameter: Temperature (deg C) Value: 42 vs. 22
  misc_feature: MA Experiment 108522 PARAMETER Experiment Name: Zm_42deg_Heat_P Parameter: Timepoint (hr) Value: 1
  misc_feature: MA Experiment 108522 PARAMETER Experiment Name: Zm_42deg_Heat_P Parameter: Tissue Value: Aerial
  misc_feature: MA Experiment ID: 108523 Result: Up-regulated in Transcription
  misc_feature: MA Experiment 108523 PARAMETER Experiment Name: Zm_42deg_Heat_P Parameter: Age (day) Value: 8
  misc_feature: MA Experiment 108523 PARAMETER Experiment Name: Zm_42deg_Heat_P Parameter: Organism Value: Zea mays
  misc_feature: MA Experiment 108523 PARAMETER Experiment Name: Zm_42deg_Heat_P Parameter: Plant Line Value: 35A19
  misc_feature: MA Experiment 108523 PARAMETER Experiment Name: Zm_42deg_Heat_P Parameter: Temperature (deg C) Value: 42 vs. 22
  misc_feature: MA Experiment 108523 PARAMETER Experiment Name: Zm_42deg_Heat_P Parameter: Timepoint (hr) Value: 6
  misc_feature: MA Experiment 108523 PARAMETER Experiment Name: Zm_42deg_Heat_P Parameter: Tissue Value: Aerial
gcacgagaccattacctagaacatcctaatcgaaaaaaaaactgccaaacactgcacactcgggagtcaggactgggccgtttcagtgtcacttccgccgccttctccctcaatcaagagcgcccgtcccttcgcccgcgcgccccgccatggccgcgccgtgcggccgcggcggcggcacgctgacgctggtcctcgtggctctctccgcggcgttcctcacctacaacgtgctcatctccttccactcctccctccagcccctcccttcctccttccccaccgccaccgcctcccgccgcttcggcgccgcggggtctgccaggcggagggcgttccacaccgcggtgaccgcgtcagggtccgcgtacaacacgtggcagtgccgcgtcatgtaccactggttcaaggaggcgcgccgggcgccgggcggcgacgagatgggcgggttcaccaggatcctgcactccgggaaacccgacgagttcgtcgatgagatccccacattcgtcgccgacccactccccgatggggatcagggatacatcgttctcaataggccatgggcatttgttcagtggctccagaaagcagacataaaggaagactatattttgatggcagagccagatcacataattgtcaagcctatcccaaacttgtcgagagatggtcaggcagcagcttttcctttcttttacattgagcctaaaaaatatgagaatgtgttgcgtaagttcttccctgaagacaaggggtcaatcactaagatcgatcctataggaaactctcctgtcattattgagaaggagtctcttggaaggattgcaccgacttggatgaatgtttcattagcaatgaaaaaagatcctgacgcagataaatcttttggctgggttcttgaaatgtatgcctatgccgtggcatctgctctccatggagtgggcaacatcttacgcaaggactttatgattcagccaccttgggacttggaagttggtgattcttttattattcattatacttatgggtgtgattatgacatgacgggtaagctgacttatggcaaaattggtgaatggagatttgacaagagatcatacacggacaaacctccacctagaaatttgccgttaccaccacatggtgtagctcaaagtgtggtgacacttgtgaaaatggtcaatgaagcaacagccaacataccaaactgggactcctatgccgctgctttttaacctgttataaatttggctcacaattttgtttgccagatatttccattccagctgactttgatacatgataattgcctaacatggaagatgagtggatgatacagtggaatgcataccaggttttacacaaggctgccggttccttacctttctgattgaatcctgataatatatggtgcaatgccatccctttccccccctaattttgttaaacacatgcacatcagcacatggcacaatatgtcaaaacacactcacctttggtgaaagctgcaatgtagatgactgagagatgtgatgttcttatctggatctgaatgtgcttattagaagaagaaaaaaaagagtcaggcgctgctctgacaaacgct

SEQ ID NO: 5528 - protein, 362 aa, Zea mays subsp. mays
  peptide (1)..(362): Ceres Seq. ID no. 12383198
  misc_feature (1)..(361): Homolog of NCBI NO: 24413996 NR Description: hypothetical protein~similar to Arabidopsis
  misc_feature (9)..(357): Homolog of NCBI NO: 22327055 NR Description: Expressed protein; protein id: At5g25265.1, by cDNA: gi_17065061 [Arabidopsis thaliana]
  misc_feature (6)..(357): Homolog of NCBI NO: 15240642 NR Description: putative protein; protein id: At5g13500.1, by cDNA: 6674., supported by cDNA: gi_19699008 [Arabidopsis >gi|9955542|emb|CAC05427.1| putative protein [Arabidopsis
  misc_feature (174)..(357): Homolog of NCBI NO: 30682704 NR Description: expressed protein [Arabidopsis thaliana]
  misc_feature (15)..(132): Homolog of NCBI NO: 30682704 NR Description: expressed protein [Arabidopsis thaliana]
  misc_feature (174)..(339): Homolog of NCBI NO: 25371351 NR Description: hypothetical protein At2g25260 [imported] - thaliana >gi|4567251|gb|AAD23665.1| unknown protein [Arabidopsis
  misc_feature (15)..(132): Homolog of NCBI NO: 25371351 NR Description: hypothetical protein At2g25260 [imported] - thaliana >gi|4567251|gb|AAD23665.1| unknown protein [Arabidopsis
  misc_feature (50)..(156): Homolog of NCBI NO: 34903224 NR Description: unnamed protein product [Oryza sativa (japonica group)] >gi|6815101|dbj|BAA90387.1| unnamed protein product
MAAPCGRGGGTLTLVLVALSAAFLTYNVLISFHSSLQPLPSSFPTATASRRFGAAGSARRRAFHTAVTASGSAYNTWQCRVMYHWFKEARRAPGGDEMGGFTRILHSGKPDEFVDEIPTFVADPLPDGDQGYIVLNRPWAFVQWLQKADIKEDYILMAEPDHIIVKPIPNLSRDGQAAAFPFFYIEPKKYENVLRKFFPEDKGSITKIDPIGNSPVIIEKESLGRIAPTWMNVSLAMKKDPDADKSFGWVLEMYAYAVASALHGVGNILRKDFMIQPPWDLEVGDSFIIHYTYGCDYDMTGKLTYGKIGEWRFDKRSYTDKPPPRNLPLPPHGVAQSVVTLVKMVNEATANIPNWDSYAAAF

SEQ ID NO: 5529 - protein, 281 aa, Zea mays subsp. mays
  peptide (1)..(281): Ceres Seq. ID no. 12383199
  misc_feature (1)..(280): Homolog of NCBI NO: 24413996 NR Description: hypothetical protein~similar to Arabidopsis
  misc_feature (1)..(276): Homolog of NCBI NO: 22327055 NR Description: Expressed protein; protein id: At5g25265.1, by cDNA: gi_17065061 [Arabidopsis thaliana]
  misc_feature (1)..(276): Homolog of NCBI NO: 15240642 NR Description: putative protein; protein id: At5g13500.1, by cDNA: 6674., supported by cDNA: gi_19699008 [Arabidopsis >gi|9955542|emb|CAC05427.1| putative protein [Arabidopsis
  misc_feature (93)..(276): Homolog of NCBI NO: 30682704 NR Description: expressed protein [Arabidopsis thaliana]
  misc_feature (1)..(51): Homolog of NCBI NO: 30682704 NR Description: expressed protein [Arabidopsis thaliana]
  misc_feature (93)..(258): Homolog of NCBI NO: 25371351 NR Description: hypothetical protein At2g25260 [imported] - thaliana >gi|4567251|gb|AAD23665.1| unknown protein [Arabidopsis
  misc_feature (1)..(51): Homolog of NCBI NO: 25371351 NR Description: hypothetical protein At2g25260 [imported] - thaliana >gi|4567251|gb|AAD23665.1| unknown protein [Arabidopsis
  misc_feature (1)..(75): Homolog of NCBI NO: 34903224 NR Description: unnamed protein product [Oryza sativa (japonica group)] >gi|6815101|dbj|BAA90387.1| unnamed protein product
MYHWFKEARRAPGGDEMGGFTRILHSGKPDEFVDEIPTFVADPLPDGDQGYIVLNRPWAFVQWLQKADIKEDYILMAEPDHIIVKPIPNLSRDGQAAAFPFFYIEPKKYENVLRKFFPEDKGSITKIDPIGNSPVIIEKESLGRIAPTWMNVSLAMKKDPDADKSFGWVLEMYAYAVASALHGVGNILRKDFMIQPPWDLEVGDSFIIHYTYGCDYDMTGKLTYGKIGEWRFDKRSYTDKPPPRNLPLPPHGVAQSVVTLVKMVNEATANIPNWDSYAAAF

SEQ ID NO: 5530 - protein, 265 aa, Zea mays subsp. mays
  peptide (1)..(265): Ceres Seq. ID no. 12383200
  misc_feature (1)..(264): Homolog of NCBI NO: 24413996 NR Description: hypothetical protein~similar to Arabidopsis
  misc_feature (1)..(260): Homolog of NCBI NO: 22327055 NR Description: Expressed protein; protein id: At5g25265.1, by cDNA: gi_17065061 [Arabidopsis thaliana]
  misc_feature (1)..(260): Homolog of NCBI NO: 15240642 NR Description: putative protein; protein id: At5g13500.1, by cDNA: 6674., supported by cDNA: gi_19699008 [Arabidopsis >gi|9955542|emb|CAC05427.1| putative protein [Arabidopsis
  misc_feature (77)..(260): Homolog of NCBI NO: 30682704 NR Description: expressed protein [Arabidopsis thaliana]
  misc_feature (1)..(35): Homolog of NCBI NO: 30682704 NR Description: expressed protein [Arabidopsis thaliana]
  misc_feature (77)..(242): Homolog of NCBI NO: 25371351 NR Description: hypothetical protein At2g25260 [imported] - thaliana >gi|4567251|gb|AAD23665.1| unknown protein [Arabidopsis
  misc_feature (1)..(35): Homolog of NCBI NO: 25371351 NR Description: hypothetical protein At2g25260 [imported] - thaliana >gi|4567251|gb|AAD23665.1| unknown protein [Arabidopsis
  misc_feature (1)..(59): Homolog of NCBI NO: 34903224 NR Description: unnamed protein product [Oryza sativa (japonica group)] >gi|6815101|dbj|BAA90387.1| unnamed protein product
MGGFTRILHSGKPDEFVDEIPTFVADPLPDGDQGYIVLNRPWAFVQWLQKADIKEDYILMAEPDHIIVKPIPNLSRDGQAAAFPFFYIEPKKYENVLRKFFPEDKGSITKIDPIGNSPVIIEKESLGRIAPTWMNVSLAMKKDPDADKSFGWVLEMYAYAVASALHGVGNILRKDFMIQPPWDLEVGDSFIIHYTYGCDYDMTGKLTYGKIGEWRFDKRSYTDKPPPRNLPLPPHGVAQSVVTLVKMVNEATANIPNWDSYAAAF

SEQ ID NO: 5531 - DNA, 1193 bp, Zea mays subsp. mays
  misc_feature (1)..(1193): Ceres Seq. ID no. 13492090
  misc_feature: MA Experiment ID: 108523 Result: Up-regulated in Transcription
  misc_feature: MA Experiment 108523 PARAMETER Experiment Name: Zm_42deg_Heat_P Parameter: Age (day) Value: 8
  misc_feature: MA Experiment 108523 PARAMETER Experiment Name: Zm_42deg_Heat_P Parameter: Organism Value: Zea mays
  misc_feature: MA Experiment 108523 PARAMETER Experiment Name: Zm_42deg_Heat_P Parameter: Plant Line Value: 35A19
  misc_feature: MA Experiment 108523 PARAMETER Experiment Name: Zm_42deg_Heat_P Parameter: Temperature (deg C) Value: 42 vs. 22
  misc_feature: MA Experiment 108523 PARAMETER Experiment Name: Zm_42deg_Heat_P Parameter: Timepoint (hr) Value: 6
  misc_feature: MA Experiment 108523 PARAMETER Experiment Name: Zm_42deg_Heat_P Parameter: Tissue Value: Aerial
  misc_feature: MA Experiment ID: 108535 Result: Up-regulated in Transcription
  misc_feature: MA Experiment 108535 PARAMETER Experiment Name: Zm_Meristem_P Parameter: Age (day) Value: 8
  misc_feature: MA Experiment 108535 PARAMETER Experiment Name: Zm_Meristem_P Parameter: Organism Value: Zea mays
  misc_feature: MA Experiment 108535 PARAMETER Experiment Name: Zm_Meristem_P Parameter: Plant Line Value: 35A19
  misc_feature: MA Experiment 108535 PARAMETER Experiment Name: Zm_Meristem_P Parameter: Tissue Value: Root Meristem vs. Above Root Meristem
aactaatcgaaaaaaagttggctcacagaacacagcgcccgcccggacgcaaggggcacgagggagaagcgaggaacggcggcggcggcatcatggcggcgcggaacatccttcgcggtgcggcatgcggccaccgcttcctcgtgcccgtcccctcaggcgctcttgctggttctggaagccggagcatcggcgccgtcgctcagggccttcgtcattacgcagcagacgaagcagtgggaaacttggaactgcatgcacccaaggcaaaacgtcggtcatatatcccaacgaaaaatggaacagccatgatgcttccgctccatattcattacgaagatgtactacgtcaggatctgttgctcaaacagaatcatgccaatatcatgcaagttccagggttgtttgaggtcaaattagcaccaaaagccggctctgatctcaagatcccaattgggaaaatggccatggaggttttgagtggtcagagattcaaagaggcaaaaattgaccctttcgccaaagcaagaaagtcttctcgaaccaatccatttattggggccgacaaggacggtagcactgtcttcgcgcaaccaaccgttcttcgagggcatgcaatgtacaactttttggtgaggatgctgacagtgatgtccatgttaaattctcgggccgacattcgggagaacactgtgaagttcttcatggaaacggagttctgtgagttctctccagaattggaagaccatttcgagatatttgagcacatccgaggtttcaatgtgactatcgttacttcagccaatacaaaagatgagacctcactgctgtggagtggcttcatgctgaatgacgagggagagaccaagtaaggtagaactgttgatctttgtttctgcttaatctccctgatattgtagttgctgcccaactggaccttcagttggctgttgatgtcaaaaatgattttggaaatttggtgcttcgtgctctaggagtgcgcaatgtcgcagccttctgttttgtagactgaatgagatgacgtgattgtttttcatcttgacgcgtggagctcatgtttgataactacgtctagtaccatgtatgaacataataatcttggtctaataagcattgttttgcttattcctgtggttcctgctatagtaacatggaatgctcgtttctgtttg

SEQ ID NO: 5532 - protein, 289 aa, Zea mays subsp. mays
  peptide (1)..(289): Ceres Seq. ID no. 13492091
  misc_feature (127)..(182): Pfam Name: Ribosomal protein L5 Pfam Description: Ribosomal protein L5
  misc_feature (31)..(289): Homolog of NCBI NO: 30351950 NR Description: mitochondrial ribosomal protein L5 [Zea mays]
  misc_feature (104)..(289): Homolog of NCBI NO: 5688943 NR Description: ribosomal protein L5 [Oryza sativa (japonica group)] >gi|23495418|dbj|BAC19898.1| Ribosomal protein L5 [Oryza
  misc_feature (103)..(289): Homolog of NCBI NO: 27803142 NR Description: ribosomal protein L5 [Triticum aestivum]
  misc_feature (104)..(288): Homolog of NCBI NO: 730588 NR Description: MITOCHONDRIAL 60S RIBOSOMAL PROTEIN L5
  misc_feature (104)..(289): Homolog of NCBI NO: 37591117 NR Description: ribosomal protein L5 [Brassica napus]
  misc_feature (104)..(289): Homolog of NCBI NO: 1173079 NR Description: MITOCHONDRIAL 60S RIBOSOMAL PROTEIN L5
  misc_feature (104)..(289): Homolog of NCBI NO: 9838430 NR Description: ribosomal protein L5 [Beta vulgaris] ribosomal protein L5 [Beta vulgaris subsp. vulgaris]
  misc_feature (104)..(289): Homolog of NCBI NO: 4164412 NR Description: ribosomal protein L5 [Pisum sativum]
  misc_feature (104)..(288): Homolog of NCBI NO: 421897 NR Description: ribosomal protein L5 - evening primrose >gi|14029|emb|CAA49284.1| ribosomal protein L5 [Oenothera
  misc_feature (104)..(289): Homolog of NCBI NO: 13449308 NR Description: ribosomal protein L5 [Arabidopsis thaliana] ribosomal protein L5p family [Arabidopsis thaliana] ribosomal protein 5 large subunit [Arabidopsis thaliana]
LIEKKLAHRTQRPPGRKGHEGEARNGGGGIMAARNILRGAACGHRFLVPVPSGALAGSGSRSIGAVAQGLRHYAADEAVGNLELHAPKAKRRSYIPTKNGTAMMLPLHIHYEDVLRQDLLLKQNHANIMQVPGLFEVKLAPKAGSDLKIPIGKMAMEVLSGQRFKEAKIDPFAKARKSSRTNPFIGADKDGSTVFAQPTVLRGHAMYNFLVRMLTVMSMLNSRADIRENTVKFFMETEFCEFSPELEDHFEIFEHIRGFNVTIVTSANTKDETSLLWSGFMLNDEGETK

SEQ ID NO: 5533 - protein, 259 aa, Zea mays subsp. mays
  peptide (1)..(259): Ceres Seq. ID no. 13492092
  misc_feature (97)..(152): Pfam Name: Ribosomal protein L5 Pfam Description: Ribosomal protein L5
  misc_feature (1)..(259): Homolog of NCBI NO: 30351950 NR Description: mitochondrial ribosomal protein L5 [Zea mays]
  misc_feature (74)..(259): Homolog of NCBI NO: 5688943 NR Description: ribosomal protein L5 [Oryza sativa (japonica group)] >gi|23495418|dbj|BAC19898.1| Ribosomal protein L5 [Oryza
  misc_feature (73)..(259): Homolog of NCBI NO: 27803142 NR Description: ribosomal protein L5 [Triticum aestivum]
  misc_feature (74)..(258): Homolog of NCBI NO: 730588 NR Description: MITOCHONDRIAL 60S RIBOSOMAL PROTEIN L5
  misc_feature (74)..(259): Homolog of NCBI NO: 37591117 NR Description: ribosomal protein L5 [Brassica napus]
  misc_feature (74)..(259): Homolog of NCBI NO: 1173079 NR Description: MITOCHONDRIAL 60S RIBOSOMAL PROTEIN L5
  misc_feature (74)..(259): Homolog of NCBI NO: 9838430 NR Description: ribosomal protein L5 [Beta vulgaris] ribosomal protein L5 [Beta vulgaris subsp. vulgaris]
  misc_feature (74)..(259): Homolog of NCBI NO: 4164412 NR Description: ribosomal protein L5 [Pisum sativum]
  misc_feature (74)..(258): Homolog of NCBI NO: 421897 NR Description: ribosomal protein L5 - evening primrose >gi|14029|emb|CAA49284.1| ribosomal protein L5 [Oenothera
  misc_feature (74)..(259): Homolog of NCBI NO: 13449308 NR Description: ribosomal protein L5 [Arabidopsis thaliana] ribosomal protein L5p family [Arabidopsis thaliana] ribosomal protein 5 large subunit [Arabidopsis thaliana]
MAARNILRGAACGHRFLVPVPSGALAGSGSRSIGAVAQGLRHYAADEAVGNLELHAPKAKRRSYIPTKNGTAMMLPLHIHYEDVLRQDLLLKQNHANIMQVPGLFEVKLAPKAGSDLKIPIGKMAMEVLSGQRFKEAKIDPFAKARKSSRTNPFIGADKDGSTVFAQPTVLRGHAMYNFLVRMLTVMSMLNSRADIRENTVKFFMETEFCEFSPELEDHFEIFEHIRGFNVTIVTSANTKDETSLLWSGFMLNDEGETK

SEQ ID NO: 5534 - protein, 187 aa, Zea mays subsp. mays
  peptide (1)..(187): Ceres Seq. ID no. 13492093
  misc_feature (25)..(80): Pfam Name: Ribosomal protein L5 Pfam Description: Ribosomal protein L5
  misc_feature (2)..(186): Homolog of NCBI NO: 421897 NR Description: ribosomal protein L5 - evening primrose >gi|14029|emb|CAA49284.1| ribosomal protein L5 [Oenothera
  misc_feature (1)..(187): Homolog of NCBI NO: 30351950 NR Description: mitochondrial ribosomal protein L5 [Zea mays]
  misc_feature (1)..(187): Homolog of NCBI NO: 27803142 NR Description: ribosomal protein L5 [Triticum aestivum]
  misc_feature (2)..(187): Homolog of NCBI NO: 37591117 NR Description: ribosomal protein L5 [Brassica napus]
  misc_feature (2)..(187): Homolog of NCBI NO: 9838430 NR Description: ribosomal protein L5 [Beta vulgaris] ribosomal protein L5 [Beta vulgaris subsp. vulgaris]
  misc_feature (2)..(187): Homolog of NCBI NO: 4164412 NR Description: ribosomal protein L5 [Pisum sativum]
  misc_feature (2)..(187): Homolog of NCBI NO: 1173079 NR Description: MITOCHONDRIAL 60S RIBOSOMAL PROTEIN L5
  misc_feature (2)..(186): Homolog of NCBI NO: 730588 NR Description: MITOCHONDRIAL 60S RIBOSOMAL PROTEIN L5
  misc_feature (2)..(187): Homolog of NCBI NO: 5688943 NR Description: ribosomal protein L5 [Oryza sativa (japonica group)] >gi|23495418|dbj|BAC19898.1| Ribosomal protein L5 [Oryza
  misc_feature (2)..(187): Homolog of NCBI NO: 13449308 NR Description: ribosomal protein L5 [Arabidopsis thaliana] ribosomal protein L5p family [Arabidopsis thaliana] ribosomal protein 5 large subunit [Arabidopsis thaliana]
MMLPLHIHYEDVLRQDLLLKQNHANIMQVPGLFEVKLAPKAGSDLKIPIGKMAMEVLSGQRFKEAKIDPFAKARKSSRTNPFIGADKDGSTVFAQPTVLRGHAMYNFLVRMLTVMSMLNSRADIRENTVKFFMETEFCEFSPELEDHFEIFEHIRGFNVTIVTSANTKDETSLLWSGFMLNDEGETK

SEQ ID NO: 5535 - DNA, 2053 bp, Zea mays subsp. mays
  misc_feature (1)..(2053): Ceres Seq. ID no. 13577863
  misc_feature: MA Experiment ID: 108522 Result: Up-regulated in Transcription
  misc_feature: MA Experiment 108522 PARAMETER Experiment Name: Zm_42deg_Heat_P Parameter: Age (day) Value: 8
  misc_feature: MA Experiment 108522 PARAMETER Experiment Name: Zm_42deg_Heat_P Parameter: Organism Value: Zea mays
  misc_feature: MA Experiment 108522 PARAMETER Experiment Name: Zm_42deg_Heat_P Parameter: Plant Line Value: 35A19
  misc_feature: MA Experiment 108522 PARAMETER Experiment Name: Zm_42deg_Heat_P Parameter: Temperature (deg C) Value: 42 vs. 22
  misc_feature: MA Experiment 108522 PARAMETER Experiment Name: Zm_42deg_Heat_P Parameter: Timepoint (hr) Value: 1
  misc_feature: MA Experiment 108522 PARAMETER Experiment Name: Zm_42deg_Heat_P Parameter: Tissue Value: Aerial
  misc_feature: MA Experiment ID: 20000632 Result: Down-regulated in Transcription
  misc_feature: MA Experiment 20000632 PARAMETER Experiment Name: Zm_Herbicide-Treatments_P Parameter: Timepoint (hr) Value: 4
  misc_feature: MA Experiment 20000632 PARAMETER Experiment Name: Zm_Herbicide-Treatments_P Parameter: Tissue Value: Aerial
  misc_feature: MA Experiment 20000632 PARAMETER Experiment Name: Zm_Herbicide-Treatments_P Parameter: Treatment Value: Glean vs. No Treatment
actagaacaccttggtggcctccgcgtctcgccgcctccccggactccgcatccagccccggcactcgcactcccaaagcagcggacactagtagggtttaaactttccccccgatccgcctcgcctccggnctgtcgcctgccgccagaccaacgcccccacacccagccggagacgacgatggtggggctcggctcgatggcgggctatgggatccagtcgatgctcaaggaaggccaccgccacctctccgggctcgaggaggccgtgctcaagaacatcgacgcctgccgcgagctctccgccatcacgcgcacatccctgggccccaacggaatgaacaagatggttatcaatcacttggacaagctgtttgtcacaaacgatgctgccaccatcgtgaatgagcttgaggttcagcacccggctgctaaaatcctggtactggctgccaaggctcaacaggaggagattggggatggagccaatctcaccatatcgtttgctggtgaactgnttgagaaggctgaggagctcatcaggatgggcttgcatccgagtgagatcatcattggctacaccaaagccatcaacaagacaattgaaattttagaggatcttgttgagaaaggctcanagaacatggacgtaagaaacaaggaggatgttgtgttgaggatgagatctgctgtcgcaagcaagcagtttggccaggaggatatgctgtgccctcttgtggctgatgcctgcattcaagtttgccccaaaaatcctgcaaactttaatgttgacaatgttagagtggctaagctacttggaggtggtttgcacaattcttctgtggtccgtgggatggttctgaaaaatgatgctgttggtagcatcaaaagggcggagaaggcaaagattgtcgtatttgctggtggtgtcgacacctcggcaactgaaacaaagggaaccgtgttgatccattccgctgagcagctagaaaattatgctaagaccgaggaagctaaggtggaggagcttatcaaagctgtcgctgactctggtgccaaggttattgtcagtggagctgcagtggggtgacatggcacttcatttctgtgaacgttataagctgatggttctgaaaatcagctcgaagtttgaactaagaaggttctgccgtactactggggctgttgcaattttgaaacttagccaacccaatgcggacgaactaggatacgcagattctgtttctgtagaagaaattggtggtactcgggttactgtcgtcaagaacgaagatggtggaaattcagtggctactgttgtcctgagaggcagtactgacagtatactagatgatcttgaaagagctgttgatgatggcgtcaatacatacaggtcaatgtgcagggacagtaggataattcctggtgctgctgcaacagaagttgagctggcaaagagattgaaggagttctctttgaaggaaacagggttggaccagtatgccattgcgaaatttgctgaaagctttgaaatggttccaagaaccctggcagaaaatgctggacttagcgcaatggagataatatcctctctttatgctgagcatgctagtggcaatgcgaaagttggcattgatctggaggaagncgcctgcaaggacatctcgactttaaaaatatgggacctctatgtcacaaagttttttgccctaaaatactctgccgatgctgcttgcacggtgctgcgggttgaccagatcattatggcaaagccggcaggaggtccaagaagagatgcccagcctggtggcgggatggacgaggattagtttgattatagttgttttctttgtatcacgtatgtgaggtttcagagcagagatcatactttatcttggcttttggttctgtagaaggtttgggtgcctggagttcacttttggaaggtctgcacggttgcgcggatatcacataggcaatttgtatgttttttcctggtgtattgcggtgcggatgtatcaaatgattcattacaggggccgttccgtcagtt

SEQ ID NO: 5536 - protein, 362 aa, Zea mays subsp. mays
  peptide (1)..(362): Ceres Seq. ID no. 13577864
  misc_feature (100)..(362): Pfam Name: TCP-1/cpn60 chaperonin family Pfam Description: TCP-1/cpn60 chaperonin family
  misc_feature (100)..(362): Pfam Name: TCP-1/cpn60 chaperonin family Pfam Description: TCP-1/cpn60 chaperonin family
  misc_feature (61)..(362): Homolog of NCBI NO: 18396719 NR Description: chaperonin, putative [Arabidopsis thaliana]
  misc_feature (61)..(362): Homolog of NCBI NO: 6223641 NR Description: putative T-complex protein 1, theta subunit
  misc_feature (71)..(361): Homolog of NCBI NO: 27924345 NR Description: Similar to chaperonin containing TCP1, subunit 8
  misc_feature (72)..(362): Homolog of NCBI NO: 17066726 NR Description: CCT chaperonin theta subunit [Physarum
  misc_feature (71)..(361): Homolog of NCBI NO: 29791676 NR Description: Similar to chaperonin containing TCP1, subunit 8
  misc_feature (61)..(362): Homolog of NCBI NO: 6223641 NR Description: putative T-complex protein 1, theta subunit
  misc_feature (72)..(362): Homolog of NCBI NO: 17066726 NR Description: CCT chaperonin theta subunit [Physarum
  misc_feature (71)..(361): Homolog of NCBI NO: 23478707 NR Description: T-complex protein 1 [Plasmodium yoelii yoelii]
  misc_feature (71)..(361): Homolog of NCBI NO: 1136741 NR Description: KIAA0002 [Homo sapiens]
  misc_feature (71)..(361): Homolog of NCBI NO: 6005727 NR Description: chaperonin containing TCP1, subunit 8 (theta); protein 1, theta subunit [Homo sapiens]
  misc_feature (71)..(361): Homolog of NCBI NO: 9988062 NR Description: T-complex protein 1, theta subunit (TCP-1-theta)
  misc_feature (71)..(361): Homolog of NCBI NO: 37362194 NR Description: chaperonin containing TCP1, subunit 8 (theta)
  misc_feature (71)..(361): Homolog of NCBI NO: 29791676 NR Description: Similar to chaperonin containing TCP1, subunit 8
  misc_feature (71)..(361): Homolog of NCBI NO: 27924345 NR Description: Similar to chaperonin containing TCP1, subunit 8
  misc_feature (61)..(362): Homolog of NCBI NO: 18396719 NR Description: chaperonin, putative [Arabidopsis thaliana]
  misc_feature (71)..(361): Homolog of NCBI NO: 37362194 NR Description: chaperonin containing TCP1, subunit 8 (theta)
  misc_feature (71)..(361): Homolog of NCBI NO: 9988062 NR Description: T-complex protein 1, theta subunit (TCP-1-theta)
  misc_feature (71)..(361): Homolog of NCBI NO: 6005727 NR Description: chaperonin containing TCP1, subunit 8 (theta); protein 1, theta subunit [Homo sapiens]
  misc_feature (71)..(361): Homolog of NCBI NO: 1136741 NR Description: KIAA0002 [Homo sapiens]
  misc_feature (71)..(361): Homolog of NCBI NO: 23478707 NR Description: T-complex protein 1 [Plasmodium yoelii yoelii]
  misc_feature (44)..(44): Xaa is any aa, unknown or other
  misc_feature (173)..(173): Xaa is any aa, unknown or other
  misc_feature (213)..(213): Xaa is any aa, unknown or other
LEHLGGLRVSPPPRTPHPAPALALPKQRTLVGFKLSPRSASPPXCRLPPDQRPHTQPETTMVGLGSMAGYGIQSMLKEGHRHLSGLEEAVLKNIDACRELSAITRTSLGPNGMNKMVINHLDKLFVTNDAATIVNELEVQHPAAKILVLAAKAQQEEIGDGANLTISFAGELXEKAEELIRMGLHPSEIIIGYTKAINKTIEILEDLVEKGSXNMDVRNKEDVVLRMRSAVASKQFGQEDMLCPLVADACIQVCPKNPANFNVDNVRVAKLLGGGLHNSSVVRGMVLKNDAVGSIKRAEKAKIVVFAGGVDTSATETKGTVLIHSAEQLENYAKTEEAKVEELIKAVADSGAKVIVSGAAVG

SEQ ID NO: 5537 - protein, 302 aa, Zea mays subsp. mays
  peptide (1)..(302): Ceres Seq. ID no. 13577865
  misc_feature (40)..(302): Pfam Name: TCP-1/cpn60 chaperonin family Pfam Description: TCP-1/cpn60 chaperonin family
  misc_feature (40)..(302): Pfam Name: TCP-1/cpn60 chaperonin family Pfam Description: TCP-1/cpn60 chaperonin family
  misc_feature (1)..(302): Homolog of NCBI NO: 18396719 NR Description: chaperonin, putative [Arabidopsis thaliana]
  misc_feature (1)..(302): Homolog of NCBI NO: 6223641 NR Description: putative T-complex protein 1, theta subunit
  misc_feature (11)..(301): Homolog of NCBI NO: 27924345 NR Description: Similar to chaperonin containing TCP1, subunit 8
  misc_feature (12)..(302): Homolog of NCBI NO: 17066726 NR Description: CCT chaperonin theta subunit [Physarum
  misc_feature (11)..(301): Homolog of NCBI NO: 29791676 NR Description: Similar to chaperonin containing TCP1, subunit 8
  misc_feature (1)..(302): Homolog of NCBI NO: 6223641 NR Description: putative T-complex protein 1, theta subunit
  misc_feature (12)..(302): Homolog of NCBI NO: 17066726 NR Description: CCT chaperonin theta subunit [Physarum
  misc_feature (11)..(301): Homolog of NCBI NO: 23478707 NR Description: T-complex protein 1 [Plasmodium yoelii yoelii]
  misc_feature (11)..(301): Homolog of NCBI NO: 1136741 NR Description: KIAA0002 [Homo sapiens]
  misc_feature (11)..(301): Homolog of NCBI NO: 6005727 NR Description: chaperonin containing TCP1, subunit 8 (theta); protein 1, theta subunit [Homo sapiens]
  misc_feature (11)..(301): Homolog of NCBI NO: 9988062 NR Description: T-complex protein 1, theta subunit (TCP-1-theta)
  misc_feature (11)..(301): Homolog of NCBI NO: 37362194 NR Description: chaperonin containing TCP1, subunit 8 (theta)
  misc_feature (11)..(301): Homolog of NCBI NO: 29791676 NR Description: Similar to chaperonin containing TCP1, subunit 8
  misc_feature (11)..(301): Homolog of NCBI NO: 27924345 NR Description: Similar to chaperonin containing TCP1, subunit 8
  misc_feature (1)..(302): Homolog of NCBI NO: 18396719 NR Description: chaperonin, putative [Arabidopsis thaliana]
  misc_feature (11)..(301): Homolog of NCBI NO: 37362194 NR Description: chaperonin containing TCP1, subunit 8 (theta)
  misc_feature (11)..(301): Homolog of NCBI NO: 9988062 NR Description: T-complex protein 1, theta subunit (TCP-1-theta)
  misc_feature (11)..(301): Homolog of NCBI NO: 6005727 NR Description: chaperonin containing TCP1, subunit 8 (theta); protein 1, theta subunit [Homo sapiens]
  misc_feature (11)..(301): Homolog of NCBI NO: 1136741 NR Description: KIAA0002 [Homo sapiens]
  misc_feature (11)..(301): Homolog of NCBI NO: 23478707 NR Description: T-complex protein 1 [Plasmodium yoelii yoelii]
  misc_feature (113)..(113): Xaa is any aa, unknown or other
  misc_feature (153)..(153): Xaa is any aa, unknown or other
MVGLGSMAGYGIQSMLKEGHRHLSGLEEAVLKNIDACRELSAITRTSLGPNGMNKMVINHLDKLFVTNDAATIVNELEVQHPAAKILVLAAKAQQEEIGDGANLTISFAGELXEKAEELIRMGLHPSEIIIGYTKAINKTIEILEDLVEKGSXNMDVRNKEDVVLRMRSAVASKQFGQEDMLCPLVADACIQVCPKNPANFNVDNVRVAKLLGGGLHNSSVVRGMVLKNDAVGSIKRAEKAKIVVFAGGVDTSATETKGTVLIHSAEQLENYAKTEEAKVEELIKAVADSGAKVIVSGAAVG

SEQ ID NO: 5538 - protein, 296 aa, Zea mays subsp. mays
  peptide (1)..(296): Ceres Seq. ID no. 13577866
  misc_feature (34)..(296): Pfam Name: TCP-1/cpn60 chaperonin family Pfam Description: TCP-1/cpn60 chaperonin family
  misc_feature (34)..(296): Pfam Name: TCP-1/cpn60 chaperonin family Pfam Description: TCP-1/cpn60 chaperonin family
  misc_feature (1)..(296): Homolog of NCBI NO: 18396719 NR Description: chaperonin, putative [Arabidopsis thaliana]
  misc_feature (1)..(296): Homolog of NCBI NO: 6223641 NR Description: putative T-complex protein 1, theta subunit
  misc_feature (5)..(295): Homolog of NCBI NO: 27924345 NR Description: Similar to chaperonin containing TCP1, subunit 8
  misc_feature (6)..(296): Homolog of NCBI NO: 17066726 NR Description: CCT chaperonin theta subunit [Physarum
  misc_feature (5)..(295): Homolog of NCBI NO: 29791676 NR Description: Similar to chaperonin containing TCP1, subunit 8
  misc_feature (1)..(296): Homolog of NCBI NO: 6223641 NR Description: putative T-complex protein 1, theta subunit
  misc_feature (6)..(296): Homolog of NCBI NO: 17066726 NR Description: CCT chaperonin theta subunit [Physarum
  misc_feature (5)..(295): Homolog of NCBI NO: 23478707 NR Description: T-complex protein 1 [Plasmodium yoelii yoelii]
  misc_feature (5)..(295): Homolog of NCBI NO: 1136741 NR Description: KIAA0002 [Homo sapiens]
  misc_feature (5)..(295): Homolog of NCBI NO: 6005727 NR Description: chaperonin containing TCP1, subunit 8 (theta); protein 1, theta subunit [Homo sapiens]
  misc_feature (5)..(295): Homolog of NCBI NO: 9988062 NR Description: T-complex protein 1, theta subunit (TCP-1-theta)
  misc_feature (5)..(295): Homolog of NCBI NO: 37362194 NR Description: chaperonin containing TCP1, subunit 8 (theta)
  misc_feature (5)..(295): Homolog of NCBI NO: 29791676 NR Description: Similar to chaperonin containing TCP1, subunit 8
  misc_feature (5)..(295): Homolog of NCBI NO: 27924345 NR Description: Similar to chaperonin containing TCP1, subunit 8
  misc_feature (1)..(296): Homolog of NCBI NO: 18396719 NR Description: chaperonin, putative [Arabidopsis thaliana]
  misc_feature (5)..(295): Homolog of NCBI NO: 37362194 NR Description: chaperonin containing TCP1, subunit 8 (theta)
  misc_feature (5)..(295): Homolog of NCBI NO: 9988062 NR Description: T-complex protein 1, theta subunit (TCP-1-theta)
  misc_feature (5)..(295): Homolog of NCBI NO: 6005727 NR Description: chaperonin containing TCP1, subunit 8 (theta); protein 1, theta subunit [Homo sapiens]
  misc_feature (5)..(295): Homolog of NCBI NO: 1136741 NR Description: KIAA0002 [Homo sapiens]
  misc_feature (5)..(295): Homolog of NCBI NO: 23478707 NR Description: T-complex protein 1 [Plasmodium yoelii yoelii]
  misc_feature (107)..(107): Xaa is any aa, unknown or other
  misc_feature (147)..(147): Xaa is any aa, unknown or other
MAGYGIQSMLKEGHRHLSGLEEAVLKNIDACRELSAITRTSLGPNGMNKMVINHLDKLFVTNDAATIVNELEVQHPAAKILVLAAKAQQEEIGDGANLTISFAGELXEKAEELIRMGLHPSEIIIGYTKAINKTIEILEDLVEKGSXNMDVRNKEDVVLRMRSAVASKQFGQEDMLCPLVADACIQVCPKNPANFNVDNVRVAKLLGGGLHNSSVVRGMVLKNDAVGSIKRAEKAKIVVFAGGVDTSATETKGTVLIHSAEQLENYAKTEEAKVEELIKAVADSGAKVIVSGAAVG

SEQ ID NO: 5539 - DNA, 1667 bp, Zea mays subsp. mays
  misc_feature (1)..(1667): Ceres Seq. ID no. 12408225
  misc_feature: MA Experiment ID: 108527 Result: Down-regulated in Transcription
  misc_feature: MA Experiment 108527 PARAMETER Experiment Name: Zm_5mM_NO_P Parameter: Age (day) Value: 8
  misc_feature: MA Experiment 108527 PARAMETER Experiment Name: Zm_5mM_NO_P Parameter: Organism Value: Zea mays
  misc_feature: MA Experiment 108527 PARAMETER Experiment Name: Zm_5mM_NO_P Parameter: Plant Line Value: 35A19
  misc_feature: MA Experiment 108527 PARAMETER Experiment Name: Zm_5mM_NO_P Parameter: Timepoint (hr) Value: 6
  misc_feature: MA Experiment 108527 PARAMETER Experiment Name: Zm_5mM_NO_P Parameter: Tissue Value: Aerial
  misc_feature: MA Experiment 108527 PARAMETER Experiment Name: Zm_5mM_NO_P Parameter: Treatment Value: 5mM NO vs. No Treatment
  misc_feature: MA Experiment ID: 108556 Result: Down-regulated in Transcription
  misc_feature: MA Experiment 108556 PARAMETER Experiment Name: Zm_Drought_P Parameter: Age (day) Value: 9
  misc_feature: MA Experiment 108556 PARAMETER Experiment Name: Zm_Drought_P Parameter: Organism Value: Zea mays
  misc_feature: MA Experiment 108556 PARAMETER Experiment Name: Zm_Drought_P Parameter: Plant Line Value: 35A19
  misc_feature: MA Experiment 108556 PARAMETER Experiment Name: Zm_Drought_P Parameter: Timepoint (hr) Value: 24
  misc_feature: MA Experiment 108556 PARAMETER Experiment Name: Zm_Drought_P Parameter: Tissue Value: Aerial
  misc_feature: MA Experiment 108556 PARAMETER Experiment Name: Zm_Drought_P Parameter: Treatment Value: Drought vs. No Drought
  misc_feature: MA Experiment ID: 20000479 Result: Down-regulated in Transcription
  misc_feature: MA Experiment 20000479 PARAMETER Experiment Name: Zm_Drought_P Parameter: Age (day) Value: 10
  misc_feature: MA Experiment 20000479 PARAMETER Experiment Name: Zm_Drought_P Parameter: Organism Value: Zea mays
  misc_feature: MA Experiment 20000479 PARAMETER Experiment Name: Zm_Drought_P Parameter: Plant Line Value: 35A19
  misc_feature: MA Experiment 20000479 PARAMETER Experiment Name: Zm_Drought_P Parameter: Timepoint (hr) Value: 48
  misc_feature: MA Experiment 20000479 PARAMETER Experiment Name: Zm_Drought_P Parameter: Tissue Value: Aerial
  misc_feature: MA Experiment 20000479 PARAMETER Experiment Name: Zm_Drought_P Parameter: Treatment Value: Drought vs. No Drought
  misc_feature: MA Experiment ID: 20000480 Result: Down-regulated in Transcription
  misc_feature: MA Experiment 20000480 PARAMETER Experiment Name: Zm_Drought_P Parameter: Age (day) Value: 11
  misc_feature: MA Experiment 20000480 PARAMETER Experiment Name: Zm_Drought_P Parameter: Organism Value: Zea mays
  misc_feature: MA Experiment 20000480 PARAMETER Experiment Name: Zm_Drought_P Parameter: Plant Line Value: 35A19
  misc_feature: MA Experiment 20000480 PARAMETER Experiment Name: Zm_Drought_P Parameter: Timepoint (hr) Value: 72
  misc_feature: MA Experiment 20000480 PARAMETER Experiment Name: Zm_Drought_P Parameter: Tissue Value: Aerial
  misc_feature: MA Experiment 20000480 PARAMETER Experiment Name: Zm_Drought_P Parameter: Treatment Value: Drought vs. No Drought
  misc_feature: MA Experiment ID: 20000492 Result: Down-regulated in Transcription
  misc_feature: MA Experiment 20000492 PARAMETER Experiment Name: Zm_Hybrid_Seed_Dev_P Parameter: DAP Value: 12
  misc_feature: MA Experiment 20000492 PARAMETER Experiment Name: Zm_Hybrid_Seed_Dev_P Parameter: Organism Value: Zea mays
  misc_feature: MA Experiment 20000492 PARAMETER Experiment Name: Zm_Hybrid_Seed_Dev_P Parameter: Plant Line Value: 35A19
  misc_feature: MA Experiment 20000492 PARAMETER Experiment Name: Zm_Hybrid_Seed_Dev_P Parameter: Tissue Value: Fert Kernel vs. Unfert Floret
  misc_feature: MA Experiment ID: 20000535 Result: Down-regulated in Transcription
  misc_feature: MA Experiment 20000535 PARAMETER Experiment Name: Zm_Hybrid_Seed_Dev_P Parameter: DAP Value: 30 vs. 12
  misc_feature: MA Experiment 20000535 PARAMETER Experiment Name: Zm_Hybrid_Seed_Dev_P Parameter: Organism Value: Zea mays
  misc_feature: MA Experiment 20000535 PARAMETER Experiment Name: Zm_Hybrid_Seed_Dev_P Parameter: Plant Line Value: 35A19
  misc_feature: MA Experiment 20000535 PARAMETER Experiment Name: Zm_Hybrid_Seed_Dev_P Parameter: Tissue Value: Embryo vs. Unfert Floret
acaccaatcctcatcacctccgagattttcatcgcctgccgcgcaatctcgggatcctagccgtccgcacatcgccgcggccttcctccgcgccacgaatggtgttctctggccgctgtcttttcccgaggacctaacccaaggcggtaggtaccagctaaaagtctaaaggcgaccaccggaccgggcggcaatgacgaccgccgcgagggagaggcgcctgccgccgacgctgcccctggccacgcttatcggtcgcgagctccgtgcggggggctccgagcgcccggccctgcgctacggccacgccggcttcgccaagcgcggcgaggactacttcctcgtcaagcccgactgcgtccgcgtccccggggaccccgcatcggcgttctcagttttcgccgtgttcgacggccacaacggcgtgtcggcggcggtctatagcaaagagcatctgctcgagcacgtcatgagcgcgctgccgccggacatcgggcgcgacgactggctgcaggcgctgccgcgcgctctcgtcgccggctttgtcaaggccgacattgatttccagcgcaagggggaggtgtcaggaaccacggcgacactggtggtcatcgatgggttcacggtcacagtggcgtcggtgggagactcgcgctgcatcctggacacgcagggcggcgagttgcagctgctaaccgtggaccaccgcctggaggagaatgcagaggagcgggagcgcgtcacggccagcggtggggaagtaggccggctcaatctcttcggtggtcaggaggttggtcctctccggtgctggcctggtggcttgtgcctttcaagatccattggggacatggatgttggggagtacattgtgcccattccacatgtcaagcaagtcaagctatcaaacgctggaggaaggctgataatagcatccgatggcatatgggatgcattatccaatgaagcagctgcaaaagcatgcagaggattgcctgcagaactggcagcgaagcttgtcgttaagcaagctctgaaaacaagcgggctaaaggatgacaccacctgtgttgtagttgacattatcccatccgatcatttgacatcaccacaattgtctccaaagaaaaatcataacaagttgaagtcactttttcgtagaaggtcgcatagttctgttggaaagctcgggggcaagtctgcctccattggttctgtggaggagttatttgaagaaggctctgcaatgttagaagaaaggttgggcaggaatttgtctttgaaagcagtttcagcaccttttcgctgtgcaatctgccaagtggaccaagagcccttcgaagatttgatgagagataatggaggtggttactgctcttccccatgcgctccatggggtggtccatatctctgtttggactgtcggaaaaagaaagatgcaatggaaggtaaaagatctagctgctccacagcatgcaggtgaaacagtccttgcctcaagcagaaaagaaccgatgagagaggataataagttgctggacccaagtataattgtttgctgaaactaactgtattgccagcccggtaaaagacatatttggctggtagtaagacctaactagtctgttacctgcgcacaatccgaatggaaaagtttgttgtcgtcg

SEQ ID NO: 5540 - protein, 429 aa, Zea mays subsp. mays
  peptide (1)..(429): Ceres Seq. ID no. 12408226
  misc_feature (1)..(429): Homolog of NCBI NO: 34394411 NR Description: protein phosphatase 2C-like [Oryza sativa
  misc_feature (1)..(356): Homolog of NCBI NO: 34898168 NR Description: protein phosphatase 2C-like [Oryza sativa
  misc_feature (1)..(423): Homolog of NCBI NO: 15217454 NR Description: putative protein phosphatase 2C; protein id: supported by cDNA: gi_16930414 [Arabidopsis thaliana]
  misc_feature (14)..(423): Homolog of NCBI NO: 15221404 NR Description: putative protein phosphatase; protein id: supported by cDNA: gi_15292894, supported by cDNA: gi_20259036
  misc_feature (1)..(353): Homolog of NCBI NO: 16930415 NR Description: At1g09160/T12M4_13 [Arabidopsis thaliana]
  misc_feature (31)..(423): Homolog of NCBI NO: 34914644 NR Description: OSJNBa0054L14.21 [Oryza sativa (japonica
  misc_feature (13)..(423): Homolog of NCBI NO: 18401703 NR Description: expressed protein; protein id: At1g47380.1
  misc_feature (13)..(423): Homolog of NCBI NO: 15292869 NR Description: unknown protein [Arabidopsis thaliana]
  misc_feature (14)..(421): Homolog of NCBI NO: 14029015 NR Description: Unknown protein [Oryza sativa]
  misc_feature (26)..(429): Homolog of NCBI NO: 38344839 NR Description: OSJNBa0064H22.20 [Oryza sativa (japonica
MTTAARERRLPPTLPLATLIGRELRAGGSERPALRYGHAGFAKRGEDYFLVKPDCVRVPGDPASAFSVFAVFDGHNGVSAAVYSKEHLLEHVMSALPPDIGRDDWLQALPRALVAGFVKADIDFQRKGEVSGTTATLVVIDGFTVTVASVGDSRCILDTQGGELQLLTVDHRLEENAEERERVTASGGEVGRLNLFGGQEVGPLRCWPGGLCLSRSIGDMDVGEYIVPIPHVKQVKLSNAGGRLIIASDGIWDALSNEAAAKACRGLPAELAAKLVVKQALKTSGLKDDTTCVVVDIIPSDHLTSPQLSPKKNHNKLKSLFRRRSHSSVGKLGGKSASIGSVEELFEEGSAMLEERLGRNLSLKAVSAPFRCAICQVDQEPFEDLMRDNGGGYCSSPCAPWGGPYLCLDCRKKKDAMEGKRSSCSTACR

SEQ ID NO: 5541 - protein, 337 aa, Zea mays subsp. mays
  peptide (1)..(337): Ceres Seq. ID no. 12408227
  misc_feature (1)..(337): Homolog of NCBI NO: 34394411 NR Description: protein phosphatase 2C-like [Oryza sativa
  misc_feature (1)..(264): Homolog of NCBI NO: 34898168 NR Description: protein phosphatase 2C-like [Oryza sativa
  misc_feature (1)..(331): Homolog of NCBI NO: 15217454 NR Description: putative protein phosphatase 2C; protein id: supported by cDNA: gi_16930414 [Arabidopsis thaliana]
  misc_feature (1)..(331): Homolog of NCBI NO: 15221404 NR Description: putative protein phosphatase; protein id: supported by cDNA: gi_15292894, supported by cDNA: gi_20259036
  misc_feature (1)..(261): Homolog of NCBI NO: 16930415 NR Description: At1g09160/T12M4_13 [Arabidopsis thaliana]
  misc_feature (1)..(331): Homolog of NCBI NO: 34914644 NR Description: OSJNBa0054L14.21 [Oryza sativa (japonica
  misc_feature (1)..(331): Homolog of NCBI NO: 18401703 NR Description: expressed protein; protein id: At1g47380.1
  misc_feature (1)..(331): Homolog of NCBI NO: 15292869 NR Description: unknown protein [Arabidopsis thaliana]
  misc_feature (1)..(329): Homolog of NCBI NO: 14029015 NR Description: Unknown protein [Oryza sativa]
  misc_feature (1)..(337): Homolog of NCBI NO: 38344839 NR Description: OSJNBa0064H22.20 [Oryza sativa (japonica
MSALPPDIGRDDWLQALPRALVAGFVKADIDFQRKGEVSGTTATLVVIDGFTVTVASVGDSRCILDTQGGELQLLTVDHRLEENAEERERVTASGGEVGRLNLFGGQEVGPLRCWPGGLCLSRSIGDMDVGEYIVPIPHVKQVKLSNAGGRLIIASDGIWDALSNEAAAKACRGLPAELAAKLVVKQALKTSGLKDDTTCVVVDIIPSDHLTSPQLSPKKNHNKLKSLFRRRSHSSVGKLGGKSASIGSVEELFEEGSAMLEERLGRNLSLKAVSAPFRCAICQVDQEPFEDLMRDNGGGYCSSPCAPWGGPYLCLDCRKKKDAMEGKRSSCSTACR

SEQ ID NO: 5542 - DNA, 1376 bp, Zea mays subsp. mays
  misc_feature (1)..(1376): Ceres Seq. ID no. 13491083
  misc_feature: MA Experiment ID: 20000492 Result: Up-regulated in Transcription
  misc_feature: MA Experiment 20000492 PARAMETER Experiment Name: Zm_Hybrid_Seed_Dev_P Parameter: DAP Value: 12
  misc_feature: MA Experiment 20000492 PARAMETER Experiment Name: Zm_Hybrid_Seed_Dev_P Parameter: Organism Value: Zea mays
  misc_feature: MA Experiment 20000492 PARAMETER Experiment Name: Zm_Hybrid_Seed_Dev_P Parameter: Plant Line Value: 35A19
  misc_feature: MA Experiment 20000492 PARAMETER Experiment Name: Zm_Hybrid_Seed_Dev_P Parameter: Tissue Value: Fert Kernel vs. Unfert Floret
atggaaaggctgggtggagtctcgccttcgcactcttgtattaaagattgagcgttattcacacgagatgatccttgcacacccatatcccaaagatttctcagacaaatccaggcccttacattgcttttacttcatgggtctttggagaaaacaaaccacccaagctcaagaagctgagcaatttgatatcaggggaattgtaaatgagtttaggaatactatttgtgcatatcaacattggaaagaaggaatggacattgaagtgtcccatgtaaaaagaaaagaaatccctttgtttgtttttcctggcggagtgcgtccttctcgtacttctagaacaacgcacaagaacagccgtgccattccaacacgtgatgtttcagctgatgatcaagtgggaaacctattgggcgttgccagttgtagtgatgctcaacatgtaccatgtaaaggcagctatatgaaacaaccagaaccagattttgctggaggctttcagttgccaggaagtatttctctgttgccccctagcttacccaataaagtagttctgaatgggtctgctaattttcatgcagaatctattgagagtgaacatccagaacactatcaggaaagtaagtttgtggctgtgcagaataccgtgtgccttgtagtcaagcaacctaacagtttgctcccaaattcaaacaacaattcacaattgtatggatctgattcctctcttaacagttcaaaaagggaatgtgcaggcagtgctgcaaacaacttgctgaagttatccccagctattccagccacacctgatgaacttgatgagctgatatcctatcaaactaatcagaaagatgtaaatgctgaaaataacttggagatcggttctgaaaataacttggaacaaatatgcagtctgaggccccaagaatctaataataatctgaagcgtaaagccaatcaagagctcgagccacttgagcttgccgtcccatccactggtgctgcgccgcaatcgacaggaactgccccaagaaaaccactcaggttgaggttaacgactttggggaaaccgaagccagctgaaggaacttcctgaatggaattgcccaggagccaacatacctagagcttgtttttccttgtattgaagcaaggatatgtggaagcgctcggcacatagcctgctttggcactgcgagttgaaacgaaatggaaaacggaggccgcctgacgtaaatgagtgcgattgtaataaattgtatgtagttcatagctgggttggtatcagagttcaccatttcgtttttgctgtagcgaatttcgtttttttaaccaaagtttgactcttatattttttgaatttggaaccaaaatcc

SEQ ID NO: 5543 - protein, 364 aa, Zea mays subsp. mays
  peptide (1)..(364): Ceres Seq. ID no. 13491084
  misc_feature (1)..(112): Pfam Name: Poly(A) polymerase predicted RNA binding domain Pfam Description: Poly(A) polymerase predicted RNA binding domain
  misc_feature (1)..(112): Pfam Name: Poly(A) polymerase predicted RNA binding domain Pfam Description: Poly(A) polymerase predicted RNA binding domain
  misc_feature (1)..(128): Homolog of NCBI NO: 15220913 NR Description: nuclear poly(A) polymerase -related [Arabidopsis
  misc_feature (1)..(128): Homolog of NCBI NO: 25348464 NR Description: F2H15.20 protein - Arabidopsis thaliana Strong similarity to nuclear poly(A) polymerase from Arabidopsis gb|AF255297 and contains a Nucleotidyltransferase PF|01909
  misc_feature (1)..(118): Homolog of NCBI NO: 7488023 NR Description: polynucleotide adenylyltransferase homolog - Arabidopsis thaliana >gi|7270232|emb|CAB80002.1| putative
  misc_feature (1)..(118): Homolog of NCBI NO: 30689510 NR Description: poly(A) polymerase -related [Arabidopsis >gi|17978937|gb|AAL47435.1| AT4g32850/T16I18_60 [Arabidopsis >gi|23308169|gb|AAN18054.1| At4g32850/T16I18_60 [Arabidopsis
  misc_feature (1)..(128): Homolog of NCBI NO: 25348464 NR Description: F2H15.20 protein - Arabidopsis thaliana Strong similarity to nuclear poly(A) polymerase from Arabidopsis gb|AF255297 and contains a Nucleotidyltransferase PF|01909
  misc_feature (1)..(118): Homolog of NCBI NO: 30689510 NR Description: poly(A) polymerase -related [Arabidopsis >gi|17978937|gb|AAL47435.1| AT4g32850/T16I18_60 [Arabidopsis >gi|23308169|gb|AAN18054.1| At4g32850/T16I18_60 [Arabidopsis
  misc_feature (1)..(118): Homolog of NCBI NO: 32527646 NR Description: poly(A) polymerase [Arabidopsis thaliana]
  misc_feature (1)..(136): Homolog of NCBI NO: 18400958 NR Description: poly(A) polymerase -related [Arabidopsis >gi|14532700|gb|AAK64151.1| putative poly(A) polymerase thaliana] >gi|18491197|gb|AAL69501.1| putative poly(A) polymerase
  misc_feature (1)..(136): Homolog of NCBI NO: 30682917 NR Description: poly(A) polymerase -related [Arabidopsis thaliana]
  misc_feature (1)..(118): Homolog of NCBI NO: 30689513 NR Description: poly(A) polymerase -related [Arabidopsis thaliana]
  misc_feature (1)..(118): Homolog of NCBI NO: 7488023 NR Description: polynucleotide adenylyltransferase homolog - Arabidopsis thaliana >gi|7270232|emb|CAB80002.1| putative
  misc_feature (1)..(128): Homolog of NCBI NO: 15220913 NR Description: nuclear poly(A) polymerase -related [Arabidopsis
  misc_feature (1)..(118): Homolog of NCBI NO: 30689513 NR Description: poly(A) polymerase -related [Arabidopsis thaliana]
  misc_feature (1)..(118): Homolog of NCBI NO: 32527646 NR Description: poly(A) polymerase [Arabidopsis thaliana]
  misc_feature (1)..(136): Homolog of NCBI NO: 30682917 NR Description: poly(A) polymerase -related [Arabidopsis thaliana]
  misc_feature (1)..(136): Homolog of NCBI NO: 18400958 NR Description: poly(A) polymerase -related [Arabidopsis >gi|14532700|gb|AAK64151.1| putative poly(A) polymerase thaliana] >gi|18491197|gb|AAL69501.1| putative poly(A) polymerase
WKGWVESRLRTLVLKIERYSHEMILAHPYPKDFSDKSRPLHCFYFMGLWRKQTTQAQEAEQFDIRGIVNEFRNTICAYQHWKEGMDIEVSHVKRKEIPLFVFPGGVRPSRTSRTTHKNSRAIPTRDVSADDQVGNLLGVASCSDAQHVPCKGSYMKQPEPDFAGGFQLPGSISLLPPSLPNKVVLNGSANFHAESIESEHPEHYQESKFVAVQNTVCLVVKQPNSLLPNSNNNSQLYGSDSSLNSSKRECAGSAANNLLKLSPAIPATPDELDELISYQTNQKDVNAENNLEIGSENNLEQICSLRPQESNNNLKRKANQELEPLELAVPSTGAAPQSTGTAPRKPLRLRLTTLGKPKPAEGTS

SEQ ID NO: 5544 - protein, 342 aa, Zea mays subsp. mays
  peptide (1)..(342): Ceres Seq. ID no. 13491085
  misc_feature (1)..(90): Pfam Name: Poly(A) polymerase predicted RNA binding domain Pfam Description: Poly(A) polymerase predicted RNA binding domain
  misc_feature (1)..(90): Pfam Name: Poly(A) polymerase predicted RNA binding domain Pfam Description: Poly(A) polymerase predicted RNA binding domain
  misc_feature (1)..(114): Homolog of NCBI NO: 30682917 NR Description: poly(A) polymerase -related [Arabidopsis thaliana]
  misc_feature (1)..(114): Homolog of NCBI NO: 18400958 NR Description: poly(A) polymerase -related [Arabidopsis >gi|14532700|gb|AAK64151.1| putative poly(A) polymerase thaliana] >gi|18491197|gb|AAL69501.1| putative poly(A) polymerase
  misc_feature (1)..(106): Homolog of NCBI NO: 15220913 NR Description: nuclear poly(A) polymerase -related [Arabidopsis
  misc_feature (1)..(96): Homolog of NCBI NO: 7488023 NR Description: polynucleotide adenylyltransferase homolog - Arabidopsis thaliana >gi|7270232|emb|CAB80002.1| putative
  misc_feature (1)..(106): Homolog of NCBI NO: 25348464 NR Description: F2H15.20 protein - Arabidopsis thaliana Strong similarity to nuclear poly(A) polymerase from Arabidopsis gb|AF255297 and contains a Nucleotidyltransferase PF|01909
  misc_feature (1)..(96): Homolog of NCBI NO: 30689510 NR Description: poly(A) polymerase -related [Arabidopsis >gi|17978937|gb|AAL47435.1| AT4g32850/T16I18_60 [Arabidopsis >gi|23308169|gb|AAN18054.1| At4g32850/T16I18_60 [Arabidopsis
  misc_feature (1)..(96): Homolog of NCBI NO: 32527646 NR Description: poly(A) polymerase [Arabidopsis thaliana]
  misc_feature (1)..(114): Homolog of NCBI NO: 18400958 NR Description: poly(A) polymerase -related [Arabidopsis >gi|14532700|gb|AAK64151.1| putative poly(A) polymerase thaliana] >gi|18491197|gb|AAL69501.1| putative poly(A) polymerase
  misc_feature (1)..(114): Homolog of NCBI NO: 30682917 NR Description: poly(A) polymerase -related [Arabidopsis thaliana]
  misc_feature (1)..(96): Homolog of NCBI NO: 30689513 NR Description: poly(A) polymerase -related [Arabidopsis thaliana]
  misc_feature (1)..(96): Homolog of NCBI NO: 7488023 NR Description: polynucleotide adenylyltransferase homolog - Arabidopsis thaliana >gi|7270232|emb|CAB80002.1| putative
  misc_feature (1)..(106): Homolog of NCBI NO: 15220913 NR Description: nuclear poly(A) polymerase -related [Arabidopsis
  misc_feature (1)..(96): Homolog of NCBI NO: 30689510 NR Description: poly(A) polymerase -related [Arabidopsis >gi|17978937|gb|AAL47435.1| AT4g32850/T16I18_60 [Arabidopsis >gi|23308169|gb|AAN18054.1| At4g32850/T16I18_60 [Arabidopsis
  misc_feature (1)..(106): Homolog of NCBI NO: 25348464 NR Description: F2H15.20 protein - Arabidopsis thaliana Strong similarity to nuclear poly(A) polymerase from Arabidopsis gb|AF255297 and contains a Nucleotidyltransferase PF|01909
  misc_feature (1)..(96): Homolog of NCBI NO: 30689513 NR Description: poly(A) polymerase -related [Arabidopsis thaliana]
  misc_feature (1)..(96): Homolog of NCBI NO: 32527646 NR Description: poly(A) polymerase [Arabidopsis thaliana]
MILAHPYPKDFSDKSRPLHCFYFMGLWRKQTTQAQEAEQFDIRGIVNEFRNTICAYQHWKEGMDIEVSHVKRKEIPLFVFPGGVRPSRTSRTTHKNSRAIPTRDVSADDQVGNLLGVASCSDAQHVPCKGSYMKQPEPDFAGGFQLPGSISLLPPSLPNKVVLNGSANFHAESIESEHPEHYQESKFVAVQNTVCLVVKQPNSLLPNSNNNSQLYGSDSSLNSSKRECAGSAANNLLKLSPAIPATPDELDELISYQTNQKDVNAENNLEIGSENNLEQICSLRPQESNNNLKRKANQELEPLELAVPSTGAAPQSTGTAPRKPLRLRLTTLGKPKPAEGTS

SEQ ID NO: 5545 - protein, 319 aa, Zea mays subsp. mays
  peptide (1)..(319): Ceres Seq. ID no. 13491086
  misc_feature (1)..(67): Pfam Name: Poly(A) polymerase predicted RNA binding domain Pfam Description: Poly(A) polymerase predicted RNA binding domain
  misc_feature (1)..(67): Pfam Name: Poly(A) polymerase predicted RNA binding domain Pfam Description: Poly(A) polymerase predicted RNA binding domain
  misc_feature (1)..(83): Homolog of NCBI NO: 15220913 NR Description: nuclear poly(A) polymerase -related [Arabidopsis
  misc_feature (1)..(83): Homolog of NCBI NO: 25348464 NR Description: F2H15.20 protein - Arabidopsis thaliana Strong similarity to nuclear poly(A) polymerase from Arabidopsis gb|AF255297 and contains a Nucleotidyltransferase PF|01909
  misc_feature (1)..(73): Homolog of NCBI NO: 7488023 NR Description: polynucleotide adenylyltransferase homolog - Arabidopsis thaliana >gi|7270232|emb|CAB80002.1| putative
  misc_feature (1)..(73): Homolog of NCBI NO: 30689510 NR Description: poly(A) polymerase -related [Arabidopsis >gi|17978937|gb|AAL47435.1| AT4g32850/T16I18_60 [Arabidopsis >gi|23308169|gb|AAN18054.1| At4g32850/T16I18_60 [Arabidopsis
  misc_feature (1)..(83): Homolog of NCBI NO: 25348464 NR Description: F2H15.20 protein - Arabidopsis thaliana Strong similarity to nuclear poly(A) polymerase from Arabidopsis gb|AF255297 and contains a Nucleotidyltransferase PF|01909
  misc_feature (1)..(73): Homolog of NCBI NO: 30689510 NR Description: poly(A) polymerase -related [Arabidopsis >gi|17978937|gb|AAL47435.1| AT4g32850/T16I18_60 [Arabidopsis >gi|23308169|gb|AAN18054.1| At4g32850/T16I18_60 [Arabidopsis
  misc_feature (1)..(73): Homolog of NCBI NO: 32527646 NR Description: poly(A) polymerase [Arabidopsis thaliana]
  misc_feature (1)..(91): Homolog of NCBI NO: 18400958 NR Description: poly(A) polymerase -related [Arabidopsis >gi|14532700|gb|AAK64151.1| putative poly(A) polymerase thaliana] >gi|18491197|gb|AAL69501.1| putative poly(A) polymerase
  misc_feature (1)..(91): Homolog of NCBI NO: 30682917 NR Description: poly(A) polymerase -related [Arabidopsis thaliana]
  misc_feature (1)..(73): Homolog of NCBI NO: 30689513 NR Description: poly(A) polymerase -related [Arabidopsis thaliana]
  misc_feature (1)..(73): Homolog of NCBI NO: 7488023 NR Description: polynucleotide adenylyltransferase homolog - Arabidopsis thaliana >gi|7270232|emb|CAB80002.1| putative
  misc_feature (1)..(83): Homolog of NCBI NO: 15220913 NR Description: nuclear poly(A) polymerase -related [Arabidopsis
  misc_feature (1)..(73): Homolog of NCBI NO: 30689513 NR Description: poly(A) polymerase -related [Arabidopsis thaliana]
  misc_feature (1)..(73): Homolog of NCBI NO: 32527646 NR Description: poly(A) polymerase [Arabidopsis thaliana]
  misc_feature (1)..(91): Homolog of NCBI NO: 30682917 NR Description: poly(A) polymerase -related [Arabidopsis thaliana]
  misc_feature (1)..(91): Homolog of NCBI NO: 18400958 NR Description: poly(A) polymerase -related [Arabidopsis >gi|14532700|gb|AAK64151.1| putative poly(A) polymerase thaliana] >gi|18491197|gb|AAL69501.1| putative poly(A) polymerase
MGLWRKQTTQAQEAEQFDIRGIVNEFRNTICAYQHWKEGMDIEVSHVKRKEIPLFVFPGGVRPSRTSRTTHKNSRAIPTRDVSADDQVGNLLGVASCSDAQHVPCKGSYMKQPEPDFAGGFQLPGSISLLPPSLPNKVVLNGSANFHAESIESEHPEHYQESKFVAVQNTVCLVVKQPNSLLPNSNNNSQLYGSDSSLNSSKRECAGSAANNLLKLSPAIPATPDELDELISYQTNQKDVNAENNLEIGSENNLEQICSLRPQESNNNLKRKANQELEPLELAVPSTGAAPQSTGTAPRKPLRLRLTTLGKPKPAEGTS

SEQ ID NO: 5546 - DNA, 1807 bp, Zea mays subsp. mays
  misc_feature (1)..(1807): Ceres Seq. ID no. 12352361
  misc_feature: MA Experiment ID: 108527 Result: Up-regulated in Transcription
  misc_feature: MA Experiment 108527 PARAMETER Experiment Name: Zm_5mM_NO_P Parameter: Age (day) Value: 8
  misc_feature: MA Experiment 108527 PARAMETER Experiment Name: Zm_5mM_NO_P Parameter: Organism Value: Zea mays
  misc_feature: MA Experiment 108527 PARAMETER Experiment Name: Zm_5mM_NO_P Parameter: Plant Line Value: 35A19
  misc_feature: MA Experiment 108527 PARAMETER Experiment Name: Zm_5mM_NO_P Parameter: Timepoint (hr) Value: 6
  misc_feature: MA Experiment 108527 PARAMETER Experiment Name: Zm_5mM_NO_P Parameter: Tissue Value: Aerial
  misc_feature: MA Experiment 108527 PARAMETER Experiment Name: Zm_5mM_NO_P Parameter: Treatment Value: 5mM NO vs. No Treatment
gcgaagaggggcagagggcagcaagcagccgttcccccaaaaaaggccagagctcagcagagccccgcaggccgcacccaccagaaaccccagtcgatcggcggcggcgatgtcgctgtcctcggtgaagatcggcgaggaggtttggctcacatgcctctcccacgccctcactaccgagaccgaggaggtcatgggcctcctcctcggcgacatcgagctttccagcaagggcgccaccgcccttatatggggagcgtctccgcagatgaggtgcgagcggaagaaggaccgcgtcgaggtcaacccggatcttctcgccgccgcatccgcgcaagccgacaaaatgacggccaccatcaagaagactacgagggtgatcggatggtaccactcgcacccacatatcactgttctgccgtcccatgtagatgttcgtacccaagcgatgtttcagttgctggatacaggctttgtgggccttatattttcttgttttagtgaagatgctcaaaaggttggaaaaatccaagtgactgcctttcagtcagagggtggacaacagcatgcccttcctcttgccattgctccagttattgaccttgattcatcccttagttcatcagataatgcactcacttcacattctgcattggttgaaggcatggaacaggacacaggggattccagggcctcaaagcataacaaggcctggaaaagatctttggatttctactctcatcctgacacaaatcattccacgaattatcaacccaatgaaaacactctcgctctgtacaatcctgataacacacaagaagcgcctgttgatccatacgattcagatatgactcaaagcctccaggaggctttgcaccggtcaactatggacataagtggtgcagagtatagagggaaggaggtgccactttttgtgctcccgacaaggtatctcctcaagctggacaccacgatgacctcgtactgtgatatgcaacgagtcctgtttgaagaggagcaatcagcatataatcaagctatgcaacaaaatatttgtgatgggaaaattcaccctcttacatccattcactgtacgtctacatacaactcctctctatgcaaactaatggagtattgtttgagtccagctgttattacgcttcaggatcgcctgaaggaaaatgaacttcggctatctatgttaaaagaggagtgtaagcaacttgaggctgatacccaaggcatgagaaatggttctcctcgtcgcctcatgaatcacggagctggtggcagcggttcacctatggctcagagcaggcatcctttctccagccaagggagccctagaagcccgagcggcggcagccggaggagggcttgatgatgatcttgctccgcctgatgcgttgatgaactgtccgttgtggcttaaccagatgcttcctgaaaacccagatatttgacggacgaagtgcccagacaacagacactgtacctgtacatacccattgccgttcagcgctgtgctattgtggaactccaacggtctcattgtgtttttttgtagtattgggggcgttccttatcctgttgccggagctgtgccattatcctttccctggttcatggttggcatgagcttttatagcctgtacactgtagactctgtactagaggttttccagaaaggctgaactgccgctgctgggatgtgttgttccgggcatatgcaaagatgaaggctttctttgcttttgtaattgaaaaaaaaaccgacttcggtagcaatacattttcttgaaatgcc

SEQ ID NO: 5547 - protein, 459 aa, Zea mays subsp. mays
  peptide (1)..(459): Ceres Seq. ID no. 12352362
  misc_feature (37)..(157): Pfam Name: Mov34/MPN/PAD-1 family Pfam Description: Mov34/MPN/PAD-1 family
  misc_feature (37)..(429): Homolog of NCBI NO: 20147355 NR Description: At1g80210/F18B13_28 [Arabidopsis thaliana]
  misc_feature (37)..(433): Homolog of NCBI NO: 19715647 NR Description: AT3g06820/F3E22_4 [Arabidopsis thaliana]
  misc_feature (44)..(433): Homolog of NCBI NO: 30680023 NR Description: expressed protein [Arabidopsis thaliana]
  misc_feature (44)..(351): Homolog of NCBI NO: 7549631 NR Description: unknown protein [Arabidopsis thaliana]
  misc_feature (380)..(433): Homolog of NCBI NO: 7549631 NR Description: unknown protein [Arabidopsis thaliana]
  misc_feature (145)..(350): Homolog of NCBI NO: 25406643 NR Description: hypothetical protein F18B13.28 [imported] - thaliana >gi|5902374|gb|AAD55476.1|AC009322_16 Hypothetical
  misc_feature (380)..(429): Homolog of NCBI NO: 25406643 NR Description: hypothetical protein F18B13.28 [imported] - thaliana >gi|5902374|gb|AAD55476.1|AC009322_16 Hypothetical
  misc_feature (44)..(73): Homolog of NCBI NO: 25406643 NR Description: hypothetical protein F18B13.28 [imported] - thaliana >gi|5902374|gb|AAD55476.1|AC009322_16 Hypothetical
  misc_feature (44)..(350): Homolog of NCBI NO: 15220090 NR Description: hypothetical protein; protein id: At1g80210.1
  misc_feature (380)..(429): Homolog of NCBI NO: 15220090 NR Description: hypothetical protein; protein id: At1g80210.1
RRGAEGSKQPFPQKRPELSRAPQAAPTRNPSRSAAAMSLSSVKIGEEVWLTCLSHALTTETEEVMGLLLGDIELSSKGATALIWGASPQMRCERKKDRVEVNPDLLAAASAQADKMTATIKKTTRVIGWYHSHPHITVLPSHVDVRTQAMFQLLDTGFVGLIFSCFSEDAQKVGKIQVTAFQSEGGQQHALPLAIAPVIDLDSSLSSSDNALTSHSALVEGMEQDTGDSRASKHNKAWKRSLDFYSHPDTNHSTNYQPNENTLALYNPDNTQEAPVDPYDSDMTQSLQEALHRSTMDISGAEYRGKEVPLFVLPTRYLLKLDTTMTSYCDMQRVLFEEEQSAYNQAMQQNICDGKIHPLTSIHCTSTYNSSLCKLMEYCLSPAVITLQDRLKENELRLSMLKEECKQLEADTQGMRNGSPRRLMNHGAGGSGSPMAQSRHPFSSQGSPRSPSGGSRRRA

SEQ ID NO: 5548 - protein, 423 aa, Zea mays subsp. mays
  peptide (1)..(423): Ceres Seq. ID no. 12352363
  misc_feature (1)..(121): Pfam Name: Mov34/MPN/PAD-1 family Pfam Description: Mov34/MPN/PAD-1 family
  misc_feature (1)..(393): Homolog of NCBI NO: 20147355 NR Description: At1g80210/F18B13_28 [Arabidopsis thaliana]
  misc_feature (1)..(397): Homolog of NCBI NO: 19715647 NR Description: AT3g06820/F3E22_4 [Arabidopsis thaliana]
  misc_feature (8)..(397): Homolog of NCBI NO: 30680023 NR Description: expressed protein [Arabidopsis thaliana]
  misc_feature (8)..(315): Homolog of NCBI NO: 7549631 NR Description: unknown protein [Arabidopsis thaliana]
  misc_feature (344)..(397): Homolog of NCBI NO: 7549631 NR Description: unknown protein [Arabidopsis thaliana]
  misc_feature (109)..(314): Homolog of NCBI NO: 25406643 NR Description: hypothetical protein F18B13.28 [imported] - thaliana >gi|5902374|gb|AAD55476.1|AC009322_16 Hypothetical
  misc_feature (344)..(393): Homolog of NCBI NO: 25406643 NR Description: hypothetical protein F18B13.28 [imported] - thaliana >gi|5902374|gb|AAD55476.1|AC009322_16 Hypothetical
  misc_feature (8)..(37): Homolog of NCBI NO: 25406643 NR Description: hypothetical protein F18B13.28 [imported] - thaliana >gi|5902374|gb|AAD55476.1|AC009322_16 Hypothetical
  misc_feature (8)..(314): Homolog of NCBI NO: 15220090 NR Description: hypothetical protein; protein id: At1g80210.1
  misc_feature (344)..(393): Homolog of NCBI NO: 15220090 NR Description: hypothetical protein; protein id: At1g80210.1
MSLSSVKIGEEVWLTCLSHALTTETEEVMGLLLGDIELSSKGATALIWGASPQMRCERKKDRVEVNPDLLAAASAQADKMTATIKKTTRVIGWYHSHPHITVLPSHVDVRTQAMFQLLDTGFVGLIFSCFSEDAQKVGKIQVTAFQSEGGQQHALPLAIAPVIDLDSSLSSSDNALTSHSALVEGMEQDTGDSRASKHNKAWKRSLDFYSHPDTNHSTNYQPNENTLALYNPDNTQEAPVDPYDSDMTQSLQEALHRSTMDISGAEYRGKEVPLFVLPTRYLLKLDTTMTSYCDMQRVLFEEEQSAYNQAMQQNICDGKIHPLTSIHCTSTYNSSLCKLMEYCLSPAVITLQDRLKENELRLSMLKEECKQLEADTQGMRNGSPRRLMNHGAGGSGSPMAQSRHPFSSQGSPRSPSGGSRRRA

SEQ ID NO: 5549 - protein, 395 aa, Zea mays subsp. mays
  peptide (1)..(395): Ceres Seq. ID no. 12352364
  misc_feature (1)..(93): Pfam Name: Mov34/MPN/PAD-1 family Pfam Description: Mov34/MPN/PAD-1 family
  misc_feature (1)..(365): Homolog of NCBI NO: 20147355 NR Description: At1g80210/F18B13_28 [Arabidopsis thaliana]
  misc_feature (1)..(369): Homolog of NCBI NO: 19715647 NR Description: AT3g06820/F3E22_4 [Arabidopsis thaliana]
  misc_feature (1)..(369): Homolog of NCBI NO: 30680023 NR Description: expressed protein [Arabidopsis thaliana]
  misc_feature (1)..(287): Homolog of NCBI NO: 7549631 NR Description: unknown protein [Arabidopsis thaliana]
  misc_feature (316)..(369): Homolog of NCBI NO: 7549631 NR Description: unknown protein [Arabidopsis thaliana]
  misc_feature (81)..(286): Homolog of NCBI NO: 25406643 NR Description: hypothetical protein F18B13.28 [imported] - thaliana >gi|5902374|gb|AAD55476.1|AC009322_16 Hypothetical
  misc_feature (316)..(365): Homolog of NCBI NO: 25406643 NR Description: hypothetical protein F18B13.28 [imported] - thaliana >gi|5902374|gb|AAD55476.1|AC009322_16 Hypothetical
  misc_feature (1)..(286): Homolog of NCBI NO: 15220090 NR Description: hypothetical protein; protein id: At1g80210.1
  misc_feature (316)..(365): Homolog of NCBI NO: 15220090 NR Description: hypothetical protein; protein id: At1g80210.1
  misc_feature (27)..(137): Homolog of NCBI NO: 12848275 NR Description: unnamed protein product [Mus musculus]
MGLLLGDIELSSKGATALIWGASPQMRCERKKDRVEVNPDLLAAASAQADKMTATIKKTTRVIGWYHSHPHITVLPSHVDVRTQAMFQLLDTGFVGLIFSCFSEDAQKVGKIQVTAFQSEGGQQHALPLAIAPVIDLDSSLSSSDNALTSHSALVEGMEQDTGDSRASKHNKAWKRSLDFYSHPDTNHSTNYQPNENTLALYNPDNTQEAPVDPYDSDMTQSLQEALHRSTMDISGAEYRGKEVPLFVLPTRYLLKLDTTMTSYCDMQRVLFEEEQSAYNQAMQQNICDGKIHPLTSIHCTSTYNSSLCKLMEYCLSPAVITLQDRLKENELRLSMLKEECKQLEADTQGMRNGSPRRLMNHGAGGSGSPMAQSRHPFSSQGSPRSPSGGSRRRA

SEQ ID NO: 5550 - DNA, 1070 bp, Zea mays subsp. mays
  misc_feature (1)..(1070): Ceres Seq. ID no. 12409467
  misc_feature: MA Experiment ID: 108545 Result: Down-regulated in Transcription
  misc_feature: MA Experiment 108545 PARAMETER Experiment Name: Zm_Imbibed_Seeds_P Parameter: Age (day) Value: 3 vs. 2
  misc_feature: MA Experiment 108545 PARAMETER Experiment Name: Zm_Imbibed_Seeds_P Parameter: Organism Value: Zea mays
  misc_feature: MA Experiment 108545 PARAMETER Experiment Name: Zm_Imbibed_Seeds_P Parameter: Plant Line Value: 35A19
  misc_feature: MA Experiment 108545 PARAMETER Experiment Name: Zm_Imbibed_Seeds_P Parameter: Tissue Value: Aerial vs. Embryo
  misc_feature: MA Experiment ID: 20000492 Result: Up-regulated in Transcription
  misc_feature: MA Experiment 20000492 PARAMETER Experiment Name: Zm_Hybrid_Seed_Dev_P Parameter: DAP Value: 12
  misc_feature: MA Experiment 20000492 PARAMETER Experiment Name: Zm_Hybrid_Seed_Dev_P Parameter: Organism Value: Zea mays
  misc_feature: MA Experiment 20000492 PARAMETER Experiment Name: Zm_Hybrid_Seed_Dev_P Parameter: Plant Line Value: 35A19
  misc_feature: MA Experiment 20000492 PARAMETER Experiment Name: Zm_Hybrid_Seed_Dev_P Parameter: Tissue Value: Fert Kernel vs. Unfert Floret
aaataaaacacagcctcacgatccccgcactgcccggtgccccgcgagctgctcctctacacacgccagcgagaaccagcccaccccacctgctcgatcggcgcaccgtcccgcaggccgcagggccgtcgtcagccatgatccagctcctgttctcgctgctggccgcggaggcggcgctggtgctggcgctgctcttccccacgcccgtgcgccgcctggctctgctcgccatcgatcgcgccaagagggggcgcggacccgtcatggccaagaccatcgcgggcaccatgctcctcgtactagtctctgctttctacagcgtcgctaagatccgccgccgcgagggggagctcggacagctcacgcccaccgaccaggtgctcgccagtcgccacctcctcgaggcgtcgctcatgggatactctctgtttcttggattaattattgaccgattacatcactatattagagagttgagaatgttgaggaaagacatggaggctgtaacagagcagggccggacactagaagcagcaaaatccggaagcactgacgagattcaaggataccagaaagaggttgcgagtttgaaggaacaagtgcaagagctccagaaccaatcacaaaagaaaacagagcgactaaaaaccgccgaagcaaattctgtagctttacagaaacaatcggaaggtttactcgctgaatatgaccgtctcattgcggagaacagggatttgagggaccaactgcagtcaattgacctccgcctgtcccattctggcggaaagaagaactcgtaaagcaagttctgcaattttgaagagcatgattttctgtagattttcttccaataggttaactgtactcggttttctctattatcataatcgcccatgtaattcagtagatggatttgcctatgtaattcagtagatgcgtgcgtgtatgtatgagtggaccatttaatgctttatggactgggtggcatggactcagacccggcatttggccatagtttatggcctaacgtcttggttcagtgagatcaaataagaacctgcatcttc

SEQ ID NO: 5551 - protein, 266 aa, Zea mays subsp. mays
  peptide (1)..(266): Ceres Seq. ID no. 12409468
  misc_feature (49)..(237): Pfam Name: B-cell receptor-associated protein 31-like Pfam Description: B-cell receptor-associated protein 31-like
  misc_feature (46)..(264): Homolog of NCBI NO: 18422225 NR Description: expressed protein; protein id: At5g42570.1, by cDNA: 1558., supported by cDNA: gi_15450825 [Arabidopsis >gi|15450826|gb|AAK96684.1| Unknown protein [Arabidopsis
  misc_feature (46)..(266): Homolog of NCBI NO: 22655198 NR Description: unknown protein [Arabidopsis thaliana]
  misc_feature (46)..(250): Homolog of NCBI NO: 34897474 NR Description: unknown protein [Oryza sativa (japonica
  misc_feature (46)..(250): Homolog of NCBI NO: 15239667 NR Description: putative protein; protein id: At5g48660.1 thaliana] >gi|10177356|dbj|BAB10699.1| contains similarity to
  misc_feature (46)..(264): Homolog of NCBI NO: 9759015 NR Description: gene_id:K16E1.4~unknown protein [Arabidopsis
  misc_feature (46)..(264): Homolog of NCBI NO: 21553655 NR Description: unknown [Arabidopsis thaliana]
  misc_feature (46)..(250): Homolog of NCBI NO: 15231412 NR Description: unknown protein; protein id: At3g07190.1 thaliana] >gi|6642646|gb|AAF20227.1|AC012395_14 unknown protein
  misc_feature (46)..(196): Homolog of NCBI NO: 30682503 NR Description: expressed protein [Arabidopsis thaliana]
  misc_feature (46)..(175): Homolog of NCBI NO: 18402620 NR Description: expressed protein; protein id: At3g20450.1, by cDNA: 97350. [Arabidopsis thaliana]
IKHSLTIPALPGAPRAAPLHTPARTSPPHLLDRRTVPQAAGPSSAMIQLLFSLLAAEAALVLALLFPTPVRRLALLAIDRAKRGRGPVMAKTIAGTMLLVLVSAFYSVAKIRRREGELGQLTPTDQVLASRHLLEASLMGYSLFLGLIIDRLHHYIRELRMLRKDMEAVTEQGRTLEAAKSGSTDEIQGYQKEVASLKEQVQELQNQSQKKTERLKTAEANSVALQKQSEGLLAEYDRLIAENRDLRDQLQSIDLRLSHSGGKKNS

SEQ ID NO: 5552 - protein, 221 aa, Zea mays subsp. mays
  peptide (1)..(221): Ceres Seq. ID no. 12409469
  misc_feature (4)..(192): Pfam Name: B-cell receptor-associated protein 31-like Pfam Description: B-cell receptor-associated protein 31-like
  misc_feature (1)..(219): Homolog of NCBI NO: 21553655 NR Description: unknown [Arabidopsis thaliana]
  misc_feature (1)..(219): Homolog of NCBI NO: 9759015 NR Description: gene_id:K16E1.4~unknown protein [Arabidopsis
  misc_feature (1)..(219): Homolog of NCBI NO: 18422225 NR Description: expressed protein; protein id: At5g42570.1, by cDNA: 1558., supported by cDNA: gi_15450825 [Arabidopsis >gi|15450826|gb|AAK96684.1| Unknown protein [Arabidopsis
  misc_feature (1)..(221): Homolog of NCBI NO: 22655198 NR Description: unknown protein [Arabidopsis thaliana]
  misc_feature (1)..(205): Homolog of NCBI NO: 34897474 NR Description: unknown protein [Oryza sativa (japonica
  misc_feature (1)..(205): Homolog of NCBI NO: 15239667 NR Description: putative protein; protein id: At5g48660.1 thaliana] >gi|10177356|dbj|BAB10699.1| contains similarity to
  misc_feature (1)..(205): Homolog of NCBI NO: 15231412 NR Description: unknown protein; protein id: At3g07190.1 thaliana] >gi|6642646|gb|AAF20227.1|AC012395_14 unknown protein
  misc_feature (1)..(151): Homolog of NCBI NO: 30682503 NR Description: expressed protein [Arabidopsis thaliana]
  misc_feature (1)..(130): Homolog of NCBI NO: 18402620 NR Description: expressed protein; protein id: At3g20450.1, by cDNA: 97350. [Arabidopsis thaliana]
MIQLLFSLLAAEAALVLALLFPTPVRRLALLAIDRAKRGRGPVMAKTIAGTMLLVLVSAFYSVAKIRRREGELGQLTPTDQVLASRHLLEASLMGYSLFLGLIIDRLHHYIRELRMLRKDMEAVTEQGRTLEAAKSGSTDEIQGYQKEVASLKEQVQELQNQSQKKTERLKTAEANSVALQKQSEGLLAEYDRLIAENRDLRDQLQSIDLRLSHSGGKKNS

SEQ ID NO: 5553 - protein, 178 aa, Zea mays subsp. mays
  peptide (1)..(178): Ceres Seq. ID no. 12409470
  misc_feature (1)..(149): Pfam Name: B-cell receptor-associated protein 31-like Pfam Description: B-cell receptor-associated protein 31-like
  misc_feature (1)..(176): Homolog of NCBI NO: 21553655 NR Description: unknown [Arabidopsis thaliana]
  misc_feature (1)..(176): Homolog of NCBI NO: 9759015 NR Description: gene_id:K16E1.4~unknown protein [Arabidopsis
  misc_feature (1)..(176): Homolog of NCBI NO: 18422225 NR Description: expressed protein; protein id: At5g42570.1, by cDNA: 1558., supported by cDNA: gi_15450825 [Arabidopsis >gi|15450826|gb|AAK96684.1| Unknown protein [Arabidopsis
  misc_feature (1)..(178): Homolog of NCBI NO: 22655198 NR Description: unknown protein [Arabidopsis thaliana]
  misc_feature (1)..(162): Homolog of NCBI NO: 34897474 NR Description: unknown protein [Oryza sativa (japonica
  misc_feature (1)..(162): Homolog of NCBI NO: 15239667 NR Description: putative protein; protein id: At5g48660.1 thaliana] >gi|10177356|dbj|BAB10699.1| contains similarity to
  misc_feature (1)..(162): Homolog of NCBI NO: 15231412 NR Description: unknown protein; protein id: At3g07190.1 thaliana] >gi|6642646|gb|AAF20227.1|AC012395_14 unknown protein
  misc_feature (1)..(108): Homolog of NCBI NO: 30682503 NR Description: expressed protein [Arabidopsis thaliana]
  misc_feature (1)..(87): Homolog of NCBI NO: 18402620 NR Description: expressed protein; protein id: At3g20450.1, by cDNA: 97350. [Arabidopsis thaliana]
MAKTIAGTMLLVLVSAFYSVAKIRRREGELGQLTPTDQVLASRHLLEASLMGYSLFLGLIIDRLHHYIRELRMLRKDMEAVTEQGRTLEAAKSGSTDEIQGYQKEVASLKEQVQELQNQSQKKTERLKTAEANSVALQKQSEGLLAEYDRLIAENRDLRDQLQSIDLRLSHSGGKKNS

SEQ ID NO: 5554 - DNA, 1545 bp, Zea mays subsp. mays
  misc_feature (1)..(1545): Ceres Seq. ID no. 12343144
  misc_feature: MA Experiment ID: 108535 Result: Down-regulated in Transcription
  misc_feature: MA Experiment 108535 PARAMETER Experiment Name: Zm_Meristem_P Parameter: Age (day) Value: 8
  misc_feature: MA Experiment 108535 PARAMETER Experiment Name: Zm_Meristem_P Parameter: Organism Value: Zea mays
  misc_feature: MA Experiment 108535 PARAMETER Experiment Name: Zm_Meristem_P Parameter: Plant Line Value: 35A19
  misc_feature: MA Experiment 108535 PARAMETER Experiment Name: Zm_Meristem_P Parameter: Tissue Value: Root Meristem vs. Above Root Meristem
  misc_feature: MA Experiment ID: 108536 Result: Up-regulated in Transcription
  misc_feature: MA Experiment 108536 PARAMETER Experiment Name: Zm_Meristem_P Parameter: Age (day) Value: 8
  misc_feature: MA Experiment 108536 PARAMETER Experiment Name: Zm_Meristem_P Parameter: Organism Value: Zea mays
  misc_feature: MA Experiment 108536 PARAMETER Experiment Name: Zm_Meristem_P Parameter: Plant Line Value: 35A19
  misc_feature: MA Experiment 108536 PARAMETER Experiment Name: Zm_Meristem_P Parameter: Tissue Value: Shoot Meristem vs. Above Shoot Meristem
  misc_feature: MA Experiment ID: 108544 Result: Up-regulated in Transcription
  misc_feature: MA Experiment ID: 108556 Result: Up-regulated in Transcription
  misc_feature: MA Experiment 108556 PARAMETER Experiment Name: Zm_Drought_P Parameter: Age (day) Value: 9
  misc_feature: MA Experiment 108556 PARAMETER Experiment Name: Zm_Drought_P Parameter: Organism Value: Zea mays
  misc_feature: MA Experiment 108556 PARAMETER Experiment Name: Zm_Drought_P Parameter: Plant Line Value: 35A19
  misc_feature: MA Experiment 108556 PARAMETER Experiment Name: Zm_Drought_P Parameter: Timepoint (hr) Value: 24
  misc_feature: MA Experiment 108556 PARAMETER Experiment Name: Zm_Drought_P Parameter: Tissue Value: Aerial
  misc_feature: MA Experiment 108556 PARAMETER Experiment Name: Zm_Drought_P Parameter: Treatment Value: Drought vs. No Drought
  misc_feature: MA Experiment ID: 108597 Result: Up-regulated in Transcription
  misc_feature: MA Experiment 108597 PARAMETER Experiment Name: Zm_100uM_ABA_P Parameter: Age (day) Value: 9
  misc_feature: MA Experiment 108597 PARAMETER Experiment Name: Zm_100uM_ABA_P Parameter: Organism Value: Zea mays
  misc_feature: MA Experiment 108597 PARAMETER Experiment Name: Zm_100uM_ABA_P Parameter: Plant Line Value: 35A19
  misc_feature: MA Experiment 108597 PARAMETER Experiment Name: Zm_100uM_ABA_P Parameter: Timepoint (hr) Value: 24
  misc_feature: MA Experiment 108597 PARAMETER Experiment Name: Zm_100uM_ABA_P Parameter: Tissue Value: Aerial
  misc_feature: MA Experiment 108597 PARAMETER Experiment Name: Zm_100uM_ABA_P Parameter: Treatment Value: 100uM ABA vs. No Treatment
  misc_feature: MA Experiment ID: 108689 Result: Up-regulated in Transcription
  misc_feature: MA Experiment 108689 PARAMETER Experiment Name: Zm_Drought_Roots_P Parameter: Age (day) Value: 9
  misc_feature: MA Experiment 108689 PARAMETER Experiment Name: Zm_Drought_Roots_P Parameter: Organism Value: Zea mays
  misc_feature: MA Experiment 108689 PARAMETER Experiment Name: Zm_Drought_Roots_P Parameter: Plant Line Value: 35A19
  misc_feature: MA Experiment 108689 PARAMETER Experiment Name: Zm_Drought_Roots_P Parameter: Timepoint (hr) Value: 24
  misc_feature: MA Experiment 108689 PARAMETER Experiment Name: Zm_Drought_Roots_P Parameter: Tissue Value: Roots
  misc_feature: MA Experiment 108689 PARAMETER Experiment Name: Zm_Drought_Roots_P Parameter: Treatment Value: Drought vs. No Drought
  misc_feature: MA Experiment ID: 20000477 Result: Up-regulated in Transcription
  misc_feature: MA Experiment 20000477 PARAMETER Experiment Name: Zm_5mM_SA_P Parameter: Age (day) Value: 10
  misc_feature: MA Experiment 20000477 PARAMETER Experiment Name: Zm_5mM_SA_P Parameter: Organism Value: Zea mays
  misc_feature: MA Experiment 20000477 PARAMETER Experiment Name: Zm_5mM_SA_P Parameter: Plant Line Value: 35A19
  misc_feature: MA Experiment 20000477 PARAMETER Experiment Name: Zm_5mM_SA_P Parameter: Timepoint (hr) Value: 48
  misc_feature: MA Experiment 20000477 PARAMETER Experiment Name: Zm_5mM_SA_P Parameter: Tissue Value: Aerial
  misc_feature: MA Experiment 20000477 PARAMETER Experiment Name: Zm_5mM_SA_P Parameter: Treatment Value: 5mM SA vs. No Treatment
  misc_feature: MA Experiment ID: 20000478 Result: Up-regulated in Transcription
  misc_feature: MA Experiment 20000478 PARAMETER Experiment Name: Zm_5mM_SA_P Parameter: Age (day) Value: 11
  misc_feature: MA Experiment 20000478 PARAMETER Experiment Name: Zm_5mM_SA_P Parameter: Organism Value: Zea mays
  misc_feature: MA Experiment 20000478 PARAMETER Experiment Name: Zm_5mM_SA_P Parameter: Plant Line Value: 35A19
  misc_feature: MA Experiment 20000478 PARAMETER Experiment Name: Zm_5mM_SA_P Parameter: Timepoint (hr) Value: 72
  misc_feature: MA Experiment 20000478 PARAMETER Experiment Name: Zm_5mM_SA_P Parameter: Tissue Value: Aerial
  misc_feature: MA Experiment 20000478 PARAMETER Experiment Name: Zm_5mM_SA_P Parameter: Treatment Value: 5mM SA vs. No Treatment
  misc_feature: MA Experiment ID: 20000479 Result: Up-regulated in Transcription
  misc_feature: MA Experiment 20000479 PARAMETER Experiment Name: Zm_Drought_P Parameter: Age (day) Value: 10
  misc_feature: MA Experiment 20000479 PARAMETER Experiment Name: Zm_Drought_P Parameter: Organism Value: Zea mays
  misc_feature: MA Experiment 20000479 PARAMETER Experiment Name: Zm_Drought_P Parameter: Plant Line Value: 35A19
  misc_feature: MA Experiment 20000479 PARAMETER Experiment Name: Zm_Drought_P Parameter: Timepoint (hr) Value: 48
  misc_feature: MA Experiment 20000479 PARAMETER Experiment Name: Zm_Drought_P Parameter: Tissue Value: Aerial
  misc_feature: MA Experiment 20000479 PARAMETER Experiment Name: Zm_Drought_P Parameter: Treatment Value: Drought vs. No Drought
  misc_feature: MA Experiment ID: 20000480 Result: Up-regulated in Transcription
  misc_feature: MA Experiment 20000480 PARAMETER Experiment Name: Zm_Drought_P Parameter: Age (day) Value: 11
  misc_feature: MA Experiment 20000480 PARAMETER Experiment Name: Zm_Drought_P Parameter: Organism Value: Zea mays
  misc_feature: MA Experiment 20000480 PARAMETER Experiment Name: Zm_Drought_P Parameter: Plant Line Value: 35A19
  misc_feature: MA Experiment 20000480 PARAMETER Experiment Name: Zm_Drought_P Parameter: Timepoint (hr) Value: 72
  misc_feature: MA Experiment 20000480 PARAMETER Experiment Name: Zm_Drought_P Parameter: Tissue Value: Aerial
  misc_feature: MA Experiment 20000480 PARAMETER Experiment Name: Zm_Drought_P Parameter: Treatment Value: Drought vs. No Drought
  misc_feature: MA Experiment ID: 20000492 Result: Down-regulated in Transcription
  misc_feature: MA Experiment 20000492 PARAMETER Experiment Name: Zm_Hybrid_Seed_Dev_P Parameter: DAP Value: 12
  misc_feature: MA Experiment 20000492 PARAMETER Experiment Name: Zm_Hybrid_Seed_Dev_P Parameter: Organism Value: Zea mays
  misc_feature: MA Experiment 20000492 PARAMETER Experiment Name: Zm_Hybrid_Seed_Dev_P Parameter: Plant Line Value: 35A19
  misc_feature: MA Experiment 20000492 PARAMETER Experiment Name: Zm_Hybrid_Seed_Dev_P Parameter: Tissue Value: Fert Kernel vs. Unfert Floret
  misc_feature: MA Experiment ID: 20000535 Result: Down-regulated in Transcription
  misc_feature: MA Experiment 20000535 PARAMETER Experiment Name: Zm_Hybrid_Seed_Dev_P Parameter: DAP Value: 30 vs. 12
  misc_feature: MA Experiment 20000535 PARAMETER Experiment Name: Zm_Hybrid_Seed_Dev_P Parameter: Organism Value: Zea mays
  misc_feature: MA Experiment 20000535 PARAMETER Experiment Name: Zm_Hybrid_Seed_Dev_P Parameter: Plant Line Value: 35A19
  misc_feature: MA Experiment 20000535 PARAMETER Experiment Name: Zm_Hybrid_Seed_Dev_P Parameter: Tissue Value: Embryo vs. Unfert Floret
agccttccaatctctaggagaaacgtcttgccctccactccaacatcgacacgactactcgtccgactagaaccaaacttttcaatccatcgttcgcagttcagttcacacttcacaggcgagcgcgaccatggatacccaagcacgtccggttccccgcgtcaagctcggcacccagggattcgaggtgtccaagctggggttcgggtgcatggggctgacgggcgcatacaactccccgctggacgacgaggccggcatcgccgtcatcgcgcacgctttcagccgcggagtcaccttgttcgacacctccgacgtatacgggcccctcaccaacgaaatcctcctcggcaaggcgctgaagcagctgccgcgggagcaggtgcaggtggccaccaagttcgggatacggcgtgacgagagcggcacgcggaccgtgtgcggccggccggagtacgttcgtgcctgctgcgaggccagcctgcgccgcctcggcatcgactgcatcgacctctactaccagcaccgcattgacaccacaattcccatcgaggagacgactggcgagctcaagaagctggtggaggagggtaaggtcaagtacatcggattgtcagaggcgagcccggacaccatcaggcgtgcacatgctgtgcacccgatcaccgcggtgcagatggagtggtctctctggtctcgcgacattgagcccgaaattgtgccgctctgcagagaattgggcattggaattgtaccatacagtcctcttggccgtgggttttttggtggaagaggagtgaaagagcaagtgtctgctgaatctaatctgcatgggatcccaaggtttgctccagaaaatttggagaagaacaagcaaatttatttgcgaatggaagaactggccaataagcaccagtgcagccctgctcagctagctttagcatgggttttgcatcaaggcgatgatgtggttcctataccagggacaaccaaaatcaagaatctagattccaacattgactccttgaaggtgaaactgacagacgaagatctgaaagaaatgggcagccagatacgggaagaagatgtggctggtgggagacaattcacctcatatgcacataccacctggaagtacgctgatacgccaaagaagcagagctaaaaaatacttgaaagcaacaatgatgatgcgattggtatggccctctccctgcagatgccctcaggaacattgtcgatgtccctttgtgaacagcctcttctagtaaataaataatgtatggagaagaacaatgaagggcccagtcttgttggaagtacgaataatgtacagttacaggaatgtgtgctaccatatatttcgtcgcatcagtttgagttgtggttgtgtgaacctaccatatatttcctcgcaaaagaataatgtatagttacagtaatgtgtgctatctcaatcagcatgcaggcaggaaaaacatggcaccatatgtagtacagtacatgaattctcgcttgtaatccacatttagacctgaaaatgcg

SEQ ID NO: 5555 - protein, 344 aa, Zea mays subsp. mays
  peptide (1)..(344): Ceres Seq. ID no. 12343145
  misc_feature (8)..(344): Homolog of NCBI NO: 37534402 NR Description: putative polyprotein [Oryza sativa (japonica group)] >gi|31432120|gb|AAP53790.1| putative polyprotein [Oryza
  misc_feature (202)..(342): Homolog of NCBI NO: 34912706 NR Description: putative auxin-induced protein [Oryza sativa
  misc_feature (20)..(143): Homolog of NCBI NO: 34912706 NR Description: putative auxin-induced protein [Oryza sativa
  misc_feature (1)..(344): Homolog of NCBI NO: 38344997 NR Description: OSJNBa0008A08.11 [Oryza sativa (japonica
  misc_feature (8)..(344): Homolog of NCBI NO: 15219786 NR Description: auxin-induced protein, putative; protein id: [Arabidopsis thaliana] >gi|25316215|pir||C96632 hypothetical
  misc_feature (4)..(340): Homolog of NCBI NO: 18406861 NR Description: auxin-induced protein, putative; protein id: supported by cDNA: gi_15912324, supported by cDNA: gi_20466377, by cDNA: gi_6562979 [Arabidopsis thaliana]
  misc_feature (4)..(340): Homolog of NCBI NO: 6562980 NR Description: auxin-induced atb2 [Arabidopsis thaliana]
  misc_feature (4)..(344): Homolog of NCBI NO: 30102704 NR Description: At1g60680 [Arabidopsis thaliana]
  misc_feature (4)..(344): Homolog of NCBI NO: 25316216 NR Description: hypothetical protein F8A5.24 [imported] -
  misc_feature (4)..(344): Homolog of NCBI NO: 30696459 NR Description: aldo/keto reductase family [Arabidopsis thaliana] At1g60730/F8A5_24 [Arabidopsis thaliana]
MDTQARPVPRVKLGTQGFEVSKLGFGCMGLTGAYNSPLDDEAGIAVIAHAFSRGVTLFDTSDVYGPLTNEILLGKALKQLPREQVQVATKFGIRRDESGTRTVCGRPEYVRACCEASLRRLGIDCIDLYYQHRIDTTIPIEETTGELKKLVEEGKVKYIGLSEASPDTIRRAHAVHPITAVQMEWSLWSRDIEPEIVPLCRELGIGIVPYSPLGRGFFGGRGVKEQVSAESNLHGIPRFAPENLEKNKQIYLRMEELANKHQCSPAQLALAWVLHQGDDVVPIPGTTKIKNLDSNIDSLKVKLTDEDLKEMGSQIREEDVAGGRQFTSYAHTTWKYADTPKKQS

SEQ ID NO: 5556 - protein, 317 aa, Zea mays subsp. mays
  peptide (1)..(317): Ceres Seq. ID no. 12343146
  misc_feature (1)..(317): Homolog of NCBI NO: 37534402 NR Description: putative polyprotein [Oryza sativa (japonica group)] >gi|31432120|gb|AAP53790.1| putative polyprotein [Oryza
  misc_feature (175)..(315): Homolog of NCBI NO: 34912706 NR Description: putative auxin-induced protein [Oryza sativa
  misc_feature (1)..(116): Homolog of NCBI NO: 34912706 NR Description: putative auxin-induced protein [Oryza sativa
  misc_feature (1)..(317): Homolog of NCBI NO: 38344997 NR Description: OSJNBa0008A08.11 [Oryza sativa (japonica
  misc_feature (1)..(317): Homolog of NCBI NO: 15219786 NR Description: auxin-induced protein, putative; protein id: [Arabidopsis thaliana] >gi|25316215|pir||C96632 hypothetical
  misc_feature (1)..(313): Homolog of NCBI NO: 18406861 NR Description: auxin-induced protein, putative; protein id: supported by cDNA: gi_15912324, supported by cDNA: gi_20466377, by cDNA: gi_6562979 [Arabidopsis thaliana]
  misc_feature (1)..(313): Homolog of NCBI NO: 6562980 NR Description: auxin-induced atb2 [Arabidopsis thaliana]
  misc_feature (1)..(317): Homolog of NCBI NO: 30102704 NR Description: At1g60680 [Arabidopsis thaliana]
  misc_feature (1)..(317): Homolog of NCBI NO: 25316216 NR Description: hypothetical protein F8A5.24 [imported] -
  misc_feature (1)..(317): Homolog of NCBI NO: 30696459 NR Description: aldo/keto reductase family [Arabidopsis thaliana] At1g60730/F8A5_24 [Arabidopsis thaliana]
MGLTGAYNSPLDDEAGIAVIAHAFSRGVTLFDTSDVYGPLTNEILLGKALKQLPREQVQVATKFGIRRDESGTRTVCGRPEYVRACCEASLRRLGIDCIDLYYQHRIDTTIPIEETTGELKKLVEEGKVKYIGLSEASPDTIRRAHAVHPITAVQMEWSLWSRDIEPEIVPLCRELGIGIVPYSPLGRGFFGGRGVKEQVSAESNLHGIPRFAPENLEKNKQIYLRMEELANKHQCSPAQLALAWVLHQGDDVVPIPGTTKIKNLDSNIDSLKVKLTDEDLKEMGSQIREEDVAGGRQFTSYAHTTWKYADTPKKQS

SEQ ID NO: 5557 - DNA, 1867 bp, Zea mays subsp. mays
  misc_feature (1)..(1867): Ceres Seq. ID no. 12595058
  misc_feature: MA Experiment ID: 108527 Result: Up-regulated in Transcription
  misc_feature: MA Experiment 108527 PARAMETER Experiment Name: Zm_5mM_NO_P Parameter: Age (day) Value: 8
  misc_feature: MA Experiment 108527 PARAMETER Experiment Name: Zm_5mM_NO_P Parameter: Organism Value: Zea mays
  misc_feature: MA Experiment 108527 PARAMETER Experiment Name: Zm_5mM_NO_P Parameter: Plant Line Value: 35A19
  misc_feature: MA Experiment 108527 PARAMETER Experiment Name: Zm_5mM_NO_P Parameter: Timepoint (hr) Value: 6
  misc_feature: MA Experiment 108527 PARAMETER Experiment Name: Zm_5mM_NO_P Parameter: Tissue Value: Aerial
  misc_feature: MA Experiment 108527 PARAMETER Experiment Name: Zm_5mM_NO_P Parameter: Treatment Value: 5mM NO vs. No Treatment
  misc_feature: MA Experiment ID: 20000488 Result: Up-regulated in Transcription
  misc_feature: MA Experiment 20000488 PARAMETER Experiment Name: Zm_50mM_NH4NO3_L_to_H_P Parameter: Organism Value: Zea mays
  misc_feature: MA Experiment 20000488 PARAMETER Experiment Name: Zm_50mM_NH4NO3_L_to_H_P Parameter: Timepoint (hr) Value: 8
  misc_feature: MA Experiment 20000488 PARAMETER Experiment Name: Zm_50mM_NH4NO3_L_to_H_P Parameter: Tissue Value: Leaves
  misc_feature: MA Experiment 20000488 PARAMETER Experiment Name: Zm_50mM_NH4NO3_L_to_H_P Parameter: Treatment Value: 50mM NH4NO3 vs. 100mM Mannitol
  misc_feature: MA Experiment ID: 20000535 Result: Down-regulated in Transcription
  misc_feature: MA Experiment 20000535 PARAMETER Experiment Name: Zm_Hybrid_Seed_Dev_P Parameter: DAP Value: 30 vs. 12
  misc_feature: MA Experiment 20000535 PARAMETER Experiment Name: Zm_Hybrid_Seed_Dev_P Parameter: Organism Value: Zea mays
  misc_feature: MA Experiment 20000535 PARAMETER Experiment Name: Zm_Hybrid_Seed_Dev_P Parameter: Plant Line Value: 35A19
  misc_feature: MA Experiment 20000535 PARAMETER Experiment Name: Zm_Hybrid_Seed_Dev_P Parameter: Tissue Value: Embryo vs. Unfert Floret
aatcccccgccgcgttcccccgcacgctttgacccataaagtcgatccatctccgagcaccaagttgaacacgcgatcccattcccattctcttgctcaatacaacctccggcttcagcaagccgcagcgccaagcctagaagcggagcgcggaacacacgaggccaggaagaggaggtgctgccgtccccgcgccgccgctgtgggagtgcggggaatggggcggcacggcgtggaccagatcggcgctgtggcagcgttcgtctgggtcaccctccttcccttgctgcttgtgtgcgtcgtgtggccgggcgcccaggccggccatacaagcgagtaccggcgccaactcggctccgccatcgacatgccactcgacgccgatgtcttccgccctccctcgggctacaatgcgcccgagcaggttcacatcacacaaggcaatcatgatggcacagccatgataatctcatgggtgacaacaagtgagcctggctcgagtactgtgatctacgggacttcagaggataacctcaactatactgcaaatgggaagcatactcagtatactttctacaactacacctcaggatacattcatcattgcacaataaaaaagttggagtttgacacactattactatgctgttgggattggacaaactgtgaggaagttttggtttttgacccctccaaaaagcggcccagatgttccatatacactcggtctcataggtgatcttggtcagagctttgattccaatgttacgctcacccattatgagtccaatgcaaaagcacagggagttctttttgttggggacttgtcatatgcagataactacccatatcatgataatgtgagatgggatacgtgggcaagatttgtagaaaggagcgtcgcgtaccagccttggatctggactgctggaaatcatgagatagatttcgctcctgaacttggtgaaacaaagccattcaagccattcagccataggtaccccacaccctacaaggcttctggtagcacggcaccttattggtattccatcaaaagggcctctgcctacattattgtcttggcatcgtactcagcatacggcaaatacactcctcagtacaagtggcttgaagctgaatttcccaaggtcaacaggagtgaaacgccatggttggttgtcctcatgcatgctccatggtacaatagctataactatcactacatggaaggtgaaaccatgagggtgatgtatgagccatggttcgtgaagtacaaagttgacgttgtgtttgcaggacatgtccacgcctacgaacgcacacacaggatatcgaatgtcgcatacaatgttgtgaatggcctgtgcactccaatccctgatcaatcggccccagtttacatcaccatcggtgatggagggaaccaggaaggattggctaccaacatgtcgcagccgcagccgagctactcggccttcagggaggcgagcttcgggcacgccatcctggacatcaagaaccggacacaccgcgtactacacgtggcaccgcaacccaggacgggagcgcggtggccgccgactccatgtggtttaccaatcggtactgggaaccgacggacgattcggccgacgatttccagtgaggacgagagctgcagctgggttggttattcgttgcggttcctcacgaccaataagcatcgccctgaatacacgaagcctccgaagctccgatgcaggcctctgccacttcttatagctctccttggtcgttgcccgtcttctcttggagagagaaaaaaacgtgtgaagagtaaaacggagtgtctctactctgattgtgtaaagaactcacgttcacagcg

SEQ ID NO: 5558 - protein, 245 aa, Zea mays subsp. mays
  peptide (1)..(245): Ceres Seq. ID no. 12595059
  misc_feature (78)..(211): Homolog of NCBI NO: 34910020 NR Description: putative purple acid phosphatase [Oryza sativa
  misc_feature (92)..(211): Homolog of NCBI NO: 11262827 NR Description: acid phosphatase (EC 3.1.3.2) purple 1, precursor
  misc_feature (73)..(211): Homolog of NCBI NO: 27597229 NR Description: purple acid phosphatase [Nicotiana tabacum]
  misc_feature (92)..(211): Homolog of NCBI NO: 11262828 NR Description: acid phosphatase (EC 3.1.3.2) purple 2, precursor
  misc_feature (95)..(211): Homolog of NCBI NO: 15227205 NR Description: putative purple acid phosphatase precursor; id: At2g16430.1, supported by cDNA: gi_20257482, supported by gi_20260673 [Arabidopsis thaliana] >gi|25752261|pir||B84540 acid
  misc_feature (108)..(211): Homolog of NCBI NO: 11262830 NR Description: acid phosphatase (EC 3.1.3.2) purple PAP32,
  misc_feature (78)..(211): Homolog of NCBI NO: 34910020 NR Description: putative purple acid phosphatase [Oryza sativa
  misc_feature (92)..(211): Homolog of NCBI NO: 11262827 NR Description: acid phosphatase (EC 3.1.3.2) purple 1, precursor
  misc_feature (73)..(211): Homolog of NCBI NO: 27597229 NR Description: purple acid phosphatase [Nicotiana tabacum]
  misc_feature (92)..(211): Homolog of NCBI NO: 11262828 NR Description: acid phosphatase (EC 3.1.3.2) purple 2, precursor
  misc_feature (95)..(211): Homolog of NCBI NO: 15227205 NR Description: putative purple acid phosphatase precursor; id: At2g16430.1, supported by cDNA: gi_20257482, supported by gi_20260673 [Arabidopsis thaliana] >gi|25752261|pir||B84540 acid
  misc_feature (108)..(211): Homolog of NCBI NO: 11262830 NR Description: acid phosphatase (EC 3.1.3.2) purple PAP32,
IPRRVPPHALTHKVDPSPSTKLNTRSHSHSLAQYNLRLQQAAAPSLEAERGTHEARKRRCCRPRAAAVGVRGMGRHGVDQIGAVAAFVWVTLLPLLLVCVVWPGAQAGHTSEYRRQLGSAIDMPLDADVFRPPSGYNAPEQVHITQGNHDGTAMIISWVTTSEPGSSTVIYGTSEDNLNYTANGKHTQYTFYNYTSGYIHHCTIKKLEFDTLLLCCWDWTNCEEVLVFDPSKKRPRCSIYTRSHR

SEQ ID NO: 5559 - protein, 227 aa, Zea mays subsp. mays
  peptide (1)..(227): Ceres Seq. ID no. 12595060
  misc_feature (1)..(115): Homolog of NCBI NO: 34910020 NR Description: putative purple acid phosphatase [Oryza sativa
  misc_feature (1)..(115): Homolog of NCBI NO: 11262827 NR Description: acid phosphatase (EC 3.1.3.2) purple 1, precursor
  misc_feature (1)..(115): Homolog of NCBI NO: 27597229 NR Description: purple acid phosphatase [Nicotiana tabacum]
  misc_feature (1)..(115): Homolog of NCBI NO: 11262828 NR Description: acid phosphatase (EC 3.1.3.2) purple 2, precursor
  misc_feature (1)..(115): Homolog of NCBI NO: 15227205 NR Description: putative purple acid phosphatase precursor; id: At2g16430.1, supported by cDNA: gi_20257482, supported by gi_20260673 [Arabidopsis thaliana] >gi|25752261|pir||B84540 acid
  misc_feature (1)..(115): Homolog of NCBI NO: 11262830 NR Description: acid phosphatase (EC 3.1.3.2) purple PAP32,
  misc_feature (1)..(115): Homolog of NCBI NO: 34910020 NR Description: putative purple acid phosphatase [Oryza sativa
  misc_feature (1)..(115): Homolog of NCBI NO: 11262827 NR Description: acid phosphatase (EC 3.1.3.2) purple 1, precursor
  misc_feature (1)..(115): Homolog of NCBI NO: 27597229 NR Description: purple acid phosphatase [Nicotiana tabacum]
  misc_feature (1)..(115): Homolog of NCBI NO: 11262828 NR Description: acid phosphatase (EC 3.1.3.2) purple 2, precursor
  misc_feature (1)..(115): Homolog of NCBI NO: 15227205 NR Description: putative purple acid phosphatase precursor; id: At2g16430.1, supported by cDNA: gi_20257482, supported by gi_20260673 [Arabidopsis thaliana] >gi|25752261|pir||B84540 acid
  misc_feature (1)..(115): Homolog of NCBI NO: 11262830 NR Description: acid phosphatase (EC 3.1.3.2) purple PAP32,
MHAPWYNSYNYHYMEGETMRVMYEPWFVKYKVDVVFAGHVHAYERTHRISNVAYNVVNGLCTPIPDQSAPVYITIGDGGNQEGLATNMSQPQPSYSAFREASFGHAILDIKNRTHRVLHVAPQPRTGARWPPTPCGLPIGTGNRRTIRPTISSEDESCSWVGYSLRFLTTNKHRPEYTKPPKLRCRPLPLLIALLGRCPSSLGERKKRVKSKTECLYSDCVKNSRSQ

SEQ ID NO: 5560 - protein, 214 aa, Zea mays subsp. mays
  peptide (1)..(214): Ceres Seq. ID no. 12595061
  misc_feature (1)..(102): Homolog of NCBI NO: 34910020 NR Description: putative purple acid phosphatase [Oryza sativa
  misc_feature (1)..(102): Homolog of NCBI NO: 11262827 NR Description: acid phosphatase (EC 3.1.3.2) purple 1, precursor
  misc_feature (1)..(102): Homolog of NCBI NO: 27597229 NR Description: purple acid phosphatase [Nicotiana tabacum]
  misc_feature (1)..(102): Homolog of NCBI NO: 11262828 NR Description: acid phosphatase (EC 3.1.3.2) purple 2, precursor
  misc_feature (1)..(102): Homolog of NCBI NO: 15227205 NR Description: putative purple acid phosphatase precursor; id: At2g16430.1, supported by cDNA: gi_20257482, supported by gi_20260673 [Arabidopsis thaliana] >gi|25752261|pir||B84540 acid
  misc_feature (1)..(102): Homolog of NCBI NO: 11262830 NR Description: acid phosphatase (EC 3.1.3.2) purple PAP32,
  misc_feature (1)..(102): Homolog of NCBI NO: 34910020 NR Description: putative purple acid phosphatase [Oryza sativa
  misc_feature (1)..(102): Homolog of NCBI NO: 11262827 NR Description: acid phosphatase (EC 3.1.3.2) purple 1, precursor
  misc_feature (1)..(102): Homolog of NCBI NO: 27597229 NR Description: purple acid phosphatase [Nicotiana tabacum]
  misc_feature (1)..(102): Homolog of NCBI NO: 11262828 NR Description: acid phosphatase (EC 3.1.3.2) purple 2, precursor
  misc_feature (1)..(102): Homolog of NCBI NO: 15227205 NR Description: putative purple acid phosphatase precursor; id: At2g16430.1, supported by cDNA: gi_20257482, supported by gi_20260673 [Arabidopsis thaliana] >gi|25752261|pir||B84540 acid
  misc_feature (1)..(102): Homolog of NCBI NO: 11262830 NR Description: acid phosphatase (EC 3.1.3.2) purple PAP32,
MEGETMRVMYEPWFVKYKVDVVFAGHVHAYERTHRISNVAYNVVNGLCTPIPDQSAPVYITIGDGGNQEGLATNMSQPQPSYSAFREASFGHAILDIKNRTHRVLHVAPQPRTGARWPPTPCGLPIGTGNRRTIRPTISSEDESCSWVGYSLRFLTTNKHRPEYTKPPKLRCRPLPLLIALLGRCPSSLGERKKRVKSKTECLYSDCVKNSRSQ

SEQ ID NO: 5561 - protein, 173 aa, Zea mays subsp. mays
  peptide (1)..(173): Ceres Seq. ID no. 12595062
  misc_feature (6)..(139): Homolog of NCBI NO: 34910020 NR Description: putative purple acid phosphatase [Oryza sativa
  misc_feature (20)..(139): Homolog of NCBI NO: 11262827 NR Description: acid phosphatase (EC 3.1.3.2) purple 1, precursor
  misc_feature (1)..(139): Homolog of NCBI NO: 27597229 NR Description: purple acid phosphatase [Nicotiana tabacum]
  misc_feature (20)..(139): Homolog of NCBI NO: 11262828 NR Description: acid phosphatase (EC 3.1.3.2) purple 2, precursor
  misc_feature (23)..(139): Homolog of NCBI NO: 15227205 NR Description: putative purple acid phosphatase precursor; id: At2g16430.1, supported by cDNA: gi_20257482, supported by gi_20260673 [Arabidopsis thaliana] >gi|25752261|pir||B84540 acid
  misc_feature (36)..(139): Homolog of NCBI NO: 11262830 NR Description: acid phosphatase (EC 3.1.3.2) purple PAP32,
  misc_feature (6)..(139): Homolog of NCBI NO: 34910020 NR Description: putative purple acid phosphatase [Oryza sativa
  misc_feature (20)..(139): Homolog of NCBI NO: 11262827 NR Description: acid phosphatase (EC 3.1.3.2) purple 1, precursor
  misc_feature (1)..(139): Homolog of NCBI NO: 27597229 NR Description: purple acid phosphatase [Nicotiana tabacum]
  misc_feature (20)..(139): Homolog of NCBI NO: 11262828 NR Description: acid phosphatase (EC 3.1.3.2) purple 2, precursor
  misc_feature (23)..(139): Homolog of NCBI NO: 15227205 NR Description: putative purple acid phosphatase precursor; id: At2g16430.1, supported by cDNA: gi_20257482, supported by gi_20260673 [Arabidopsis thaliana] >gi|25752261|pir||B84540 acid
  misc_feature (36)..(139): Homolog of NCBI NO: 11262830 NR Description: acid phosphatase (EC 3.1.3.2) purple PAP32,
MGRHGVDQIGAVAAFVWVTLLPLLLVCVVWPGAQAGHTSEYRRQLGSAIDMPLDADVFRPPSGYNAPEQVHITQGNHDGTAMIISWVTTSEPGSSTVIYGTSEDNLNYTANGKHTQYTFYNYTSGYIHHCTIKKLEFDTLLLCCWDWTNCEEVLVFDPSKKRPRCSIYTRSHR

SEQ ID NO: 5562 - DNA, 1811 bp, Zea mays subsp. mays
  misc_feature (1)..(1811): Ceres Seq. ID no. 12406923
  misc_feature: MA Experiment ID: 108528 Result: Down-regulated in Transcription
  misc_feature: MA Experiment 108528 PARAMETER Experiment Name: Zm_Imbibed_Seeds_P Parameter: Age (day) Value: 5 vs. 2
  misc_feature: MA Experiment 108528 PARAMETER Experiment Name: Zm_Imbibed_Seeds_P Parameter: Organism Value: Zea mays
  misc_feature: MA Experiment 108528 PARAMETER Experiment Name: Zm_Imbibed_Seeds_P Parameter: Plant Line Value: 35A19
  misc_feature: MA Experiment 108528 PARAMETER Experiment Name: Zm_Imbibed_Seeds_P Parameter: Tissue Value: Aerial vs. Embryo
  misc_feature: MA Experiment ID: 108535 Result: Up-regulated in Transcription
  misc_feature: MA Experiment 108535 PARAMETER Experiment Name: Zm_Meristem_P Parameter: Age (day) Value: 8
  misc_feature: MA Experiment 108535 PARAMETER Experiment Name: Zm_Meristem_P Parameter: Organism Value: Zea mays
  misc_feature: MA Experiment 108535 PARAMETER Experiment Name: Zm_Meristem_P Parameter: Plant Line Value: 35A19
  misc_feature: MA Experiment 108535 PARAMETER Experiment Name: Zm_Meristem_P Parameter: Tissue Value: Root Meristem vs. Above Root Meristem
ctcttctagtcgcctctacccagttacttgcatcgccccgtcaagcacgccgccggcacgcggccctcggtctccccgccgcgccctctgcctccgcccgaacaaagccgtctcgccgtcgcgttgccttccttaccgtccaccgcgggcagccgtcctagtactcggttggtcctcccctgctgcccttctacggtggaggagcggagatcctgccgttttccggctgatttcttctaattgcggggcaagttccgtggatagtcaatactgcttgtgctgttgagctaatattaagttcctgctgggagaacttctgcagttcctatggcaaagcctctcaatggcagtggccgtagcatgccaagatcgaatgagggaatgcggctcatattttcggcagttgtaggtgtcatgctgggttacctgtttgggatctccttccctacagtcaacataaccaagcttcacttcccttcgagtatcatctcttatatcgaagataggaactctggcatcacaacccagacattgttgaaccatgcttgggcatctgcaaacaatcataaaaagaatagttctgaatctaacactgatgaaattcccgagatttatgttcctacaaacccaaaaggtgctgagagacttccaccaggcattgtagtgtctgaaacagatctttatccccgaagactatggggtgatcctagtgaggaccttactagcgagccgaggtatcttgttacttttactgttggtattgggcaaaaggcaaatattgatgcagcggtcagaaagttttcagacaaattcaccattatgttgttccattatgatggtcggactacagagtgggatgaatttgagtggtctaaaagagcaatccatgtgagtgccaggaagcagacaaaatggtggtatgcaaaacgatttttgcatcccgatgttgttgccagatatgattacattttcatctgggatgaggatctaggtgtagagcatttcaacgcagagaagtacattgagcttgttagaaagcatgggttggaaatctctcagcctggtttgcaacctgatagaggactaacatggcaaatgactaaacggcgtggtgaccaggaagttcacaaagtaactgaggagagaccaggctggtgcactgatccacatctaccaccatgtgcagcatttgttgagattatggcaacagtgttctccagaaatgcatggcgctgtgtatggcatatgattcagaatgacttggtccatggatggggtcttgactttgctcttagaaaatgtgtggagccggctcatgagaaaattggagttgttgatgctcaatggattgttcatcaatcagttccttcacttggcaaccagggcaagtcagataatggaagaccaccatgggaaggggtaagagcacgctgcagaaaagaatgggggatatttcagacaaggctggctgatgcggagaaggcttattacttggagcgaggcatcacacccccgaactcaacatcagtttagatgaacacatgctcctcagatgccacggcaaggtttctgttgggggaacctgctgcaaactggcatgttcatcgaagctgctgcagcccagggcaaatccatatatttgtacattagaggtcccacgaatcgccatgattaatctttagtgtcgctcacctggttttaatgtcatttcttttgttagtgatactagctgcgatgtaagtaggaggatacagcagagaccgtgatgatacccatttgtgtattaatgacctgatgcaatatggatgttg

SEQ ID NO: 5563 - protein, 401 aa, Zea mays subsp. mays
  peptide (1)..(401): Ceres Seq. ID no. 12406924
  misc_feature (94)..(387): Pfam Name: Protein of unknown function (DUF707) Pfam Description: Protein of unknown function (DUF707)
  misc_feature (9)..(397): Homolog of NCBI NO: 34906848 NR Description: P0470A12.1 [Oryza sativa (japonica
  misc_feature (10)..(401): Homolog of NCBI NO: 14719314 NR Description: putative protein [Oryza sativa]
  misc_feature (45)..(401): Homolog of NCBI NO: 34905994 NR Description: P0518C01.8 [Oryza sativa (japonica
  misc_feature (14)..(400): Homolog of NCBI NO: 18408876 NR Description: F12A21.2; protein id: At1g67850.1, supported by gi_14326581 [Arabidopsis thaliana] At1g67850/F12A21_2 [Arabidopsis thaliana]
  misc_feature (12)..(388): Homolog of NCBI NO: 22331371 NR Description: unknown protein; protein id: At3g27470.1, by cDNA: gi_19698930 [Arabidopsis thaliana] unknown protein [Arabidopsis thaliana]
  misc_feature (14)..(387): Homolog of NCBI NO: 18390845 NR Description: storage protein, putative; protein id: supported by cDNA: gi_15810566, supported by cDNA: gi_20259568 thaliana] >gi|15810567|gb|AAL07171.1| putative storage protein
  misc_feature (94)..(387): Homolog of NCBI NO: 25407018 NR Description: protein T6D22.12 [imported] - Arabidopsis >gi|8778842|gb|AAF79841.1|AC026875_21 T6D22.12 [Arabidopsis
  misc_feature (7)..(48): Homolog of NCBI NO: 25407018 NR Description: protein T6D22.12 [imported] - Arabidopsis >gi|8778842|gb|AAF79841.1|AC026875_21 T6D22.12 [Arabidopsis
  misc_feature (1)..(390): Homolog of NCBI NO: 22329525 NR Description: unknown protein; protein id: At1g13000.1, by cDNA: gi_18175818, supported by cDNA: gi_20465546 [Arabidopsis >gi|18175819|gb|AAL59933.1| unknown protein [Arabidopsis
  misc_feature (92)..(292): Homolog of NCBI NO: 7939519 NR Description: gb|AAD31054.1~gene_id:K1G2.18~strong similarity
MAKPLNGSGRSMPRSNEGMRLIFSAVVGVMLGYLFGISFPTVNITKLHFPSSIISYIEDRNSGITTQTLLNHAWASANNHKKNSSESNTDEIPEIYVPTNPKGAERLPPGIVVSETDLYPRRLWGDPSEDLTSEPRYLVTFTVGIGQKANIDAAVRKFSDKFTIMLFHYDGRTTEWDEFEWSKRAIHVSARKQTKWWYAKRFLHPDVVARYDYIFIWDEDLGVEHFNAEKYIELVRKHGLEISQPGLQPDRGLTWQMTKRRGDQEVHKVTEERPGWCTDPHLPPCAAFVEIMATVFSRNAWRCVWHMIQNDLVHGWGLDFALRKCVEPAHEKIGVVDAQWIVHQSVPSLGNQGKSDNGRPPWEGVRARCRKEWGIFQTRLADAEKAYYLERGITPPNSTSV

SEQ ID NO: 5564 - protein, 390 aa, Zea mays subsp. mays
  peptide (1)..(390): Ceres Seq. ID no. 12406925
  misc_feature (83)..(376): Pfam Name: Protein of unknown function (DUF707) Pfam Description: Protein of unknown function (DUF707)
  misc_feature (1)..(386): Homolog of NCBI NO: 34906848 NR Description: P0470A12.1 [Oryza sativa (japonica
  misc_feature (1)..(390): Homolog of NCBI NO: 14719314 NR Description: putative protein [Oryza sativa]
  misc_feature (34)..(390): Homolog of NCBI NO: 34905994 NR Description: P0518C01.8 [Oryza sativa (japonica
  misc_feature (3)..(389): Homolog of NCBI NO: 18408876 NR Description: F12A21.2; protein id: At1g67850.1, supported by gi_14326581 [Arabidopsis thaliana] At1g67850/F12A21_2 [Arabidopsis thaliana]
  misc_feature (1)..(377): Homolog of NCBI NO: 22331371 NR Description: unknown protein; protein id: At3g27470.1, by cDNA: gi_19698930 [Arabidopsis thaliana] unknown protein [Arabidopsis thaliana]
  misc_feature (3)..(376): Homolog of NCBI NO: 18390845 NR Description: storage protein, putative; protein id: supported by cDNA: gi_15810566, supported by cDNA: gi_20259568 thaliana] >gi|15810567|gb|AAL07171.1| putative storage protein
  misc_feature (83)..(376): Homolog of NCBI NO: 25407018 NR Description: protein T6D22.12 [imported] - Arabidopsis >gi|8778842|gb|AAF79841.1|AC026875_21 T6D22.12 [Arabidopsis
  misc_feature (1)..(37): Homolog of NCBI NO: 25407018 NR Description: protein T6D22.12 [imported] - Arabidopsis >gi|8778842|gb|AAF79841.1|AC026875_21 T6D22.12 [Arabidopsis
  misc_feature (1)..(379): Homolog of NCBI NO: 22329525 NR Description: unknown protein; protein id: At1g13000.1, by cDNA: gi_18175818, supported by cDNA: gi_20465546 [Arabidopsis >gi|18175819|gb|AAL59933.1| unknown protein [Arabidopsis
  misc_feature (81)..(281): Homolog of NCBI NO: 7939519 NR Description: gb|AAD31054.1~gene_id:K1G2.18~strong similarity
MPRSNEGMRLIFSAVVGVMLGYLFGISFPTVNITKLHFPSSIISYIEDRNSGITTQTLLNHAWASANNHKKNSSESNTDEIPEIYVPTNPKGAERLPPGIVVSETDLYPRRLWGDPSEDLTSEPRYLVTFTVGIGQKANIDAAVRKFSDKFTIMLFHYDGRTTEWDEFEWSKRAIHVSARKQTKWWYAKRFLHPDVVARYDYIFIWDEDLGVEHFNAEKYIELVRKHGLEISQPGLQPDRGLTWQMTKRRGDQEVHKVTEERPGWCTDPHLPPCAAFVEIMATVFSRNAWRCVWHMIQNDLVHGWGLDFALRKCVEPAHEKIGVVDAQWIVHQSVPSLGNQGKSDNGRPPWEGVRARCRKEWGIFQTRLADAEKAYYLERGITPPNSTSV

SEQ ID NO: 5565 - protein, 383 aa, Zea mays subsp. mays
  peptide (1)..(383): Ceres Seq. ID no. 12406926
  misc_feature (76)..(369): Pfam Name: Protein of unknown function (DUF707) Pfam Description: Protein of unknown function (DUF707)
  misc_feature (1)..(372): Homolog of NCBI NO: 22329525 NR Description: unknown protein; protein id: At1g13000.1, by cDNA: gi_18175818, supported by cDNA: gi_20465546 [Arabidopsis >gi|18175819|gb|AAL59933.1| unknown protein [Arabidopsis
  misc_feature (1)..(379): Homolog of NCBI NO: 34906848 NR Description: P0470A12.1 [Oryza sativa (japonica
  misc_feature (27)..(383): Homolog of NCBI NO: 34905994 NR Description: P0518C01.8 [Oryza sativa (japonica
  misc_feature (1)..(370): Homolog of NCBI NO: 22331371 NR Description: unknown protein; protein id: At3g27470.1, by cDNA: gi_19698930 [Arabidopsis thaliana] unknown protein [Arabidopsis thaliana]
  misc_feature (76)..(369): Homolog of NCBI NO: 25407018 NR Description: protein T6D22.12 [imported] - Arabidopsis >gi|8778842|gb|AAF79841.1|AC026875_21 T6D22.12 [Arabidopsis
  misc_feature (1)..(30): Homolog of NCBI NO: 25407018 NR Description: protein T6D22.12 [imported] - Arabidopsis >gi|8778842|gb|AAF79841.1|AC026875_21 T6D22.12 [Arabidopsis
  misc_feature (1)..(369): Homolog of NCBI NO: 18390845 NR Description: storage protein, putative; protein id: supported by cDNA: gi_15810566, supported by cDNA: gi_20259568 thaliana] >gi|15810567|gb|AAL07171.1| putative storage protein
  misc_feature (1)..(382): Homolog of NCBI NO: 18408876 NR Description: F12A21.2; protein id: At1g67850.1, supported by gi_14326581 [Arabidopsis thaliana] At1g67850/F12A21_2 [Arabidopsis thaliana]
  misc_feature (1)..(383): Homolog of NCBI NO: 14719314 NR Description: putative protein [Oryza sativa]
  misc_feature (74)..(274): Homolog of NCBI NO: 7939519 NR Description: gb|AAD31054.1~gene_id:K1G2.18~strong similarity
MRLIFSAVVGVMLGYLFGISFPTVNITKLHFPSSIISYIEDRNSGITTQTLLNHAWASANNHKKNSSESNTDEIPEIYVPTNPKGAERLPPGIVVSETDLYPRRLWGDPSEDLTSEPRYLVTFTVGIGQKANIDAAVRKFSDKFTIMLFHYDGRTTEWDEFEWSKRAIHVSARKQTKWWYAKRFLHPDVVARYDYIFIWDEDLGVEHFNAEKYIELVRKHGLEISQPGLQPDRGLTWQMTKRRGDQEVHKVTEERPGWCTDPHLPPCAAFVEIMATVFSRNAWRCVWHMIQNDLVHGWGLDFALRKCVEPAHEKIGVVDAQWIVHQSVPSLGNQGKSDNGRPPWEGVRARCRKEWGIFQTRLADAEKAYYLERGITPPNSTSV

SEQ ID NO: 5566 - DNA, 1057 bp, Zea mays subsp. mays
  misc_feature (1)..(1057): Ceres Seq. ID no. 13493461
  misc_feature: MA Experiment ID: 108528 Result: Down-regulated in Transcription
  misc_feature: MA Experiment 108528 PARAMETER Experiment Name: Zm_Imbibed_Seeds_P Parameter: Age (day) Value: 5 vs. 2
  misc_feature: MA Experiment 108528 PARAMETER Experiment Name: Zm_Imbibed_Seeds_P Parameter: Organism Value: Zea mays
  misc_feature: MA Experiment 108528 PARAMETER Experiment Name: Zm_Imbibed_Seeds_P Parameter: Plant Line Value: 35A19
  misc_feature: MA Experiment 108528 PARAMETER Experiment Name: Zm_Imbibed_Seeds_P Parameter: Tissue Value: Aerial vs. Embryo
  misc_feature: MA Experiment ID: 108529 Result: Up-regulated in Transcription
  misc_feature: MA Experiment 108529 PARAMETER Experiment Name: Zm_Imbibed_Seeds_P Parameter: Age (day) Value: 5 vs. 2
  misc_feature: MA Experiment 108529 PARAMETER Experiment Name: Zm_Imbibed_Seeds_P Parameter: Organism Value: Zea mays
  misc_feature: MA Experiment 108529 PARAMETER Experiment Name: Zm_Imbibed_Seeds_P Parameter: Plant Line Value: 35A19
  misc_feature: MA Experiment 108529 PARAMETER Experiment Name: Zm_Imbibed_Seeds_P Parameter: Tissue Value: Roots vs. Embryo
  misc_feature: MA Experiment ID: 108530 Result: Down-regulated in Transcription
  misc_feature: MA Experiment 108530 PARAMETER Experiment Name: Zm_Imbibed_Seeds_P Parameter: Age (day) Value: 6 vs. 2
  misc_feature: MA Experiment 108530 PARAMETER Experiment Name: Zm_Imbibed_Seeds_P Parameter: Organism Value: Zea mays
  misc_feature: MA Experiment 108530 PARAMETER Experiment Name: Zm_Imbibed_Seeds_P Parameter: Plant Line Value: 35A19
  misc_feature: MA Experiment 108530 PARAMETER Experiment Name: Zm_Imbibed_Seeds_P Parameter: Tissue Value: Aerial vs. Embryo
  misc_feature: MA Experiment ID: 108534 Result: Up-regulated in Transcription
  misc_feature: MA Experiment 108534 PARAMETER Experiment Name: Zm_4deg_Cold_P Parameter: Age (hr) Value: 8
  misc_feature: MA Experiment 108534 PARAMETER Experiment Name: Zm_4deg_Cold_P Parameter: Organism Value: Zea mays
  misc_feature: MA Experiment 108534 PARAMETER Experiment Name: Zm_4deg_Cold_P Parameter: Plant Line Value: 35A19
  misc_feature: MA Experiment 108534 PARAMETER Experiment Name: Zm_4deg_Cold_P Parameter: Temperature (deg C) Value: 4 vs. 22
  misc_feature: MA Experiment 108534 PARAMETER Experiment Name: Zm_4deg_Cold_P Parameter: Timepoint (hr) Value: 6
  misc_feature: MA Experiment 108534 PARAMETER Experiment Name: Zm_4deg_Cold_P Parameter: Tissue Value: Aerial
  misc_feature: MA Experiment ID: 108535 Result: Down-regulated in Transcription
  misc_feature: MA Experiment 108535 PARAMETER Experiment Name: Zm_Meristem_P Parameter: Age (day) Value: 8
  misc_feature: MA Experiment 108535 PARAMETER Experiment Name: Zm_Meristem_P Parameter: Organism Value: Zea mays
  misc_feature: MA Experiment 108535 PARAMETER Experiment Name: Zm_Meristem_P Parameter: Plant Line Value: 35A19
  misc_feature: MA Experiment 108535 PARAMETER Experiment Name: Zm_Meristem_P Parameter: Tissue Value: Root Meristem vs. Above Root Meristem
  misc_feature: MA Experiment ID: 108543 Result: Up-regulated in Transcription
  misc_feature: MA Experiment ID: 108544 Result: Down-regulated in Transcription
  misc_feature: MA Experiment ID: 108545 Result: Down-regulated in Transcription
  misc_feature: MA Experiment 108545 PARAMETER Experiment Name: Zm_Imbibed_Seeds_P Parameter: Age (day) Value: 3 vs. 2
  misc_feature: MA Experiment 108545 PARAMETER Experiment Name: Zm_Imbibed_Seeds_P Parameter: Organism Value: Zea mays
  misc_feature: MA Experiment 108545 PARAMETER Experiment Name: Zm_Imbibed_Seeds_P Parameter: Plant Line Value: 35A19
  misc_feature: MA Experiment 108545 PARAMETER Experiment Name: Zm_Imbibed_Seeds_P Parameter: Tissue Value: Aerial vs. Embryo
  misc_feature: MA Experiment ID: 108547 Result: Down-regulated in Transcription
  misc_feature: MA Experiment 108547 PARAMETER Experiment Name: Zm_Imbibed_Seeds_P Parameter: Age (day) Value: 4 vs. 2
  misc_feature: MA Experiment 108547 PARAMETER Experiment Name: Zm_Imbibed_Seeds_P Parameter: Organism Value: Zea mays
  misc_feature: MA Experiment 108547 PARAMETER Experiment Name: Zm_Imbibed_Seeds_P Parameter: Plant Line Value: 35A19
  misc_feature: MA Experiment 108547 PARAMETER Experiment Name: Zm_Imbibed_Seeds_P Parameter: Tissue Value: Aerial vs. Embryo
  misc_feature: MA Experiment ID: 108556 Result: Down-regulated in Transcription
  misc_feature: MA Experiment 108556 PARAMETER Experiment Name: Zm_Drought_P Parameter: Age (day) Value: 9
  misc_feature: MA Experiment 108556 PARAMETER Experiment Name: Zm_Drought_P Parameter: Organism Value: Zea mays
  misc_feature: MA Experiment 108556 PARAMETER Experiment Name: Zm_Drought_P Parameter: Plant Line Value: 35A19
  misc_feature: MA Experiment 108556 PARAMETER Experiment Name: Zm_Drought_P Parameter: Timepoint (hr) Value: 24
  misc_feature: MA Experiment 108556 PARAMETER Experiment Name: Zm_Drought_P Parameter: Tissue Value: Aerial
  misc_feature: MA Experiment 108556 PARAMETER Experiment Name: Zm_Drought_P Parameter: Treatment Value: Drought vs. No Drought
  misc_feature: MA Experiment ID: 108559 Result: Down-regulated in Transcription
  misc_feature: MA Experiment 108559 PARAMETER Experiment Name: Zm_5mM_NO_P Parameter: Age (day) Value: 8
  misc_feature: MA Experiment 108559 PARAMETER Experiment Name: Zm_5mM_NO_P Parameter: Organism Value: Zea mays
  misc_feature: MA Experiment 108559 PARAMETER Experiment Name: Zm_5mM_NO_P Parameter: Plant Line Value: 35A19
  misc_feature: MA Experiment 108559 PARAMETER Experiment Name: Zm_5mM_NO_P Parameter: Timepoint (hr) Value: 12
  misc_feature: MA Experiment 108559 PARAMETER Experiment Name: Zm_5mM_NO_P Parameter: Tissue Value: Aerial
  misc_feature: MA Experiment 108559 PARAMETER Experiment Name: Zm_5mM_NO_P Parameter: Treatment Value: 5mM NO vs. No Treatment
  misc_feature: MA Experiment ID: 108597 Result: Down-regulated in Transcription
  misc_feature: MA Experiment 108597 PARAMETER Experiment Name: Zm_100uM_ABA_P Parameter: Age (day) Value: 9
  misc_feature: MA Experiment 108597 PARAMETER Experiment Name: Zm_100uM_ABA_P Parameter: Organism Value: Zea mays
  misc_feature: MA Experiment 108597 PARAMETER Experiment Name: Zm_100uM_ABA_P Parameter: Plant Line Value: 35A19
  misc_feature: MA Experiment 108597 PARAMETER Experiment Name: Zm_100uM_ABA_P Parameter: Timepoint (hr) Value: 24
  misc_feature: MA Experiment 108597 PARAMETER Experiment Name: Zm_100uM_ABA_P Parameter: Tissue Value: Aerial
  misc_feature: MA Experiment 108597 PARAMETER Experiment Name: Zm_100uM_ABA_P Parameter: Treatment Value: 100uM ABA vs. No Treatment
  misc_feature: MA Experiment ID: 20000480 Result: Down-regulated in Transcription
  misc_feature: MA Experiment 20000480 PARAMETER Experiment Name: Zm_Drought_P Parameter: Age (day) Value: 11
  misc_feature: MA Experiment 20000480 PARAMETER Experiment Name: Zm_Drought_P Parameter: Organism Value: Zea mays
  misc_feature: MA Experiment 20000480 PARAMETER Experiment Name: Zm_Drought_P Parameter: Plant Line Value: 35A19
  misc_feature: MA Experiment 20000480 PARAMETER Experiment Name: Zm_Drought_P Parameter: Timepoint (hr) Value: 72
  misc_feature: MA Experiment 20000480 PARAMETER Experiment Name: Zm_Drought_P Parameter: Tissue Value: Aerial
  misc_feature: MA Experiment 20000480 PARAMETER Experiment Name: Zm_Drought_P Parameter: Treatment Value: Drought vs. No Drought
  misc_feature: MA Experiment ID: 20000626 Result: Down-regulated in Transcription
  misc_feature: MA Experiment 20000626 PARAMETER Experiment Name: Zm_Herbicide-Treatments_P Parameter: Timepoint (hr) Value: 12
  misc_feature: MA Experiment 20000626 PARAMETER Experiment Name: Zm_Herbicide-Treatments_P Parameter: Tissue Value: Aerial
  misc_feature: MA Experiment 20000626 PARAMETER Experiment Name: Zm_Herbicide-Treatments_P Parameter: Treatment Value: Roundup vs. No Treatment
ggtgccccccacccccacccccacccccaccccgtgtgtgcgcggaaatgtcgccgacgaagtcatcgtgcctcgcggacgccggcgcggagccgttccgggtgttcgtgggctacgactcccgcgaggacgtggcgtaccgcgtgtgccggcgctcccttctgcgccgctcgtccatcccgctggagatcaccccgatcgtgcagcaggagctccgcgaggcggggctgtactggcgggagcgcggcccgacggagagcaccgagttctccttcacccgcttcctgacgccctacctggcggggtaccgcgggtgggcgctgttcgtggactgcgacttcctgttcgtggccgacgtagccgggctggtggcgctggcgcgcgccgacccgcggcgcgcggtgctgtgcgtgcaccacgactacacgcccacggaggccaccaagatggacggcgccgtgcagacggcgtaccctcgcaagaactggtcctccatggtgctcttcaactgcggccaccccaagaaccgcgccgcgctcacgccggaggccgtcagcacgcgcagccggtgcgtacctgcaccgcttcatgtggctcgacgaccgacgagatcggcgaggtgccgttcgtgtggaacttcctcgtggggcacaaccgcgtcgaccccgccgacgaggctggcacggcgccgcgcgctatacactacacgtccggcgggccgtggttcgataggtacaaggactgcgaattcgccgacctctgggtccaggagcgcgacgcctacgaggtcgacaaggacgtggatgatggatccatgcccatacgagaggcacctgcaatggtgtcggtggatgcacgcgattgagacggtcgaccatctccctgctgcccacgcgcgcggtcgtgtgctgtttgttgtttacgttgtgtgctgtctcctgtgcgcgcgcgcgctaccagtgtagtaccagtaccacatgtccatgtccatgcatgtactgtctgtcacgttggtgcgttatcgatggtagaataaagaggcgaccgttgcatgccc

SEQ ID NO: 5567 - protein, 320 aa, Zea mays subsp. mays
  peptide (1)..(320): Ceres Seq. ID no. 13493462
  misc_feature (29)..(188): Homolog of NCBI NO: 34903402 NR Description: hypothetical protein~similar to Oryza sativa
  misc_feature (30)..(188): Homolog of NCBI NO: 37536068 NR Description: unknown protein [Oryza sativa (japonica
  misc_feature (30)..(188): Homolog of NCBI NO: 15217806 NR Description: expressed protein [Arabidopsis thaliana]
  misc_feature (34)..(169): Homolog of NCBI NO: 16264294 NR Description: conserved hypothetical protein [Sinorhizobium
  misc_feature (30)..(186): Homolog of NCBI NO: 33864181 NR Description: conserved hypothetical protein [Prochlorococcus str. MIT 9313] >gi|33635765|emb|CAE22090.1| conserved
  misc_feature (31)..(188): Homolog of NCBI NO: 33864719 NR Description: conserved hypothetical protein [Synechococcus sp.
CPPPPPPPPPRVCAEMSPTKSSCLADAGAEPFRVFVGYDSREDVAYRVCRRSLLRRSSIPLEITPIVQQELREAGLYWRERGPTESTEFSFTRFLTPYLAGYRGWALFVDCDFLFVADVAGLVALARADPRRAVLCVHHDYTPTEATKMDGAVQTAYPRKNWSSMVLFNCGHPKNRAALTPEAVSTRSRCVPAPLHVARRPTRSARCRSCGTSSWGTTASTPPTRLARRRALYTTRPAGRGSIGTRTANSPTSGSRSATPTRSTRTWMMDPCPYERHLQWCRWMHAIETVDHLPAAHARGRVLFVVYVVCCLLCARALPV

SEQ ID NO: 5568 - protein, 305 aa, Zea mays subsp. mays
  peptide (1)..(305): Ceres Seq. ID no. 13493463
  misc_feature (14)..(173): Homolog of NCBI NO: 34903402 NR Description: hypothetical protein~similar to Oryza sativa
  misc_feature (15)..(173): Homolog of NCBI NO: 37536068 NR Description: unknown protein [Oryza sativa (japonica
  misc_feature (15)..(173): Homolog of NCBI NO: 15217806 NR Description: expressed protein [Arabidopsis thaliana]
  misc_feature (19)..(154): Homolog of NCBI NO: 16264294 NR Description: conserved hypothetical protein [Sinorhizobium
  misc_feature (15)..(171): Homolog of NCBI NO: 33864181 NR Description: conserved hypothetical protein [Prochlorococcus str. MIT 9313] >gi|33635765|emb|CAE22090.1| conserved
  misc_feature (16)..(173): Homolog of NCBI NO: 33864719 NR Description: conserved hypothetical protein [Synechococcus sp.
MSPTKSSCLADAGAEPFRVFVGYDSREDVAYRVCRRSLLRRSSIPLEITPIVQQELREAGLYWRERGPTESTEFSFTRFLTPYLAGYRGWALFVDCDFLFVADVAGLVALARADPRRAVLCVHHDYTPTEATKMDGAVQTAYPRKNWSSMVLFNCGHPKNRAALTPEAVSTRSRCVPAPLHVARRPTRSARCRSCGTSSWGTTASTPPTRLARRRALYTTRPAGRGSIGTRTANSPTSGSRSATPTRSTRTWMMDPCPYERHLQWCRWMHAIETVDHLPAAHARGRVLFVVYVVCCLLCARALPV

SEQ ID NO: 5569 - protein, 287 aa, Zea mays subsp. mays
  peptide (1)..(287): Ceres Seq. ID no. 13493464
  misc_feature (203)..(269): Homolog of NCBI NO: 34903402 NR Description: hypothetical protein~similar to Oryza sativa
  misc_feature (202)..(266): Homolog of NCBI NO: 37536068 NR Description: unknown protein [Oryza sativa (japonica
  misc_feature (202)..(269): Homolog of NCBI NO: 15217806 NR Description: expressed protein [Arabidopsis thaliana]
  misc_feature (202)..(259): Homolog of NCBI NO: 16264294 NR Description: conserved hypothetical protein [Sinorhizobium
  misc_feature (203)..(259): Homolog of NCBI NO: 33864181 NR Description: conserved hypothetical protein [Prochlorococcus str. MIT 9313] >gi|33635765|emb|CAE22090.1| conserved
VPPTPTPTPTPCVRGNVADEVIVPRGRRRGAVPGVRGLRLPRGRGVPRVPALPSAPLVHPAGDHPDRAAGAPRGGAVLAGARPDGEHRVLLHPLPDALPGGVPRVGAVRGLRLPVRGRRSRAGGAGARRPAARGAVRAPRLHAHGGHQDGRRRADGVPSQELVLHGALQLRPPQEPRRAHAGGRQHAQPVRTCTASCGSTTDEIGEVPFVWNFLVGHNRVDPADEAGTAPRAIHYTSGGPWFDRYKDCEFADLWVQERDAYEVDKDVDDGSMPIREAPAMVSVDARD

SEQ ID NO: 5570 - DNA, 1804 bp, Zea mays subsp. mays
  misc_feature (1)..(1804): Ceres Seq. ID no. 12405615
  misc_feature: MA Experiment ID: 108543 Result: Up-regulated in Transcription
  misc_feature: MA Experiment ID: 108689 Result: Down-regulated in Transcription
  misc_feature: MA Experiment 108689 PARAMETER Experiment Name: Zm_Drought_Roots_P Parameter: Age (day) Value: 9
  misc_feature: MA Experiment 108689 PARAMETER Experiment Name: Zm_Drought_Roots_P Parameter: Organism Value: Zea mays
  misc_feature: MA Experiment 108689 PARAMETER Experiment Name: Zm_Drought_Roots_P Parameter: Plant Line Value: 35A19
  misc_feature: MA Experiment 108689 PARAMETER Experiment Name: Zm_Drought_Roots_P Parameter: Timepoint (hr) Value: 24
  misc_feature: MA Experiment 108689 PARAMETER Experiment Name: Zm_Drought_Roots_P Parameter: Tissue Value: Roots
  misc_feature: MA Experiment 108689 PARAMETER Experiment Name: Zm_Drought_Roots_P Parameter: Treatment Value: Drought vs. No Drought
ggaaccgtcaggccgtgaagagcctgcggttcgatctgctgcaagagctcctcgtcgatctcttcttctctgcgaggtttcggtctgagttaccacattgctggagtggaggtatggcgtattctggacaaaggcatgctggtgttgggagctcctcgaggccagcgaatggattcaagggggcagccaactcggtggagttcctgggtagggagatgctgggaatgcgactgagggatgccaagcccgacacagatgatgaaagggagatgtggtcaagttcagatgtgactgatagttctagtaatgaagctggtcatgtaatagcgactactgttcacgggcgcaacggcctgcctaaacagtctgtcacatacatcgctgaacatgtggttggaactggttcttttggggttgtgtatcaggcaaaatgccgagaaacaggggaaattgttgccataaaaaaggttcttcaagataagcgttataagaacagagagctgcaaatcatgcatatgcttgaccatcctaacatcatcggtcttaagcattacttcttttcaacaactgaaagggatgagctttatctcaaccttgttcttgagtttgttccagagacagtaaacaggattgcaaggcagtacaatcgaatgaatcagcggatgcccctcatttatgtcaaactgtacacgtatcagatatgccgagcgcttgcttatatacataactgcattggcatctgccaccgtgatatcaaaccgcagaatgttcttgttaacccacatacacaccaactcaaaatttgcgatttcggaagtgctaaagtattggtcagaggagagccaaacatctcctacatatgctcaaggtattatcgagcaccagagctcatatttggtgcaacggaatatactactgctattgatttgtggtcaacaggctgtgtcatggcagagctgcttctaggacagcctctgtttcctggagaaagtggagtcgaccaactagttgagatcatcaaggttttgggtactccaacaagggaagagatcaagtgcatgaacccaaactacacggagttcaagttcccacaaattaaagctcatccgtggcacaaggtttttcaaagaaggcttccacctgaagcagtggaccttgttagcaggtttctacaatactcaccaaatctacggtgcactgctttggaggcctgtatgcaccctttcttcgatgagctgagagacccaaacactcgtctacccaatggtcggcctctgccgcctctcttcaacttcagatctcaagagctaaaaggcgttcccccagaagtcatcgatcgccttgtcccagagcactcaagaaggcagagtttgttcatggcgctaaggacctagtttttgccgttctttttgcccccctttttcccaccgtttgccaccttgagggaagcttgtaaagctatagcttctcctttcccctcgtccttacttgcccccccccctctctctttcttccgagctttgtgtggatgagagatccttgagatacactgctagagctgtgagttccaggatgtgaggttcgagtgtgtgtgatgtgcagttgtcgcctttgaggtcggagatttcagttgcagtgttgtgagaggcttgtgaagcttttttgtctacttttcagtgcttctctggcttgaagttttccttcaattcttgtgaactggcttcaagatttggcttcgtgaaccctgtgtgcgtgtaaaagtactggttggatgctgctgcaccaattctggaaaaaaaagctt

SEQ ID NO: 5571 - protein, 463 aa, Zea mays subsp. mays
  peptide (1)..(463): Ceres Seq. ID no. 12405616
  misc_feature (125)..(409): Pfam Name: Protein kinase domain Pfam Description: Protein kinase domain
  misc_feature (38)..(463): Homolog of NCBI NO: 24637171 NR Description: GSK-3-like protein MsK4 [Medicago sativa]
  misc_feature (38)..(463): Homolog of NCBI NO: 15218288 NR Description: shaggy-like protien kinase, kappa; protein id:
  misc_feature (43)..(463): Homolog of NCBI NO: 15217795 NR Description: protein kinase, putative; protein id: At1g57870.1
  misc_feature (92)..(463): Homolog of NCBI NO: 25287630 NR Description: hypothetical protein [imported] - Arabidopsis
  misc_feature (87)..(463): Homolog of NCBI NO: 1504063 NR Description: shaggy-like kinase kappa [Arabidopsis thaliana]
  misc_feature (46)..(458): Homolog of NCBI NO: 1709128 NR Description: Glycogen synthase kinase-3 homolog MsK-2
  misc_feature (54)..(458): Homolog of NCBI NO: 481018 NR Description: protein kinase MSK-3 (EC 2.7.1.-) [similarity] -
  misc_feature (54)..(458): Homolog of NCBI NO: 11182434 NR Description: GLYCOGEN SYNTHASE KINASE-3 HOMOLOG MSK-3
  misc_feature (63)..(454): Homolog of NCBI NO: 7434282 NR Description: shaggy protein kinase (EC 2.7.1.-) 6 - common
  misc_feature (63)..(454): Homolog of NCBI NO: 7434277 NR Description: shaggy protein kinase (EC 2.7.1.-) 91
NRQAVKSLRFDLLQELLVDLFFSARFRSELPHCWSGGMAYSGQRHAGVGSSSRPANGFKGAANSVEFLGREMLGMRLRDAKPDTDDEREMWSSSDVTDSSSNEAGHVIATTVHGRNGLPKQSVTYIAEHVVGTGSFGVVYQAKCRETGEIVAIKKVLQDKRYKNRELQIMHMLDHPNIIGLKHYFFSTTERDELYLNLVLEFVPETVNRIARQYNRMNQRMPLIYVKLYTYQICRALAYIHNCIGICHRDIKPQNVLVNPHTHQLKICDFGSAKVLVRGEPNISYICSRYYRAPELIFGATEYTTAIDLWSTGCVMAELLLGQPLFPGESGVDQLVEIIKVLGTPTREEIKCMNPNYTEFKFPQIKAHPWHKVFQRRLPPEAVDLVSRFLQYSPNLRCTALEACMHPFFDELRDPNTRLPNGRPLPPLFNFRSQELKGVPPEVIDRLVPEHSRRQSLFMALRT

SEQ ID NO: 5572 - protein, 426 aa, Zea mays subsp. mays
  peptide (1)..(426): Ceres Seq. ID no. 12405617
  misc_feature (88)..(372): Pfam Name: Protein kinase domain Pfam Description: Protein kinase domain
  misc_feature (1)..(426): Homolog of NCBI NO: 24637171 NR Description: GSK-3-like protein MsK4 [Medicago sativa]
  misc_feature (1)..(426): Homolog of NCBI NO: 15218288 NR Description: shaggy-like protien kinase, kappa; protein id:
  misc_feature (6)..(426): Homolog of NCBI NO: 15217795 NR Description: protein kinase, putative; protein id: At1g57870.1
  misc_feature (55)..(426): Homolog of NCBI NO: 25287630 NR Description: hypothetical protein [imported] - Arabidopsis
  misc_feature (50)..(426): Homolog of NCBI NO: 1504063 NR Description: shaggy-like kinase kappa [Arabidopsis thaliana]
  misc_feature (9)..(421): Homolog of NCBI NO: 1709128 NR Description: Glycogen synthase kinase-3 homolog MsK-2
  misc_feature (17)..(421): Homolog of NCBI NO: 481018 NR Description: protein kinase MSK-3 (EC 2.7.1.-) [similarity] -
  misc_feature (17)..(421): Homolog of NCBI NO: 11182434 NR Description: GLYCOGEN SYNTHASE KINASE-3 HOMOLOG MSK-3
  misc_feature (26)..(417): Homolog of NCBI NO: 7434282 NR Description: shaggy protein kinase (EC 2.7.1.-) 6 - common
  misc_feature (26)..(417): Homolog of NCBI NO: 7434277 NR Description: shaggy protein kinase (EC 2.7.1.-) 91
MAYSGQRHAGVGSSSRPANGFKGAANSVEFLGREMLGMRLRDAKPDTDDEREMWSSSDVTDSSSNEAGHVIATTVHGRNGLPKQSVTYIAEHVVGTGSFGVVYQAKCRETGEIVAIKKVLQDKRYKNRELQIMHMLDHPNIIGLKHYFFSTTERDELYLNLVLEFVPETVNRIARQYNRMNQRMPLIYVKLYTYQICRALAYIHNCIGICHRDIKPQNVLVNPHTHQLKICDFGSAKVLVRGEPNISYICSRYYRAPELIFGATEYTTAIDLWSTGCVMAELLLGQPLFPGESGVDQLVEIIKVLGTPTREEIKCMNPNYTEFKFPQIKAHPWHKVFQRRLPPEAVDLVSRFLQYSPNLRCTALEACMHPFFDELRDPNTRLPNGRPLPPLFNFRSQELKGVPPEVIDRLVPEHSRRQSLFMALRT

SEQ ID NO: 5573 - protein, 392 aa, Zea mays subsp. mays
  peptide (1)..(392): Ceres Seq. ID no. 12405618
  misc_feature (54)..(338): Pfam Name: Protein kinase domain Pfam Description: Protein kinase domain
  misc_feature (1)..(392): Homolog of NCBI NO: 24637171 NR Description: GSK-3-like protein MsK4 [Medicago sativa]
  misc_feature (1)..(392): Homolog of NCBI NO: 15218288 NR Description: shaggy-like protien kinase, kappa; protein id:
  misc_feature (1)..(392): Homolog of NCBI NO: 15217795 NR Description: protein kinase, putative; protein id: At1g57870.1
  misc_feature (21)..(392): Homolog of NCBI NO: 25287630 NR Description: hypothetical protein [imported] - Arabidopsis
  misc_feature (16)..(392): Homolog of NCBI NO: 1504063 NR Description: shaggy-like kinase kappa [Arabidopsis thaliana]
  misc_feature (1)..(387): Homolog of NCBI NO: 1709128 NR Description: Glycogen synthase kinase-3 homolog MsK-2
  misc_feature (1)..(387): Homolog of NCBI NO: 481018 NR Description: protein kinase MSK-3 (EC 2.7.1.-) [similarity] -
  misc_feature (1)..(387): Homolog of NCBI NO: 11182434 NR Description: GLYCOGEN SYNTHASE KINASE-3 HOMOLOG MSK-3
  misc_feature (1)..(383): Homolog of NCBI NO: 7434282 NR Description: shaggy protein kinase (EC 2.7.1.-) 6 - common
  misc_feature (1)..(383): Homolog of NCBI NO: 7434277 NR Description: shaggy protein kinase (EC 2.7.1.-) 91
MLGMRLRDAKPDTDDEREMWSSSDVTDSSSNEAGHVIATTVHGRNGLPKQSVTYIAEHVVGTGSFGVVYQAKCRETGEIVAIKKVLQDKRYKNRELQIMHMLDHPNIIGLKHYFFSTTERDELYLNLVLEFVPETVNRIARQYNRMNQRMPLIYVKLYTYQICRALAYIHNCIGICHRDIKPQNVLVNPHTHQLKICDFGSAKVLVRGEPNISYICSRYYRAPELIFGATEYTTAIDLWSTGCVMAELLLGQPLFPGESGVDQLVEIIKVLGTPTREEIKCMNPNYTEFKFPQIKAHPWHKVFQRRLPPEAVDLVSRFLQYSPNLRCTALEACMHPFFDELRDPNTRLPNGRPLPPLFNFRSQELKGVPPEVIDRLVPEHSRRQSLFMALRT

SEQ ID NO: 5574 - DNA, 1449 bp, Zea mays subsp. mays
  misc_feature (1)..(1449): Ceres Seq. ID no. 13498734
  misc_feature: MA Experiment ID: 108544 Result: Down-regulated in Transcription
  misc_feature: MA Experiment ID: 108545 Result: Down-regulated in Transcription
  misc_feature: MA Experiment 108545 PARAMETER Experiment Name: Zm_Imbibed_Seeds_P Parameter: Age (day) Value: 3 vs. 2
  misc_feature: MA Experiment 108545 PARAMETER Experiment Name: Zm_Imbibed_Seeds_P Parameter: Organism Value: Zea mays
  misc_feature: MA Experiment 108545 PARAMETER Experiment Name: Zm_Imbibed_Seeds_P Parameter: Plant Line Value: 35A19
  misc_feature: MA Experiment 108545 PARAMETER Experiment Name: Zm_Imbibed_Seeds_P Parameter: Tissue Value: Aerial vs. Embryo
agagcgaagagagcgaaatccagagcacacggcgtcgcatttggaacgctcctgctcgtcgcacgtacgaagcccacgcgtccgcgcacgtgccagagccgagcccccgcgccggcgccccgccggagaggatgacgcggcggtgctcgcactgcagcaacaacggccacaactcgcgtacctgccccgtccgctccgccggcggcggcagcggcggcggcggggtgaggctgttcggcgtgcggctcacgacggcgccggcgccggcggtgatgaagaagagcgccagcatgagctgcattgtgtcctcgctcggcggcggtttcggcggctcgtcgccgccggtggaaggagtgggtgctggcagaggaggggaagacagtgggaccggctacgtgtccgatgatcccgcgcacgcatcctgctcgacgaatggccgcgccgagcgcaagaaaggtacaccttggactgaagaagagcatagaatgtttctgatgggtctgcagaagcttggtaagggagactggcgcgggatatccagaaactttgttgtttccaggaccccgactcaagttgcaagccatgctcaaaagtactttgttagacagacaaactcatcgagacggaagaggcggtcaagcttatttgacatggtcccagaaatgccaatggatgagtccccagctgctgtggaacaatttactctccaaaatactcaagatgaagatacaagttcaaatcacgtgccaaccttacatcttggacaacggaaggaaacagagtttgctaagcagctacaaacttttcagccagggcaccatgagaaatctgaatacgcagaaccttcattgctgctaccagatttggagatgaaccccagtgtaccattcaagaccataactgatccaacaggaccagcattctacccatcattggtccctgttccactaactctttggcctccaagtgtttcccacgtggaggaagcagccagaacccatgaaatcctaaaaccaactcctttgaatggtaagggggtggttaaggcagatgatgttgttggtatgtctaagctcagcatcgacgaagctagctctggctccatggaacccactgctctttcccttgagcttattggatccacagatacaaggcaatcagcttttcatgtgagtccaccgatgaatagacctgaactaagcaagagaaacagcagtccaattcatgcagtttgaggaagcatgaaacatgcccgctgggtcaagtcttacaaattatactgatggtctcaatacctcagaacgtgaccatgtactttgtaacgactttttagttatcctgtttccagcttatgttccttgccatcgacaaatgtagagagatacatgtgtcaatggaagtagcatgccattagtttcaaaaaaaaaaaaaaaaaaaaaaaaataaaaa

SEQ ID NO: 5575 - protein, 410 aa, Zea mays subsp. mays
  peptide (1)..(410): Ceres Seq. ID no. 13498735
  misc_feature (152)..(199): Pfam Name: Myb-like DNA-binding domain Pfam Description: Myb-like DNA-binding domain
  misc_feature (44)..(263): Homolog of NCBI NO: 34906364 NR Description: unnamed protein product [Oryza sativa (japonica group)] >gi|9558504|dbj|BAB03423.1| unnamed protein product
  misc_feature (251)..(410): Homolog of NCBI NO: 34906364 NR Description: unnamed protein product [Oryza sativa (japonica group)] >gi|9558504|dbj|BAB03423.1| unnamed protein product
  misc_feature (67)..(410): Homolog of NCBI NO: 15228185 NR Description: myb family transcription factor [Arabidopsis
  misc_feature (44)..(97): Homolog of NCBI NO: 15228185 NR Description: myb family transcription factor [Arabidopsis
  misc_feature (44)..(410): Homolog of NCBI NO: 2062176 NR Description: Myb-related transcription activator (MybSt1)
  misc_feature (44)..(410): Homolog of NCBI NO: 15238083 NR Description: Myb-related transcription activator-like
  misc_feature (44)..(392): Homolog of NCBI NO: 7705206 NR Description: MybSt1 [Solanum tuberosum]
  misc_feature (44)..(392): Homolog of NCBI NO: 1076660 NR Description: D13F(MYBST1) protein - potato
  misc_feature (44)..(287): Homolog of NCBI NO: 37536856 NR Description: putative Myb-related protein [Oryza sativa
  misc_feature (44)..(287): Homolog of NCBI NO: 24850307 NR Description: transcription factor MYBS3 [Oryza sativa
SEESEIQSTRRRIWNAPARRTYEAHASAHVPEPSPRAGAPPERMTRRCSHCSNNGHNSRTCPVRSAGGGSGGGGVRLFGVRLTTAPAPAVMKKSASMSCIVSSLGGGFGGSSPPVEGVGAGRGGEDSGTGYVSDDPAHASCSTNGRAERKKGTPWTEEEHRMFLMGLQKLGKGDWRGISRNFVVSRTPTQVASHAQKYFVRQTNSSRRKRRSSLFDMVPEMPMDESPAAVEQFTLQNTQDEDTSSNHVPTLHLGQRKETEFAKQLQTFQPGHHEKSEYAEPSLLLPDLEMNPSVPFKTITDPTGPAFYPSLVPVPLTLWPPSVSHVEEAARTHEILKPTPLNGKGVVKADDVVGMSKLSIDEASSGSMEPTALSLELIGSTDTRQSAFHVSPPMNRPELSKRNSSPIHAV

SEQ ID NO: 5576 - protein, 367 aa, Zea mays subsp. mays
  peptide (1)..(367): Ceres Seq. ID no. 13498736
  misc_feature (109)..(156): Pfam Name: Myb-like DNA-binding domain Pfam Description: Myb-like DNA-binding domain
  misc_feature (1)..(220): Homolog of NCBI NO: 34906364 NR Description: unnamed protein product [Oryza sativa (japonica group)] >gi|9558504|dbj|BAB03423.1| unnamed protein product
  misc_feature (208)..(367): Homolog of NCBI NO: 34906364 NR Description: unnamed protein product [Oryza sativa (japonica group)] >gi|9558504|dbj|BAB03423.1| unnamed protein product
  misc_feature (24)..(367): Homolog of NCBI NO: 15228185 NR Description: myb family transcription factor [Arabidopsis
  misc_feature (1)..(54): Homolog of NCBI NO: 15228185 NR Description: myb family transcription factor [Arabidopsis
  misc_feature (1)..(367): Homolog of NCBI NO: 2062176 NR Description: Myb-related transcription activator (MybSt1)
  misc_feature (1)..(367): Homolog of NCBI NO: 15238083 NR Description: Myb-related transcription activator-like
  misc_feature (1)..(349): Homolog of NCBI NO: 7705206 NR Description: MybSt1 [Solanum tuberosum]
  misc_feature (1)..(349): Homolog of NCBI NO: 1076660 NR Description: D13F(MYBST1) protein - potato
  misc_feature (1)..(244): Homolog of NCBI NO: 37536856 NR Description: putative Myb-related protein [Oryza sativa
  misc_feature (1)..(244): Homolog of NCBI NO: 24850307 NR Description: transcription factor MYBS3 [Oryza sativa
MTRRCSHCSNNGHNSRTCPVRSAGGGSGGGGVRLFGVRLTTAPAPAVMKKSASMSCIVSSLGGGFGGSSPPVEGVGAGRGGEDSGTGYVSDDPAHASCSTNGRAERKKGTPWTEEEHRMFLMGLQKLGKGDWRGISRNFVVSRTPTQVASHAQKYFVRQTNSSRRKRRSSLFDMVPEMPMDESPAAVEQFTLQNTQDEDTSSNHVPTLHLGQRKETEFAKQLQTFQPGHHEKSEYAEPSLLLPDLEMNPSVPFKTITDPTGPAFYPSLVPVPLTLWPPSVSHVEEAARTHEILKPTPLNGKGVVKADDVVGMSKLSIDEASSGSMEPTALSLELIGSTDTRQSAFHVSPPMNRPELSKRNSSPIHAV

SEQ ID NO: 5577 - protein, 320 aa, Zea mays subsp. mays
  peptide (1)..(320): Ceres Seq. ID no. 13498737
  misc_feature (62)..(109): Pfam Name: Myb-like DNA-binding domain Pfam Description: Myb-like DNA-binding domain
  misc_feature (1)..(173): Homolog of NCBI NO: 34906364 NR Description: unnamed protein product [Oryza sativa (japonica group)] >gi|9558504|dbj|BAB03423.1| unnamed protein product
  misc_feature (161)..(320): Homolog of NCBI NO: 34906364 NR Description: unnamed protein product [Oryza sativa (japonica group)] >gi|9558504|dbj|BAB03423.1| unnamed protein product
  misc_feature (1)..(320): Homolog of NCBI NO: 15228185 NR Description: myb family transcription factor [Arabidopsis
  misc_feature (1)..(320): Homolog of NCBI NO: 2062176 NR Description: Myb-related transcription activator (MybSt1)
  misc_feature (1)..(320): Homolog of NCBI NO: 15238083 NR Description: Myb-related transcription activator-like
  misc_feature (1)..(302): Homolog of NCBI NO: 7705206 NR Description: MybSt1 [Solanum tuberosum]
  misc_feature (1)..(302): Homolog of NCBI NO: 1076660 NR Description: D13F(MYBST1) protein - potato
  misc_feature (1)..(197): Homolog of NCBI NO: 37536856 NR Description: putative Myb-related protein [Oryza sativa
  misc_feature (1)..(197): Homolog of NCBI NO: 24850307 NR Description: transcription factor MYBS3 [Oryza sativa
  misc_feature (1)..(127): Homolog of NCBI NO: 34906444 NR Description: P0671B11.14 [Oryza sativa (japonica
MKKSASMSCIVSSLGGGFGGSSPPVEGVGAGRGGEDSGTGYVSDDPAHASCSTNGRAERKKGTPWTEEEHRMFLMGLQKLGKGDWRGISRNFVVSRTPTQVASHAQKYFVRQTNSSRRKRRSSLFDMVPEMPMDESPAAVEQFTLQNTQDEDTSSNHVPTLHLGQRKETEFAKQLQTFQPGHHEKSEYAEPSLLLPDLEMNPSVPFKTITDPTGPAFYPSLVPVPLTLWPPSVSHVEEAARTHEILKPTPLNGKGVVKADDVVGMSKLSIDEASSGSMEPTALSLELIGSTDTRQSAFHVSPPMNRPELSKRNSSPIHAV

SEQ ID NO: 5578 - DNA, 1760 bp, Zea mays subsp. mays
  misc_feature (1)..(1760): Ceres Seq. ID no. 12350346
  misc_feature: MA Experiment ID: 108535 Result: Up-regulated in Transcription
  misc_feature: MA Experiment 108535 PARAMETER Experiment Name: Zm_Meristem_P Parameter: Age (day) Value: 8
  misc_feature: MA Experiment 108535 PARAMETER Experiment Name: Zm_Meristem_P Parameter: Organism Value: Zea mays
  misc_feature: MA Experiment 108535 PARAMETER Experiment Name: Zm_Meristem_P Parameter: Plant Line Value: 35A19
  misc_feature: MA Experiment 108535 PARAMETER Experiment Name: Zm_Meristem_P Parameter: Tissue Value: Root Meristem vs. Above Root Meristem
  misc_feature: MA Experiment ID: 108544 Result: Down-regulated in Transcription
  misc_feature: MA Experiment ID: 20000477 Result: Down-regulated in Transcription
  misc_feature: MA Experiment 20000477 PARAMETER Experiment Name: Zm_5mM_SA_P Parameter: Age (day) Value: 10
  misc_feature: MA Experiment 20000477 PARAMETER Experiment Name: Zm_5mM_SA_P Parameter: Organism Value: Zea mays
  misc_feature: MA Experiment 20000477 PARAMETER Experiment Name: Zm_5mM_SA_P Parameter: Plant Line Value: 35A19
  misc_feature: MA Experiment 20000477 PARAMETER Experiment Name: Zm_5mM_SA_P Parameter: Timepoint (hr) Value: 48
  misc_feature: MA Experiment 20000477 PARAMETER Experiment Name: Zm_5mM_SA_P Parameter: Tissue Value: Aerial
  misc_feature: MA Experiment 20000477 PARAMETER Experiment Name: Zm_5mM_SA_P Parameter: Treatment Value: 5mM SA vs. No Treatment
  misc_feature: MA Experiment ID: 20000479 Result: Down-regulated in Transcription
  misc_feature: MA Experiment 20000479 PARAMETER Experiment Name: Zm_Drought_P Parameter: Age (day) Value: 10
  misc_feature: MA Experiment 20000479 PARAMETER Experiment Name: Zm_Drought_P Parameter: Organism Value: Zea mays
  misc_feature: MA Experiment 20000479 PARAMETER Experiment Name: Zm_Drought_P Parameter: Plant Line Value: 35A19
  misc_feature: MA Experiment 20000479 PARAMETER Experiment Name: Zm_Drought_P Parameter: Timepoint (hr) Value: 48
  misc_feature: MA Experiment 20000479 PARAMETER Experiment Name: Zm_Drought_P Parameter: Tissue Value: Aerial
  misc_feature: MA Experiment 20000479 PARAMETER Experiment Name: Zm_Drought_P Parameter: Treatment Value: Drought vs. No Drought
  misc_feature: MA Experiment ID: 20000480 Result: Down-regulated in Transcription
  misc_feature: MA Experiment 20000480 PARAMETER Experiment Name: Zm_Drought_P Parameter: Age (day) Value: 11
  misc_feature: MA Experiment 20000480 PARAMETER Experiment Name: Zm_Drought_P Parameter: Organism Value: Zea mays
  misc_feature: MA Experiment 20000480 PARAMETER Experiment Name: Zm_Drought_P Parameter: Plant Line Value: 35A19
  misc_feature: MA Experiment 20000480 PARAMETER Experiment Name: Zm_Drought_P Parameter: Timepoint (hr) Value: 72
  misc_feature: MA Experiment 20000480 PARAMETER Experiment Name: Zm_Drought_P Parameter: Tissue Value: Aerial
  misc_feature: MA Experiment 20000480 PARAMETER Experiment Name: Zm_Drought_P Parameter: Treatment Value: Drought vs. No Drought
  misc_feature: MA Experiment ID: 20000626 Result: Down-regulated in Transcription
  misc_feature: MA Experiment 20000626 PARAMETER Experiment Name: Zm_Herbicide-Treatments_P Parameter: Timepoint (hr) Value: 12
  misc_feature: MA Experiment 20000626 PARAMETER Experiment Name: Zm_Herbicide-Treatments_P Parameter: Tissue Value: Aerial
  misc_feature: MA Experiment 20000626 PARAMETER Experiment Name: Zm_Herbicide-Treatments_P Parameter: Treatment Value: Roundup vs. No Treatment
cccaaatcccaccacccttttccccttccaaccatcgggatctctccggcccgccatggaggtgttctactacctcgtgttcggcgcgctcgccgccatcgtggcggcgctggagctcgccaagtccggcaaggaccgcgtcgccacctccccggccttcaactcatttaagaacaactacatcctcgtttactccctcatgatgtctggggactggctgcaggggccctacgtgtactacctctacagccagtacggcttcgacaagggcgacattggccgcctcttcatcgccggcttcggttcctccatgctcttcggcaccatcgtcggatccctcgcggataagcaggggcggaagagggcgtgtgtcacgtactgcatcacctacatcctcagctgcatcaccaagcactctccccagtacaaagttcttatgattgggcgcgtccttggtggcattgccacttcgctgctcttctcagcgtttgagtcgtggctcgtggcagagcacaacaagaaaggatttgatccacaatggttgtcgataacattctccaaggctatatttcttggcaatggtctagtggccattgttgctggcctatttgcaaattttcttgctgataacatgggttttggtcctgtggctccatttgatgccgctgcttgcttcctagcaataggaatggcaattatcttatcatcatggggtgagaactacggagattcgtctgacagcaaggacttgataacccagttcaagggtgcagctaaagccattgcttcagacgagaagattgcattgcttggagccatacagtcattgtttgagggatcaatgtatactttcgttttcctgtggactcctgctctgagcccaaaggatgaggaaattcctcacggcttcatatttgctaccttcatgctttcctcgatgctgggtagctcaattgcttctcgtttgttagctaggaagctgaaggttgaaggttatatgcaaatcgtgttttcagtatcagcctttactcttttcctccctgttgtcaccaatttcctagtacctccctccggggagaaaggcggcagcatttcgttaggaggctgcttacagcttcttggtttctgtacctttgagtcatgtgttggtatattttggccatcaatcatgaagatgagatctcaatatattcccgaggaggcaagaagcacaatcatgaatttcttccgtataccgctcaacctgtttgtttgcgtggtactatacaatgtgaatgcattcccaataactgtcatgttcggcatgtgctccattttccttctcatggcagcagtcttgcagaggcgcttaatggctgtctctgatcttcacagatcgacaaaggctgtaatgatgactgcggaagatgagcctctaaacccttagagaacatcataaaagtgaatcggaagtttaaatggccccaatcctcgacttattcccatggggttgctgaataagattgatatctaaaagttgtaacgactgtaacagaacacggtttttactgtgttataggattggtgctagtgcagtttccggttgtcatggtagagaacatgatgtggctcctgactattgtgccacacacggcagagtagatctcggcatagcctccccacgatttccccatgtttttcttctcgtgttttctgataggattgatatttgtattcaagtgaagtatcatatggaaacccgcatcgtccattttggatgc

SEQ ID NO: 5579 - protein, 474 aa, Zea mays subsp. mays
  peptide (1)..(474): Ceres Seq. ID no. 12350347
  misc_feature (22)..(375): Pfam Name: Protein of unknown function (DUF791) Pfam Description: Protein of unknown function (DUF791)
  misc_feature (19)..(474): Homolog of NCBI NO: 37536124 NR Description: putative transporter [Oryza sativa (japonica group)] >gi|10122032|gb|AAG13421.1| putative transporter [Oryza
  misc_feature (19)..(474): Homolog of NCBI NO: 34902182 NR Description: Putative transporter [Oryza sativa (japonica group)] >gi|27476097|gb|AAO17028.1| Putative transporter [Oryza
  misc_feature (19)..(474): Homolog of NCBI NO: 15217708 NR Description: unknown protein; protein id: At1g64650.1
  misc_feature (19)..(473): Homolog of NCBI NO: 18417054 NR Description: putative protein; protein id: At4g27720.1, by cDNA: 113484., supported by cDNA: gi_13272472, supported by gi_15912260, supported by cDNA: gi_16930438 [Arabidopsis
  misc_feature (19)..(470): Homolog of NCBI NO: 6633826 NR Description: F1N19.22 [Arabidopsis thaliana]
  misc_feature (19)..(474): Homolog of NCBI NO: 30693172 NR Description: expressed protein [Arabidopsis thaliana]
  misc_feature (162)..(474): Homolog of NCBI NO: 11292198 NR Description: hypothetical protein F2K15.170 - Arabidopsis >gi|6723401|emb|CAB66410.1| putative protein [Arabidopsis
  misc_feature (19)..(173): Homolog of NCBI NO: 11292198 NR Description: hypothetical protein F2K15.170 - Arabidopsis >gi|6723401|emb|CAB66410.1| putative protein [Arabidopsis
  misc_feature (19)..(349): Homolog of NCBI NO: 7487513 NR Description: hypothetical protein T29A15.210 - Arabidopsis >gi|4469023|emb|CAB38284.1| putative protein [Arabidopsis >gi|7269626|emb|CAB81422.1| putative protein [Arabidopsis
  misc_feature (380)..(423): Homolog of NCBI NO: 7487513 NR Description: hypothetical protein T29A15.210 - Arabidopsis >gi|4469023|emb|CAB38284.1| putative protein [Arabidopsis >gi|7269626|emb|CAB81422.1| putative protein [Arabidopsis
PNPTTLFPFQPSGSLRPAMEVFYYLVFGALAAIVAALELAKSGKDRVATSPAFNSFKNNYILVYSLMMSGDWLQGPYVYYLYSQYGFDKGDIGRLFIAGFGSSMLFGTIVGSLADKQGRKRACVTYCITYILSCITKHSPQYKVLMIGRVLGGIATSLLFSAFESWLVAEHNKKGFDPQWLSITFSKAIFLGNGLVAIVAGLFANFLADNMGFGPVAPFDAAACFLAIGMAIILSSWGENYGDSSDSKDLITQFKGAAKAIASDEKIALLGAIQSLFEGSMYTFVFLWTPALSPKDEEIPHGFIFATFMLSSMLGSSIASRLLARKLKVEGYMQIVFSVSAFTLFLPVVTNFLVPPSGEKGGSISLGGCLQLLGFCTFESCVGIFWPSIMKMRSQYIPEEARSTIMNFFRIPLNLFVCVVLYNVNAFPITVMFGMCSIFLLMAAVLQRRLMAVSDLHRSTKAVMMTAEDEPLNP

SEQ ID NO: 5580 - protein, 456 aa, Zea mays subsp. mays
  peptide (1)..(456): Ceres Seq. ID no. 12350348
  misc_feature (4)..(357): Pfam Name: Protein of unknown function (DUF791) Pfam Description: Protein of unknown function (DUF791)
  misc_feature (1)..(456): Homolog of NCBI NO: 37536124 NR Description: putative transporter [Oryza sativa (japonica group)] >gi|10122032|gb|AAG13421.1| putative transporter [Oryza
  misc_feature (1)..(456): Homolog of NCBI NO: 34902182 NR Description: Putative transporter [Oryza sativa (japonica group)] >gi|27476097|gb|AAO17028.1| Putative transporter [Oryza
  misc_feature (1)..(456): Homolog of NCBI NO: 15217708 NR Description: unknown protein; protein id: At1g64650.1
  misc_feature (1)..(455): Homolog of NCBI NO: 18417054 NR Description: putative protein; protein id: At4g27720.1, by cDNA: 113484., supported by cDNA: gi_13272472, supported by gi_15912260, supported by cDNA: gi_16930438 [Arabidopsis
  misc_feature (1)..(452): Homolog of NCBI NO: 6633826 NR Description: F1N19.22 [Arabidopsis thaliana]
  misc_feature (1)..(456): Homolog of NCBI NO: 30693172 NR Description: expressed protein [Arabidopsis thaliana]
  misc_feature (144)..(456): Homolog of NCBI NO: 11292198 NR Description: hypothetical protein F2K15.170 - Arabidopsis >gi|6723401|emb|CAB66410.1| putative protein [Arabidopsis
  misc_feature (1)..(155): Homolog of NCBI NO: 11292198 NR Description: hypothetical protein F2K15.170 - Arabidopsis >gi|6723401|emb|CAB66410.1| putative protein [Arabidopsis
  misc_feature (1)..(331): Homolog of NCBI NO: 7487513 NR Description: hypothetical protein T29A15.210 - Arabidopsis >gi|4469023|emb|CAB38284.1| putative protein [Arabidopsis >gi|7269626|emb|CAB81422.1| putative protein [Arabidopsis
  misc_feature (362)..(405): Homolog of NCBI NO: 7487513 NR Description: hypothetical protein T29A15.210 - Arabidopsis >gi|4469023|emb|CAB38284.1| putative protein [Arabidopsis >gi|7269626|emb|CAB81422.1| putative protein [Arabidopsis
MEVFYYLVFGALAAIVAALELAKSGKDRVATSPAFNSFKNNYILVYSLMMSGDWLQGPYVYYLYSQYGFDKGDIGRLFIAGFGSSMLFGTIVGSLADKQGRKRACVTYCITYILSCITKHSPQYKVLMIGRVLGGIATSLLFSAFESWLVAEHNKKGFDPQWLSITFSKAIFLGNGLVAIVAGLFANFLADNMGFGPVAPFDAAACFLAIGMAIILSSWGENYGDSSDSKDLITQFKGAAKAIASDEKIALLGAIQSLFEGSMYTFVFLWTPALSPKDEEIPHGFIFATFMLSSMLGSSIASRLLARKLKVEGYMQIVFSVSAFTLFLPVVTNFLVPPSGEKGGSISLGGCLQLLGFCTFESCVGIFWPSIMKMRSQYIPEEARSTIMNFFRIPLNLFVCVVLYNVNAFPITVMFGMCSIFLLMAAVLQRRLMAVSDLHRSTKAVMMTAEDEPLNP

SEQ ID NO: 5581 - protein, 408 aa, Zea mays subsp. mays
  peptide (1)..(408): Ceres Seq. ID no. 12350349
  misc_feature (1)..(309): Pfam Name: Protein of unknown function (DUF791) Pfam Description: Protein of unknown function (DUF791)
  misc_feature (1)..(283): Homolog of NCBI NO: 7487513 NR Description: hypothetical protein T29A15.210 - Arabidopsis >gi|4469023|emb|CAB38284.1| putative protein [Arabidopsis >gi|7269626|emb|CAB81422.1| putative protein [Arabidopsis
  misc_feature (1)..(408): Homolog of NCBI NO: 37536124 NR Description: putative transporter [Oryza sativa (japonica group)] >gi|10122032|gb|AAG13421.1| putative transporter [Oryza
  misc_feature (1)..(408): Homolog of NCBI NO: 15217708 NR Description: unknown protein; protein id: At1g64650.1
  misc_feature (1)..(404): Homolog of NCBI NO: 6633826 NR Description: F1N19.22 [Arabidopsis thaliana]
  misc_feature (96)..(408): Homolog of NCBI NO: 11292198 NR Description: hypothetical protein F2K15.170 - Arabidopsis >gi|6723401|emb|CAB66410.1| putative protein [Arabidopsis
  misc_feature (1)..(107): Homolog of NCBI NO: 11292198 NR Description: hypothetical protein F2K15.170 - Arabidopsis >gi|6723401|emb|CAB66410.1| putative protein [Arabidopsis
  misc_feature (1)..(408): Homolog of NCBI NO: 30693172 NR Description: expressed protein [Arabidopsis thaliana]
  misc_feature (1)..(407): Homolog of NCBI NO: 18417054 NR Description: putative protein; protein id: At4g27720.1, by cDNA: 113484., supported by cDNA: gi_13272472, supported by gi_15912260, supported by cDNA: gi_16930438 [Arabidopsis
  misc_feature (1)..(408): Homolog of NCBI NO: 34902182 NR Description: Putative transporter [Oryza sativa (japonica group)] >gi|27476097|gb|AAO17028.1| Putative transporter [Oryza
  misc_feature (314)..(357): Homolog of NCBI NO: 7487513 NR Description: hypothetical protein T29A15.210 - Arabidopsis >gi|4469023|emb|CAB38284.1| putative protein [Arabidopsis >gi|7269626|emb|CAB81422.1| putative protein [Arabidopsis
MMSGDWLQGPYVYYLYSQYGFDKGDIGRLFIAGFGSSMLFGTIVGSLADKQGRKRACVTYCITYILSCITKHSPQYKVLMIGRVLGGIATSLLFSAFESWLVAEHNKKGFDPQWLSITFSKAIFLGNGLVAIVAGLFANFLADNMGFGPVAPFDAAACFLAIGMAIILSSWGENYGDSSDSKDLITQFKGAAKAIASDEKIALLGAIQSLFEGSMYTFVFLWTPALSPKDEEIPHGFIFATFMLSSMLGSSIASRLLARKLKVEGYMQIVFSVSAFTLFLPVVTNFLVPPSGEKGGSISLGGCLQLLGFCTFESCVGIFWPSIMKMRSQYIPEEARSTIMNFFRIPLNLFVCVVLYNVNAFPITVMFGMCSIFLLMAAVLQRRLMAVSDLHRSTKAVMMTAEDEPLNP

SEQ ID NO: 5582 - DNA, 583 bp, Zea mays subsp. mays
  misc_feature (1)..(583): Ceres Seq. ID no. 13564574
  misc_feature: MA Experiment ID: 108522 Result: Down-regulated in Transcription
  misc_feature: MA Experiment 108522 PARAMETER Experiment Name: Zm_42deg_Heat_P Parameter: Age (day) Value: 8
  misc_feature: MA Experiment 108522 PARAMETER Experiment Name: Zm_42deg_Heat_P Parameter: Organism Value: Zea mays
  misc_feature: MA Experiment 108522 PARAMETER Experiment Name: Zm_42deg_Heat_P Parameter: Plant Line Value: 35A19
  misc_feature: MA Experiment 108522 PARAMETER Experiment Name: Zm_42deg_Heat_P Parameter: Temperature (deg C) Value: 42 vs. 22
  misc_feature: MA Experiment 108522 PARAMETER Experiment Name: Zm_42deg_Heat_P Parameter: Timepoint (hr) Value: 1
  misc_feature: MA Experiment 108522 PARAMETER Experiment Name: Zm_42deg_Heat_P Parameter: Tissue Value: Aerial
  misc_feature: MA Experiment ID: 108535 Result: Down-regulated in Transcription
  misc_feature: MA Experiment 108535 PARAMETER Experiment Name: Zm_Meristem_P Parameter: Age (day) Value: 8
  misc_feature: MA Experiment 108535 PARAMETER Experiment Name: Zm_Meristem_P Parameter: Organism Value: Zea mays
  misc_feature: MA Experiment 108535 PARAMETER Experiment Name: Zm_Meristem_P Parameter: Plant Line Value: 35A19
  misc_feature: MA Experiment 108535 PARAMETER Experiment Name: Zm_Meristem_P Parameter: Tissue Value: Root Meristem vs. Above Root Meristem
  misc_feature: MA Experiment ID: 108544 Result: Up-regulated in Transcription
  misc_feature: MA Experiment ID: 20000488 Result: Down-regulated in Transcription
  misc_feature: MA Experiment 20000488 PARAMETER Experiment Name: Zm_50mM_NH4NO3_L_to_H_P Parameter: Organism Value: Zea mays
  misc_feature: MA Experiment 20000488 PARAMETER Experiment Name: Zm_50mM_NH4NO3_L_to_H_P Parameter: Timepoint (hr) Value: 8
  misc_feature: MA Experiment 20000488 PARAMETER Experiment Name: Zm_50mM_NH4NO3_L_to_H_P Parameter: Tissue Value: Leaves
  misc_feature: MA Experiment 20000488 PARAMETER Experiment Name: Zm_50mM_NH4NO3_L_to_H_P Parameter: Treatment Value: 50mM NH4NO3 vs. 100mM Mannitol
  misc_feature: MA Experiment ID: 20000627 Result: Up-regulated in Transcription
  misc_feature: MA Experiment 20000627 PARAMETER Experiment Name: Zm_Herbicide-Treatments_P Parameter: Timepoint (hr) Value: 12
  misc_feature: MA Experiment 20000627 PARAMETER Experiment Name: Zm_Herbicide-Treatments_P Parameter: Tissue Value: Aerial
  misc_feature: MA Experiment 20000627 PARAMETER Experiment Name: Zm_Herbicide-Treatments_P Parameter: Treatment Value: Finale vs. No Treatment
ttagaccgagcagtactcggtacgccaaagttcacgcggtactgctgtgtccttcgtttactaaggatcaaagtcaaacgtcgagaaatatagatttacctggaagttgctgataatccgccatctagtcggtaggcatgtatggcaaagttcagttggtgttcacttgttcctcaatggaggccaagaacaagaaaaaagggtcaaagatggagagagtttgtgagaacacagtggctgttgacttcaagcagactaagctgaacaactttgtcccattcatccggtcargggagtggktctgatattggagggtcgcggrttacatgggaagatgcccatgtgtgsatctctgatctggcaaagaattttggctatgactcagtcgatgatgaagtaatttccttctatggggtgtttgawggccataatggcaaagatgctgctcattatgtccgtgataacttgccacgggtcatcgtggaagacgctgattttcckcttgagcttgaaaaggtagtaaagaggtcatttgtgcaaactggatrgtaaagtttgcagagaaattctctcaccacagggg

SEQ ID NO: 5583 - protein, 55 aa, Zea mays subsp. mays
  peptide (1)..(55): Ceres Seq. ID no. 13564575
  misc_feature (20)..(54): Homolog of NCBI NO: 24413992 NR Description: putative DNA-binding protein phosphatase 2C
  misc_feature (25)..(54): Homolog of NCBI NO: 21693562 NR Description: DNA-binding protein phosphatase 2C [Nicotiana
  misc_feature (52)..(52): Xaa is any aa, unknown or other
  misc_feature (55)..(55): Xaa is any aa, unknown or other
MYGKVQLVFTCSSMEAKNKKKGSKMERVCENTVAVDFKQTKLNNFVPFIRSXEWX

SEQ ID NO: 5584 - protein, 42 aa, Zea mays subsp. mays
  peptide (1)..(42): Ceres Seq. ID no. 13564576
  misc_feature (7)..(41): Homolog of NCBI NO: 24413992 NR Description: putative DNA-binding protein phosphatase 2C
  misc_feature (12)..(41): Homolog of NCBI NO: 21693562 NR Description: DNA-binding protein phosphatase 2C [Nicotiana
  misc_feature (39)..(39): Xaa is any aa, unknown or other
  misc_feature (42)..(42): Xaa is any aa, unknown or other
MEAKNKKKGSKMERVCENTVAVDFKQTKLNNFVPFIRSXEWX

SEQ ID NO: 5585 - protein, 40 aa, Zea mays subsp. mays
  peptide (1)..(40): Ceres Seq. ID no. 13564577
MAKFSWCSLVPQWRPRTRKKGQRWREFVRTQWLLTSSRLS

SEQ ID NO: 5586 - DNA, 1568 bp, Zea mays subsp. mays
  misc_feature (1)..(1568): Ceres Seq. ID no. 12409445
  misc_feature: MA Experiment ID: 108535 Result: Up-regulated in Transcription
  misc_feature: MA Experiment 108535 PARAMETER Experiment Name: Zm_Meristem_P Parameter: Age (day) Value: 8
  misc_feature: MA Experiment 108535 PARAMETER Experiment Name: Zm_Meristem_P Parameter: Organism Value: Zea mays
  misc_feature: MA Experiment 108535 PARAMETER Experiment Name: Zm_Meristem_P Parameter: Plant Line Value: 35A19
  misc_feature: MA Experiment 108535 PARAMETER Experiment Name: Zm_Meristem_P Parameter: Tissue Value: Root Meristem vs. Above Root Meristem
agacttatttcgagagaggagtacgttttaagccggtgctccatgtgtcccgtcccgtgtcccgtcccgtctacgttttaagctgcgagcgagatctgctttcacagcgtggctgaccagcagatccgtcgttgccggaacccacgctcgccggctgcgaatgcatctgtagcctgctcttcgtccacacggacaattggacgagctagactctgcgtcgccggcgatggggtgctccttctcagggctgaacgcactgtacgacaccgtcggcggtcggggtggtgacgtctgggttaacgactaccacttccgcgtgctccgcaggctcggcgatgccggccctgcgggctcgtcggtcttcctcgtcaaggaggtcgtcgccgccgcaaccgcctccgacggcacggctgggtcagagcccggcgcctcagggatcgccgggaagaaaggcatcgacccatcacacatctcagctgacgggacatatgctctcaagaaagttcttgttcagagtgatcagcacttagagcttgttcagcaagagatccgagtgtcctctcaattcagccatccaaatttacttcctcttcttgaacatgccatcgttgctgtcaagggtgttcaggatggatcccagaactatgaggcctacttattattcccagttcatttagaaggaacattacatgatataactaaaaccatgcttgaaaagaaggaattcttcccaacaattactgttctccagatatttcgccagctttgttctggattaaagcacatgcacagttttgatccaccatatgcgcacaatggggttaaaccagataatgtcctcataacacagaggaagcagtctcatctagcaattttgatggattttgagagtgctggtccagcaagaaagactattagatcacaagctgaagctttgcagttacaggaatgggcttcagagcactgttcttctcattaccgtgcccccgaactatgggagtgtccaagtcatgctgacattgatgagaggacagatatatggtctttgggatgcactttgtatgctatgatgtatggaaagtctccatttgattatgagcttgatgagtcttctggtgaaagcttgcacagtgttattaaaaatgtacagattaaatggcctgaagaagcgggatctacataccctgattccctccgccagtttataacttggatgctgcagccacatcccgcagttcgtcctcatattgatgatatcataattcatgttgataaacttgtcatgaagtactctaattaaccgctacaccaagccgcttctccaccagaaaaaagaatcattattatgtaagtctacacgattcattagcaaaatgtgatatgtatgttccttgatagctattactgtattaaacgagaaaaggacattctgctgtagtcttcaaccattcgtggactcgccattgttcatgagtatgttatctatagatgttttttttgtatgcccgacagtgttaccgggttaataaatgatacagtacctcttttatagttataatggtgccctt

SEQ ID NO: 5587 - protein, 357 aa, Zea mays subsp. mays
  peptide (1)..(357): Ceres Seq. ID no. 12409446
  misc_feature (1)..(356): Homolog of NCBI NO: 15241535 NR Description: serine/threonine protein kinase; protein id: supported by cDNA: 5323., supported by cDNA: gi_13358242, by cDNA: gi_2109292 [Arabidopsis thaliana]
  misc_feature (1)..(356): Homolog of NCBI NO: 21593866 NR Description: serine/threonine protein kinase [Arabidopsis
  misc_feature (77)..(356): Homolog of NCBI NO: 30682270 NR Description: serine/threonine protein kinase, putative
  misc_feature (1)..(31): Homolog of NCBI NO: 30682270 NR Description: serine/threonine protein kinase, putative
  misc_feature (85)..(351): Homolog of NCBI NO: 10640971 NR Description: F5-2 [Homo sapiens]
  misc_feature (85)..(351): Homolog of NCBI NO: 3372666 NR Description: myristilated and palmitylated serine-threonine
  misc_feature (85)..(351): Homolog of NCBI NO: 27465615 NR Description: serine/threonine kinase 16 [Rattus norvegicus] serine/threonine kinase 16 [Rattus norvegicus] Serine/threonine protein kinase 16 (Protein kinase PKL12)
  misc_feature (65)..(351): Homolog of NCBI NO: 6714558 NR Description: F5-2 [Mus musculus]
  misc_feature (65)..(351): Homolog of NCBI NO: 6729083 NR Description: F5-2 [Mus musculus]
  misc_feature (85)..(351): Homolog of NCBI NO: 4505837 NR Description: serine/threonine kinase 16; protein kinase in day 12 fetal liver [Homo sapiens] >gi|3367705|emb|CAA06700.1|
  misc_feature (1)..(356): Homolog of NCBI NO: 15241535 NR Description: serine/threonine protein kinase; protein id: supported by cDNA: 5323., supported by cDNA: gi_13358242, by cDNA: gi_2109292 [Arabidopsis thaliana]
  misc_feature (1)..(356): Homolog of NCBI NO: 21593866 NR Description: serine/threonine protein kinase [Arabidopsis
  misc_feature (77)..(356): Homolog of NCBI NO: 30682270 NR Description: serine/threonine protein kinase, putative
  misc_feature (1)..(31): Homolog of NCBI NO: 30682270 NR Description: serine/threonine protein kinase, putative
  misc_feature (85)..(351): Homolog of NCBI NO: 10640971 NR Description: F5-2 [Homo sapiens]
  misc_feature (85)..(351): Homolog of NCBI NO: 3372666 NR Description: myristilated and palmitylated serine-threonine
  misc_feature (85)..(351): Homolog of NCBI NO: 27465615 NR Description: serine/threonine kinase 16 [Rattus norvegicus] serine/threonine kinase 16 [Rattus norvegicus] Serine/threonine protein kinase 16 (Protein kinase PKL12)
  misc_feature (65)..(351): Homolog of NCBI NO: 6714558 NR Description: F5-2 [Mus musculus]
  misc_feature (65)..(351): Homolog of NCBI NO: 6729083 NR Description: F5-2 [Mus musculus]
  misc_feature (85)..(351): Homolog of NCBI NO: 4505837 NR Description: serine/threonine kinase 16; protein kinase in day 12 fetal liver [Homo sapiens] >gi|3367705|emb|CAA06700.1|
MGCSFSGLNALYDTVGGRGGDVWVNDYHFRVLRRLGDAGPAGSSVFLVKEVVAAATASDGTAGSEPGASGIAGKKGIDPSHISADGTYALKKVLVQSDQHLELVQQEIRVSSQFSHPNLLPLLEHAIVAVKGVQDGSQNYEAYLLFPVHLEGTLHDITKTMLEKKEFFPTITVLQIFRQLCSGLKHMHSFDPPYAHNGVKPDNVLITQRKQSHLAILMDFESAGPARKTIRSQAEALQLQEWASEHCSSHYRAPELWECPSHADIDERTDIWSLGCTLYAMMYGKSPFDYELDESSGESLHSVIKNVQIKWPEEAGSTYPDSLRQFITWMLQPHPAVRPHIDDIIIHVDKLVMKYSN

SEQ ID NO: 5588 - protein, 197 aa, Zea mays subsp. mays
  peptide (1)..(197): Ceres Seq. ID no. 12409447
  misc_feature (1)..(196): Homolog of NCBI NO: 15241535 NR Description: serine/threonine protein kinase; protein id: supported by cDNA: 5323., supported by cDNA: gi_13358242, by cDNA: gi_2109292 [Arabidopsis thaliana]
  misc_feature (1)..(196): Homolog of NCBI NO: 21593866 NR Description: serine/threonine protein kinase [Arabidopsis
  misc_feature (1)..(196): Homolog of NCBI NO: 30682270 NR Description: serine/threonine protein kinase, putative
  misc_feature (1)..(191): Homolog of NCBI NO: 10640971 NR Description: F5-2 [Homo sapiens]
  misc_feature (1)..(191): Homolog of NCBI NO: 3372666 NR Description: myristilated and palmitylated serine-threonine
  misc_feature (1)..(191): Homolog of NCBI NO: 27465615 NR Description: serine/threonine kinase 16 [Rattus norvegicus] serine/threonine kinase 16 [Rattus norvegicus] Serine/threonine protein kinase 16 (Protein kinase PKL12)
  misc_feature (1)..(191): Homolog of NCBI NO: 6714558 NR Description: F5-2 [Mus musculus]
  misc_feature (1)..(191): Homolog of NCBI NO: 6729083 NR Description: F5-2 [Mus musculus]
  misc_feature (1)..(191): Homolog of NCBI NO: 4505837 NR Description: serine/threonine kinase 16; protein kinase in day 12 fetal liver [Homo sapiens] >gi|3367705|emb|CAA06700.1|
  misc_feature (1)..(191): Homolog of NCBI NO: 13626604 NR Description: SERINE/THREONINE PROTEIN KINASE 16 (PROTEIN
  misc_feature (1)..(196): Homolog of NCBI NO: 15241535 NR Description: serine/threonine protein kinase; protein id: supported by cDNA: 5323., supported by cDNA: gi_13358242, by cDNA: gi_2109292 [Arabidopsis thaliana]
  misc_feature (1)..(196): Homolog of NCBI NO: 21593866 NR Description: serine/threonine protein kinase [Arabidopsis
  misc_feature (1)..(196): Homolog of NCBI NO: 30682270 NR Description: serine/threonine protein kinase, putative
  misc_feature (1)..(191): Homolog of NCBI NO: 10640971 NR Description: F5-2 [Homo sapiens]
  misc_feature (1)..(191): Homolog of NCBI NO: 3372666 NR Description: myristilated and palmitylated serine-threonine
  misc_feature (1)..(191): Homolog of NCBI NO: 27465615 NR Description: serine/threonine kinase 16 [Rattus norvegicus] serine/threonine kinase 16 [Rattus norvegicus] Serine/threonine protein kinase 16 (Protein kinase PKL12)
  misc_feature (1)..(191): Homolog of NCBI NO: 6714558 NR Description: F5-2 [Mus musculus]
  misc_feature (1)..(191): Homolog of NCBI NO: 6729083 NR Description: F5-2 [Mus musculus]
  misc_feature (1)..(191): Homolog of NCBI NO: 4505837 NR Description: serine/threonine kinase 16; protein kinase in day 12 fetal liver [Homo sapiens] >gi|3367705|emb|CAA06700.1|
  misc_feature (1)..(191): Homolog of NCBI NO: 13626604 NR Description: SERINE/THREONINE PROTEIN KINASE 16 (PROTEIN
MLEKKEFFPTITVLQIFRQLCSGLKHMHSFDPPYAHNGVKPDNVLITQRKQSHLAILMDFESAGPARKTIRSQAEALQLQEWASEHCSSHYRAPELWECPSHADIDERTDIWSLGCTLYAMMYGKSPFDYELDESSGESLHSVIKNVQIKWPEEAGSTYPDSLRQFITWMLQPHPAVRPHIDDIIIHVDKLVMKYSN

SEQ ID NO: 5589 - DNA, 721 bp, Zea mays subsp. mays
  misc_feature (1)..(721): Ceres Seq. ID no. 12349054
  misc_feature: MA Experiment ID: 20000626 Result: Up-regulated in Transcription
  misc_feature: MA Experiment 20000626 PARAMETER Experiment Name: Zm_Herbicide-Treatments_P Parameter: Timepoint (hr) Value: 12
  misc_feature: MA Experiment 20000626 PARAMETER Experiment Name: Zm_Herbicide-Treatments_P Parameter: Tissue Value: Aerial
  misc_feature: MA Experiment 20000626 PARAMETER Experiment Name: Zm_Herbicide-Treatments_P Parameter: Treatment Value: Roundup vs. No Treatment
acaacgacgctagggtttcactcgcagccgccgacgccaaaagcccgctcttctgccccaagccgcgacgccccacgacgccgctgcggtgccaccagagcggtggcttctccgacgctgaacgctctttccagggcgacgagagcggcctgtcgtcggcgtccccgcagccgccgctgttctacggctcaccgccacggcgagcgtcaaacccggtggtccacgacagtaggttcggcgcggactgcccgcccgtgcccgtgccggggctgtccgtgcaccggcccagcccgcggtcgtcggcggcggcgccgtccatgtcgccgcgcgggtgcacccgcgcgcggttcgcgttctagcccgcgaatagttaggtggtatgtcctagttcgtcaattaatgatgctttcttttttggtttttgatggggaattgtttttttctttgttgtccgtccgtccatgcaaccaagaaatttcatggagaatctgtacaaaagagtggctagctactacacgagagtctggtctgagagaagcaacacgaggtcagtcagtggatgaacttagagagagacattcacacgctgagagggttgataatttgtgatattttcctcctttttttcttcttcctgattttgtatattgtatatcctgctggattaacaaatactagcaaccacttatagtcagtcaacataggccatctactgccagtg

SEQ ID NO: 5590 - protein, 202 aa, Zea mays subsp. mays
  peptide (1)..(202): Ceres Seq. ID no. 12349055
TTTLGFHSQPPTPKARSSAPSRDAPRRRCGATRAVASPTLNALSRATRAACRRRPRSRRCSTAHRHGERQTRWSTTVGSARTARPCPCRGCPCTGPARGRRRRRRPCRRAGAPARGSRSSPRIVRWYVLVRQLMMLSFLVFDGELFFSLLSVRPCNQEISWRICTKEWLATTRESGLREATRGQSVDELRERHSHAERVDNL

SEQ ID NO: 5591 - protein, 118 aa, Zea mays subsp. mays
  peptide (1)..(118): Ceres Seq. ID no. 12349056
  misc_feature (18)..(118): Homolog of NCBI NO: 18396232 NR Description: Expressed protein; protein id: At3g02555.1, by cDNA: 1232. [Arabidopsis thaliana] >gi|21537194|gb|AAM61535.1|
NDARVSLAAADAKSPLFCPKPRRPTTPLRCHQSGGFSDAERSFQGDESGLSSASPQPPLFYGSPPRRASNPVVHDSRFGADCPPVPVPGLSVHRPSPRSSAAAPSMSPRGCTRARFAF

SEQ ID NO: 5592 - DNA, 1409 bp, Zea mays subsp. mays
  misc_feature (1)..(1409): Ceres Seq. ID no. 12357947
  misc_feature: MA Experiment ID: 108504 Result: Up-regulated in Transcription
  misc_feature: MA Experiment 108504 PARAMETER Experiment Name: Zm_Drought_P Parameter: Age (day) Value: 8
  misc_feature: MA Experiment 108504 PARAMETER Experiment Name: Zm_Drought_P Parameter: Organism Value: Zea mays
  misc_feature: MA Experiment 108504 PARAMETER Experiment Name: Zm_Drought_P Parameter: Plant Line Value: 35A19
  misc_feature: MA Experiment 108504 PARAMETER Experiment Name: Zm_Drought_P Parameter: Timepoint (hr) Value: 12
  misc_feature: MA Experiment 108504 PARAMETER Experiment Name: Zm_Drought_P Parameter: Tissue Value: Aerial
  misc_feature: MA Experiment 108504 PARAMETER Experiment Name: Zm_Drought_P Parameter: Treatment Value: Drought vs. No Drought
  misc_feature: MA Experiment ID: 108543 Result: Up-regulated in Transcription
  misc_feature: MA Experiment ID: 108544 Result: Up-regulated in Transcription
  misc_feature: MA Experiment ID: 108556 Result: Up-regulated in Transcription
  misc_feature: MA Experiment 108556 PARAMETER Experiment Name: Zm_Drought_P Parameter: Age (day) Value: 9
  misc_feature: MA Experiment 108556 PARAMETER Experiment Name: Zm_Drought_P Parameter: Organism Value: Zea mays
  misc_feature: MA Experiment 108556 PARAMETER Experiment Name: Zm_Drought_P Parameter: Plant Line Value: 35A19
  misc_feature: MA Experiment 108556 PARAMETER Experiment Name: Zm_Drought_P Parameter: Timepoint (hr) Value: 24
  misc_feature: MA Experiment 108556 PARAMETER Experiment Name: Zm_Drought_P Parameter: Tissue Value: Aerial
  misc_feature: MA Experiment 108556 PARAMETER Experiment Name: Zm_Drought_P Parameter: Treatment Value: Drought vs. No Drought
  misc_feature: MA Experiment ID: 108687 Result: Up-regulated in Transcription
  misc_feature: MA Experiment 108687 PARAMETER Experiment Name: Zm_Embryos-Flowers__P Parameter: Tissue Value: Embryo vs. Aerial+
  misc_feature: MA Experiment ID: 108689 Result: Up-regulated in Transcription
  misc_feature: MA Experiment 108689 PARAMETER Experiment Name: Zm_Drought_Roots_P Parameter: Age (day) Value: 9
  misc_feature: MA Experiment 108689 PARAMETER Experiment Name: Zm_Drought_Roots_P Parameter: Organism Value: Zea mays
  misc_feature: MA Experiment 108689 PARAMETER Experiment Name: Zm_Drought_Roots_P Parameter: Plant Line Value: 35A19
  misc_feature: MA Experiment 108689 PARAMETER Experiment Name: Zm_Drought_Roots_P Parameter: Timepoint (hr) Value: 24
  misc_feature: MA Experiment 108689 PARAMETER Experiment Name: Zm_Drought_Roots_P Parameter: Tissue Value: Roots
  misc_feature: MA Experiment 108689 PARAMETER Experiment Name: Zm_Drought_Roots_P Parameter: Treatment Value: Drought vs. No Drought
  misc_feature: MA Experiment ID: 20000477 Result: Up-regulated in Transcription
  misc_feature: MA Experiment 20000477 PARAMETER Experiment Name: Zm_5mM_SA_P Parameter: Age (day) Value: 10
  misc_feature: MA Experiment 20000477 PARAMETER Experiment Name: Zm_5mM_SA_P Parameter: Organism Value: Zea mays
  misc_feature: MA Experiment 20000477 PARAMETER Experiment Name: Zm_5mM_SA_P Parameter: Plant Line Value: 35A19
  misc_feature: MA Experiment 20000477 PARAMETER Experiment Name: Zm_5mM_SA_P Parameter: Timepoint (hr) Value: 48
  misc_feature: MA Experiment 20000477 PARAMETER Experiment Name: Zm_5mM_SA_P Parameter: Tissue Value: Aerial
  misc_feature: MA Experiment 20000477 PARAMETER Experiment Name: Zm_5mM_SA_P Parameter: Treatment Value: 5mM SA vs. No Treatment
  misc_feature: MA Experiment ID: 20000478 Result: Up-regulated in Transcription
  misc_feature: MA Experiment 20000478 PARAMETER Experiment Name: Zm_5mM_SA_P Parameter: Age (day) Value: 11
  misc_feature: MA Experiment 20000478 PARAMETER Experiment Name: Zm_5mM_SA_P Parameter: Organism Value: Zea mays
  misc_feature: MA Experiment 20000478 PARAMETER Experiment Name: Zm_5mM_SA_P Parameter: Plant Line Value: 35A19
  misc_feature: MA Experiment 20000478 PARAMETER Experiment Name: Zm_5mM_SA_P Parameter: Timepoint (hr) Value: 72
  misc_feature: MA Experiment 20000478 PARAMETER Experiment Name: Zm_5mM_SA_P Parameter: Tissue Value: Aerial
  misc_feature: MA Experiment 20000478 PARAMETER Experiment Name: Zm_5mM_SA_P Parameter: Treatment Value: 5mM SA vs. No Treatment
  misc_feature: MA Experiment ID: 20000480 Result: Up-regulated in Transcription
  misc_feature: MA Experiment 20000480 PARAMETER Experiment Name: Zm_Drought_P Parameter: Age (day) Value: 11
  misc_feature: MA Experiment 20000480 PARAMETER Experiment Name: Zm_Drought_P Parameter: Organism Value: Zea mays
  misc_feature: MA Experiment 20000480 PARAMETER Experiment Name: Zm_Drought_P Parameter: Plant Line Value: 35A19
  misc_feature: MA Experiment 20000480 PARAMETER Experiment Name: Zm_Drought_P Parameter: Timepoint (hr) Value: 72
  misc_feature: MA Experiment 20000480 PARAMETER Experiment Name: Zm_Drought_P Parameter: Tissue Value: Aerial
  misc_feature: MA Experiment 20000480 PARAMETER Experiment Name: Zm_Drought_P Parameter: Treatment Value: Drought vs. No Drought
  misc_feature: MA Experiment ID: 20000535 Result: Up-regulated in Transcription
  misc_feature: MA Experiment 20000535 PARAMETER Experiment Name: Zm_Hybrid_Seed_Dev_P Parameter: DAP Value: 30 vs. 12
  misc_feature: MA Experiment 20000535 PARAMETER Experiment Name: Zm_Hybrid_Seed_Dev_P Parameter: Organism Value: Zea mays
  misc_feature: MA Experiment 20000535 PARAMETER Experiment Name: Zm_Hybrid_Seed_Dev_P Parameter: Plant Line Value: 35A19
  misc_feature: MA Experiment 20000535 PARAMETER Experiment Name: Zm_Hybrid_Seed_Dev_P Parameter: Tissue Value: Embryo vs. Unfert Floret
aggcttggttccccgtgaccttgccagccgcgctagatacacactcttcatcacccggagtcccggacggacgcacacgcatcgcttgcttgtcgttctccactcctcttcccccgctgctcgcctctcgattccgcctcatcgcgtccgcgaactccatgtccactgcgaccgcgaccctggccgccgcgcgatccccggctgtcgcgcttctcagcctgcgccgccgcgcacccgcggctgcccccattcgcttccccggtctccgcgtcgtctctggttgccgtcacatagctatggcttccggcggcgcactcccgcgcccccaccgacccgcttcccaagggtgctgatttatttttccgggcagtaatctcgaacatggaaaaggtttatttgagcaggaatcctacagccaaaaccattctggagcttgtacgatcttatgatggtgatcacatttgctatgatcactttgctttccggacatttggggtcaatggttatggtataaactcactttctgattttttcactgattttggttatttacctcgcgaagaactcagatttccagctaaaaagcttagggcactatggttttccccgcccactaatgatggctactctggaactggtacatatggacctttgccaaggatattcatttcagaacttcttgtggatgagttgactactcaaagccaggaaattatacataaatacattaaaacttctggcaatggaaataatcatgctgctattgcaagtacatctggggagctaacatgggagaagcccatttattcagatttccagattttgtctagggaaagtgaatatgctgcatggactcttgttaatggctatgcactaaatcatgccacaattgccacccatcgcctagaatcagatatcagaagtattaataagttcaacaaatttgtggaggacaatggcttcaagttaaattcagaaggagggattctgaaagtgagtcctgatggtctccttcaacaaagttcaacagtagctgactcatcattgtttacgtttgctgatggaataactgaatctattcctcgatcatacattgaatttgctgaacgtctcctgttaccacagtttcaaagatttacaagatgaagaggtgaaagaataccacaggcgtgatggtttttgaggtgggcaatgcggacaagatattcgaaagtacatcgaaggatcagctgacgcggagatctgcatgaacagtgaactctagatctgcatatgaccccgtgaactctctagatctgcaaacaacccagtgtgcctcttggaagtgtgttggtgactgtgaaatgattgtacctacttgggtgaaataaagcatgggagtcaataaaaagtaactgtttctttattcc

SEQ ID NO: 5593 - protein, 254 aa, Zea mays subsp. mays
  peptide (1)..(254): Ceres Seq. ID no. 12357948
  misc_feature (1)..(250): Homolog of NCBI NO: 37535166 NR Description: unknown protein [Oryza sativa (japonica
  misc_feature (1)..(250): Homolog of NCBI NO: 18390717 NR Description: expressed protein; protein id: At1g07040.1, by cDNA: 36434. [Arabidopsis thaliana] >gi|25406951|pir||B86205
  misc_feature (1)..(250): Homolog of NCBI NO: 18396149 NR Description: expressed protein; protein id: At1g27030.1, by cDNA: gi_14517457 [Arabidopsis thaliana] T7N9.9 [Arabidopsis thaliana] >gi|14517458|gb|AAK62619.1|
  misc_feature (1)..(250): Homolog of NCBI NO: 15223410 NR Description: unknown protein; protein id: At1g27020.1
  misc_feature (64)..(249): Homolog of NCBI NO: 22973852 NR Description: hypothetical protein [Chloroflexus aurantiacus]
  misc_feature (1)..(243): Homolog of NCBI NO: 15642610 NR Description: conserved hypothetical protein [Vibrio cholerae]
  misc_feature (5)..(243): Homolog of NCBI NO: 27364716 NR Description: Conserved hypothetical protein [Vibrio vulnificus >gi|27360861|gb|AAO09771.1|AE016801_90 Conserved hypothetical
  misc_feature (5)..(243): Homolog of NCBI NO: 28899568 NR Description: conserved hypothetical protein [Vibrio RIMD 2210633] >gi|28807804|dbj|BAC61057.1| conserved hypothetical
  misc_feature (1)..(243): Homolog of NCBI NO: 24372211 NR Description: conserved hypothetical protein [Shewanella MR-1] >gi|24346126|gb|AAN53698.1|AE015509_3 conserved
  misc_feature (5)..(243): Homolog of NCBI NO: 37523419 NR Description: hypothetical protein glr3850 [Gloeobacter
MEKVYLSRNPTAKTILELVRSYDGDHICYDHFAFRTFGVNGYGINSLSDFFTDFGYLPREELRFPAKKLRALWFSPPTNDGYSGTGTYGPLPRIFISELLVDELTTQSQEIIHKYIKTSGNGNNHAAIASTSGELTWEKPIYSDFQILSRESEYAAWTLVNGYALNHATIATHRLESDIRSINKFNKFVEDNGFKLNSEGGILKVSPDGLLQQSSTVADSSLFTFADGITESIPRSYIEFAERLLLPQFQRFTR

SEQ ID NO: 5594 - DNA, 1480 bp, Zea mays subsp. mays
  misc_feature (1)..(1480): Ceres Seq. ID no. 12435038
  misc_feature: MA Experiment ID: 108504 Result: Down-regulated in Transcription
  misc_feature: MA Experiment 108504 PARAMETER Experiment Name: Zm_Drought_P Parameter: Age (day) Value: 8
  misc_feature: MA Experiment 108504 PARAMETER Experiment Name: Zm_Drought_P Parameter: Organism Value: Zea mays
  misc_feature: MA Experiment 108504 PARAMETER Experiment Name: Zm_Drought_P Parameter: Plant Line Value: 35A19
  misc_feature: MA Experiment 108504 PARAMETER Experiment Name: Zm_Drought_P Parameter: Timepoint (hr) Value: 12
  misc_feature: MA Experiment 108504 PARAMETER Experiment Name: Zm_Drought_P Parameter: Tissue Value: Aerial
  misc_feature: MA Experiment 108504 PARAMETER Experiment Name: Zm_Drought_P Parameter: Treatment Value: Drought vs. No Drought
  misc_feature: MA Experiment ID: 108523 Result: Down-regulated in Transcription
  misc_feature: MA Experiment 108523 PARAMETER Experiment Name: Zm_42deg_Heat_P Parameter: Age (day) Value: 8
  misc_feature: MA Experiment 108523 PARAMETER Experiment Name: Zm_42deg_Heat_P Parameter: Organism Value: Zea mays
  misc_feature: MA Experiment 108523 PARAMETER Experiment Name: Zm_42deg_Heat_P Parameter: Plant Line Value: 35A19
  misc_feature: MA Experiment 108523 PARAMETER Experiment Name: Zm_42deg_Heat_P Parameter: Temperature (deg C) Value: 42 vs. 22
  misc_feature: MA Experiment 108523 PARAMETER Experiment Name: Zm_42deg_Heat_P Parameter: Timepoint (hr) Value: 6
  misc_feature: MA Experiment 108523 PARAMETER Experiment Name: Zm_42deg_Heat_P Parameter: Tissue Value: Aerial
  misc_feature: MA Experiment ID: 108529 Result: Down-regulated in Transcription
  misc_feature: MA Experiment 108529 PARAMETER Experiment Name: Zm_Imbibed_Seeds_P Parameter: Age (day) Value: 5 vs. 2
  misc_feature: MA Experiment 108529 PARAMETER Experiment Name: Zm_Imbibed_Seeds_P Parameter: Organism Value: Zea mays
  misc_feature: MA Experiment 108529 PARAMETER Experiment Name: Zm_Imbibed_Seeds_P Parameter: Plant Line Value: 35A19
  misc_feature: MA Experiment 108529 PARAMETER Experiment Name: Zm_Imbibed_Seeds_P Parameter: Tissue Value: Roots vs. Embryo
  misc_feature: MA Experiment ID: 108536 Result: Down-regulated in Transcription
  misc_feature: MA Experiment 108536 PARAMETER Experiment Name: Zm_Meristem_P Parameter: Age (day) Value: 8
  misc_feature: MA Experiment 108536 PARAMETER Experiment Name: Zm_Meristem_P Parameter: Organism Value: Zea mays
  misc_feature: MA Experiment 108536 PARAMETER Experiment Name: Zm_Meristem_P Parameter: Plant Line Value: 35A19
  misc_feature: MA Experiment 108536 PARAMETER Experiment Name: Zm_Meristem_P Parameter: Tissue Value: Shoot Meristem vs. Above Shoot Meristem
  misc_feature: MA Experiment ID: 108540 Result: Down-regulated in Transcription
  misc_feature: MA Experiment 108540 PARAMETER Experiment Name: Zm_20percent_PEG_P Parameter: Age (day) Value: 8
  misc_feature: MA Experiment 108540 PARAMETER Experiment Name: Zm_20percent_PEG_P Parameter: Organism Value: Zea mays
  misc_feature: MA Experiment 108540 PARAMETER Experiment Name: Zm_20percent_PEG_P Parameter: Plant Line Value: 35A19
  misc_feature: MA Experiment 108540 PARAMETER Experiment Name: Zm_20percent_PEG_P Parameter: Timepoint (hr) Value: 6
  misc_feature: MA Experiment 108540 PARAMETER Experiment Name: Zm_20percent_PEG_P Parameter: Tissue Value: Aerial
  misc_feature: MA Experiment 108540 PARAMETER Experiment Name: Zm_20percent_PEG_P Parameter: Treatment Value: 20percent PEG vs. No Treatment
  misc_feature: MA Experiment ID: 108546 Result: Down-regulated in Transcription
  misc_feature: MA Experiment 108546 PARAMETER Experiment Name: Zm_Imbibed_Seeds_P Parameter: Age (day) Value: 3 vs. 2
  misc_feature: MA Experiment 108546 PARAMETER Experiment Name: Zm_Imbibed_Seeds_P Parameter: Organism Value: Zea mays
  misc_feature: MA Experiment 108546 PARAMETER Experiment Name: Zm_Imbibed_Seeds_P Parameter: Plant Line Value: 35A19
  misc_feature: MA Experiment 108546 PARAMETER Experiment Name: Zm_Imbibed_Seeds_P Parameter: Tissue Value: Roots vs. Embryo
  misc_feature: MA Experiment ID: 108547 Result: Up-regulated in Transcription
  misc_feature: MA Experiment 108547 PARAMETER Experiment Name: Zm_Imbibed_Seeds_P Parameter: Age (day) Value: 4 vs. 2
  misc_feature: MA Experiment 108547 PARAMETER Experiment Name: Zm_Imbibed_Seeds_P Parameter: Organism Value: Zea mays
  misc_feature: MA Experiment 108547 PARAMETER Experiment Name: Zm_Imbibed_Seeds_P Parameter: Plant Line Value: 35A19
  misc_feature: MA Experiment 108547 PARAMETER Experiment Name: Zm_Imbibed_Seeds_P Parameter: Tissue Value: Aerial vs. Embryo
  misc_feature: MA Experiment ID: 108556 Result: Down-regulated in Transcription
  misc_feature: MA Experiment 108556 PARAMETER Experiment Name: Zm_Drought_P Parameter: Age (day) Value: 9
  misc_feature: MA Experiment 108556 PARAMETER Experiment Name: Zm_Drought_P Parameter: Organism Value: Zea mays
  misc_feature: MA Experiment 108556 PARAMETER Experiment Name: Zm_Drought_P Parameter: Plant Line Value: 35A19
  misc_feature: MA Experiment 108556 PARAMETER Experiment Name: Zm_Drought_P Parameter: Timepoint (hr) Value: 24
  misc_feature: MA Experiment 108556 PARAMETER Experiment Name: Zm_Drought_P Parameter: Tissue Value: Aerial
  misc_feature: MA Experiment 108556 PARAMETER Experiment Name: Zm_Drought_P Parameter: Treatment Value: Drought vs. No Drought
  misc_feature: MA Experiment ID: 108597 Result: Down-regulated in Transcription
  misc_feature: MA Experiment 108597 PARAMETER Experiment Name: Zm_100uM_ABA_P Parameter: Age (day) Value: 9
  misc_feature: MA Experiment 108597 PARAMETER Experiment Name: Zm_100uM_ABA_P Parameter: Organism Value: Zea mays
  misc_feature: MA Experiment 108597 PARAMETER Experiment Name: Zm_100uM_ABA_P Parameter: Plant Line Value: 35A19
  misc_feature: MA Experiment 108597 PARAMETER Experiment Name: Zm_100uM_ABA_P Parameter: Timepoint (hr) Value: 24
  misc_feature: MA Experiment 108597 PARAMETER Experiment Name: Zm_100uM_ABA_P Parameter: Tissue Value: Aerial
  misc_feature: MA Experiment 108597 PARAMETER Experiment Name: Zm_100uM_ABA_P Parameter: Treatment Value: 100uM ABA vs. No Treatment
  misc_feature: MA Experiment ID: 108687 Result: Down-regulated in Transcription
  misc_feature: MA Experiment 108687 PARAMETER Experiment Name: Zm_Embryos-Flowers__P Parameter: Tissue Value: Embryo vs. Aerial+
  misc_feature: MA Experiment ID: 108688 Result: Down-regulated in Transcription
  misc_feature: MA Experiment 108688 PARAMETER Experiment Name: Zm_Embryos-Flowers__P Parameter: Tissue Value: Immature Flowers vs. Aerial+
  misc_feature: MA Experiment ID: 20000477 Result: Down-regulated in Transcription
  misc_feature: MA Experiment 20000477 PARAMETER Experiment Name: Zm_5mM_SA_P Parameter: Age (day) Value: 10
  misc_feature: MA Experiment 20000477 PARAMETER Experiment Name: Zm_5mM_SA_P Parameter: Organism Value: Zea mays
  misc_feature: MA Experiment 20000477 PARAMETER Experiment Name: Zm_5mM_SA_P Parameter: Plant Line Value: 35A19
  misc_feature: MA Experiment 20000477 PARAMETER Experiment Name: Zm_5mM_SA_P Parameter: Timepoint (hr) Value: 48
  misc_feature: MA Experiment 20000477 PARAMETER Experiment Name: Zm_5mM_SA_P Parameter: Tissue Value: Aerial
  misc_feature: MA Experiment 20000477 PARAMETER Experiment Name: Zm_5mM_SA_P Parameter: Treatment Value: 5mM SA vs. No Treatment
  misc_feature: MA Experiment ID: 20000478 Result: Down-regulated in Transcription
  misc_feature: MA Experiment 20000478 PARAMETER Experiment Name: Zm_5mM_SA_P Parameter: Age (day) Value: 11
  misc_feature: MA Experiment 20000478 PARAMETER Experiment Name: Zm_5mM_SA_P Parameter: Organism Value: Zea mays
  misc_feature: MA Experiment 20000478 PARAMETER Experiment Name: Zm_5mM_SA_P Parameter: Plant Line Value: 35A19
  misc_feature: MA Experiment 20000478 PARAMETER Experiment Name: Zm_5mM_SA_P Parameter: Timepoint (hr) Value: 72
  misc_feature: MA Experiment 20000478 PARAMETER Experiment Name: Zm_5mM_SA_P Parameter: Tissue Value: Aerial
  misc_feature: MA Experiment 20000478 PARAMETER Experiment Name: Zm_5mM_SA_P Parameter: Treatment Value: 5mM SA vs. No Treatment
  misc_feature: MA Experiment ID: 20000479 Result: Down-regulated in Transcription
  misc_feature: MA Experiment 20000479 PARAMETER Experiment Name: Zm_Drought_P Parameter: Age (day) Value: 10
  misc_feature: MA Experiment 20000479 PARAMETER Experiment Name: Zm_Drought_P Parameter: Organism Value: Zea mays
  misc_feature: MA Experiment 20000479 PARAMETER Experiment Name: Zm_Drought_P Parameter: Plant Line Value: 35A19
  misc_feature: MA Experiment 20000479 PARAMETER Experiment Name: Zm_Drought_P Parameter: Timepoint (hr) Value: 48
  misc_feature: MA Experiment 20000479 PARAMETER Experiment Name: Zm_Drought_P Parameter: Tissue Value: Aerial
  misc_feature: MA Experiment 20000479 PARAMETER Experiment Name: Zm_Drought_P Parameter: Treatment Value: Drought vs. No Drought
  misc_feature: MA Experiment ID: 20000480 Result: Down-regulated in Transcription
  misc_feature: MA Experiment 20000480 PARAMETER Experiment Name: Zm_Drought_P Parameter: Age (day) Value: 11
  misc_feature: MA Experiment 20000480 PARAMETER Experiment Name: Zm_Drought_P Parameter: Organism Value: Zea mays
  misc_feature: MA Experiment 20000480 PARAMETER Experiment Name: Zm_Drought_P Parameter: Plant Line Value: 35A19
  misc_feature: MA Experiment 20000480 PARAMETER Experiment Name: Zm_Drought_P Parameter: Timepoint (hr) Value: 72
  misc_feature: MA Experiment 20000480 PARAMETER Experiment Name: Zm_Drought_P Parameter: Tissue Value: Aerial
  misc_feature: MA Experiment 20000480 PARAMETER Experiment Name: Zm_Drought_P Parameter: Treatment Value: Drought vs. No Drought
  misc_feature: MA Experiment ID: 20000488 Result: Down-regulated in Transcription
  misc_feature: MA Experiment 20000488 PARAMETER Experiment Name: Zm_50mM_NH4NO3_L_to_H_P Parameter: Organism Value: Zea mays
  misc_feature: MA Experiment 20000488 PARAMETER Experiment Name: Zm_50mM_NH4NO3_L_to_H_P Parameter: Timepoint (hr) Value: 8
  misc_feature: MA Experiment 20000488 PARAMETER Experiment Name: Zm_50mM_NH4NO3_L_to_H_P Parameter: Tissue Value: Leaves
  misc_feature: MA Experiment 20000488 PARAMETER Experiment Name: Zm_50mM_NH4NO3_L_to_H_P Parameter: Treatment Value: 50mM NH4NO3 vs. 100mM Mannitol
  misc_feature: MA Experiment ID: 20000626 Result: Down-regulated in Transcription
  misc_feature: MA Experiment 20000626 PARAMETER Experiment Name: Zm_Herbicide-Treatments_P Parameter: Timepoint (hr) Value: 12
  misc_feature: MA Experiment 20000626 PARAMETER Experiment Name: Zm_Herbicide-Treatments_P Parameter: Tissue Value: Aerial
  misc_feature: MA Experiment 20000626 PARAMETER Experiment Name: Zm_Herbicide-Treatments_P Parameter: Treatment Value: Roundup vs. No Treatment
agggacggagcagttggtcgcccgccattggtccgccgatatctatttttcctctctctccttttctctgcttcagttcccgtccacgagcaggtgtagtagcttctagtagctagcaagtcggccagcacgctcgctcgcagcagtcgctagccagacagcattggcgccggcccgctcgcacgcgcgctatggaggaggcgaggcaaaggcggcggctgtgcctgtgcctggtggtggcggccgggagctgggcgctgctggcggcggtggcgcggtgcgacccgcaggtgccgtgctacttcatcttcggcgactcgctggtggacaacggcaacaacaactacatcgtgtcgctggcgcgcgccaactacccgccctacggcatcgacttcgccgccggcccgtcggggcgcttcaccaacggactcaccaccgtcgatgtcatcgctcaacttctgggtttcgacaacttcatcccgccgttcgccgcaacgagcgcagaccagctcctgggcggcgccaacttcgcctccgcggccgccggcatccgcgccgaaaccggccagcagctgggcgggcggatcccgttcgcggggcaggtgcagaactaccagacggcggtgcagacgctggtgagcatcctgggcgaccaggacacggcgtcggaccacctgagccggtgcatcttcagcgtgggcatgggcagcaacgactacctcaacaactacttcatgccggccttctacaacacgggcagccggtacaccccggagcagttcgccgactcgctcatcgccgactaccgccgccacctgcgggtgctgtacaactacggcgcgcgcaaggtggtgatgatcggggtcggccaggtcgggtgcagccccaacgagctggcccgctacagcgccgacggcgtcacctgcgtcgaccgcatcgacgacgccatccagatgttcaaccgccgcctcgtcggcctcgtcgacgagttcaacgcgctcccaggcgcgcacttcaccttcatcaacgcctacaacatcttcgacgacatcctcgccaacgccgcctcctacgggttcacggtgaccaacgccgggtgctgcggggtcggcaggaacaacgggcaggtgacgtgcctgccctaccaggcgccgtgcgccaacagggaccagcacatcttctgggacgccttccacccgtcggaggcggccaacatcatcgtcggccgccggtcctaccgcgccgagtcgcccaacgacgtctacccgatggacatcagcacgctcgcctccatctgattctcattctgatccctccataaatataaacataaatatatatataatccacccaccactgcgcaaatgctgcaatactaaacggggctccaagaggaggtagccgtgcaattctttcctgtgtacaagctcgcgccttatctgtaatttttcatgctttcatatatttgcatcgggcactt

SEQ ID NO: 5595 - protein, 368 aa, Zea mays subsp. mays
  peptide (1)..(368): Ceres Seq. ID no. 12435039
  misc_feature (37)..(348): Pfam Name: GDSL-like Lipase/Acylhydrolase Pfam Description: GDSL-like Lipase/Acylhydrolase
  misc_feature (9)..(368): Homolog of NCBI NO: 34910808 NR Description: GDSL-motif lipase/hydrolase-like protein [Oryza
  misc_feature (23)..(368): Homolog of NCBI NO: 34909504 NR Description: putative GDSL-motif lipase/hydrolase-like protein
  misc_feature (7)..(368): Homolog of NCBI NO: 15242458 NR Description: GDSL-motif lipase/hydrolase-like protein; protein At5g45670.1, supported by cDNA: 18389., supported by cDNA:
  misc_feature (7)..(368): Homolog of NCBI NO: 21553940 NR Description: GDSL-motif lipase/hydrolase-like protein
  misc_feature (12)..(368): Homolog of NCBI NO: 7485419 NR Description: hypothetical protein F13C5.140 - Arabidopsis >gi|2832625|emb|CAA16754.1| putative protein [Arabidopsis >gi|7268691|emb|CAB78899.1| putative protein [Arabidopsis
  misc_feature (12)..(368): Homolog of NCBI NO: 18415211 NR Description: Expressed protein; protein id: At4g18970.1, by cDNA: 42850., supported by cDNA: gi_16604576, supported by gi_21281049 [Arabidopsis thaliana] >gi|16604577|gb|AAL24090.1|
  misc_feature (12)..(368): Homolog of NCBI NO: 21618199 NR Description: GDSL-motif lipase/hydrolase-like protein
  misc_feature (13)..(368): Homolog of NCBI NO: 15220512 NR Description: lipase/hydrolase, putative; protein id: supported by cDNA: 6680., supported by cDNA: gi_15215767
  misc_feature (13)..(368): Homolog of NCBI NO: 21594055 NR Description: lipase/hydrolase, putative [Arabidopsis thaliana]
  misc_feature (11)..(368): Homolog of NCBI NO: 21592417 NR Description: lipase/hydrolase, putative [Arabidopsis thaliana]
MEEARQRRRLCLCLVVAAGSWALLAAVARCDPQVPCYFIFGDSLVDNGNNNYIVSLARANYPPYGIDFAAGPSGRFTNGLTTVDVIAQLLGFDNFIPPFAATSADQLLGGANFASAAAGIRAETGQQLGGRIPFAGQVQNYQTAVQTLVSILGDQDTASDHLSRCIFSVGMGSNDYLNNYFMPAFYNTGSRYTPEQFADSLIADYRRHLRVLYNYGARKVVMIGVGQVGCSPNELARYSADGVTCVDRIDDAIQMFNRRLVGLVDEFNALPGAHFTFINAYNIFDDILANAASYGFTVTNAGCCGVGRNNGQVTCLPYQAPCANRDQHIFWDAFHPSEAANIIVGRRSYRAESPNDVYPMDISTLASI

SEQ ID NO: 5596 - protein, 198 aa, Zea mays subsp. mays
  peptide (1)..(198): Ceres Seq. ID no. 12435040
  misc_feature (1)..(178): Pfam Name: GDSL-like Lipase/Acylhydrolase Pfam Description: GDSL-like Lipase/Acylhydrolase
  misc_feature (1)..(198): Homolog of NCBI NO: 34910808 NR Description: GDSL-motif lipase/hydrolase-like protein [Oryza
  misc_feature (1)..(198): Homolog of NCBI NO: 34909504 NR Description: putative GDSL-motif lipase/hydrolase-like protein
  misc_feature (1)..(198): Homolog of NCBI NO: 15242458 NR Description: GDSL-motif lipase/hydrolase-like protein; protein At5g45670.1, supported by cDNA: 18389., supported by cDNA:
  misc_feature (1)..(198): Homolog of NCBI NO: 21553940 NR Description: GDSL-motif lipase/hydrolase-like protein
  misc_feature (1)..(198): Homolog of NCBI NO: 7485419 NR Description: hypothetical protein F13C5.140 - Arabidopsis >gi|2832625|emb|CAA16754.1| putative protein [Arabidopsis >gi|7268691|emb|CAB78899.1| putative protein [Arabidopsis
  misc_feature (1)..(198): Homolog of NCBI NO: 18415211 NR Description: Expressed protein; protein id: At4g18970.1, by cDNA: 42850., supported by cDNA: gi_16604576, supported by gi_21281049 [Arabidopsis thaliana] >gi|16604577|gb|AAL24090.1|
  misc_feature (1)..(198): Homolog of NCBI NO: 21618199 NR Description: GDSL-motif lipase/hydrolase-like protein
  misc_feature (1)..(198): Homolog of NCBI NO: 15220512 NR Description: lipase/hydrolase, putative; protein id: supported by cDNA: 6680., supported by cDNA: gi_15215767
  misc_feature (1)..(198): Homolog of NCBI NO: 21594055 NR Description: lipase/hydrolase, putative [Arabidopsis thaliana]
  misc_feature (1)..(198): Homolog of NCBI NO: 21592417 NR Description: lipase/hydrolase, putative [Arabidopsis thaliana]
MGSNDYLNNYFMPAFYNTGSRYTPEQFADSLIADYRRHLRVLYNYGARKVVMIGVGQVGCSPNELARYSADGVTCVDRIDDAIQMFNRRLVGLVDEFNALPGAHFTFINAYNIFDDILANAASYGFTVTNAGCCGVGRNNGQVTCLPYQAPCANRDQHIFWDAFHPSEAANIIVGRRSYRAESPNDVYPMDISTLASI

SEQ ID NO: 5597 - protein, 187 aa, Zea mays subsp. mays
  peptide (1)..(187): Ceres Seq. ID no. 12435041
  misc_feature (1)..(167): Pfam Name: GDSL-like Lipase/Acylhydrolase Pfam Description: GDSL-like Lipase/Acylhydrolase
  misc_feature (1)..(187): Homolog of NCBI NO: 34910808 NR Description: GDSL-motif lipase/hydrolase-like protein [Oryza
  misc_feature (1)..(187): Homolog of NCBI NO: 34909504 NR Description: putative GDSL-motif lipase/hydrolase-like protein
  misc_feature (1)..(187): Homolog of NCBI NO: 15242458 NR Description: GDSL-motif lipase/hydrolase-like protein; protein At5g45670.1, supported by cDNA: 18389., supported by cDNA:
  misc_feature (1)..(187): Homolog of NCBI NO: 21553940 NR Description: GDSL-motif lipase/hydrolase-like protein
  misc_feature (1)..(187): Homolog of NCBI NO: 7485419 NR Description: hypothetical protein F13C5.140 - Arabidopsis >gi|2832625|emb|CAA16754.1| putative protein [Arabidopsis >gi|7268691|emb|CAB78899.1| putative protein [Arabidopsis
  misc_feature (1)..(187): Homolog of NCBI NO: 18415211 NR Description: Expressed protein; protein id: At4g18970.1, by cDNA: 42850., supported by cDNA: gi_16604576, supported by gi_21281049 [Arabidopsis thaliana] >gi|16604577|gb|AAL24090.1|
  misc_feature (1)..(187): Homolog of NCBI NO: 21618199 NR Description: GDSL-motif lipase/hydrolase-like protein
  misc_feature (1)..(187): Homolog of NCBI NO: 15220512 NR Description: lipase/hydrolase, putative; protein id: supported by cDNA: 6680., supported by cDNA: gi_15215767
  misc_feature (1)..(187): Homolog of NCBI NO: 21594055 NR Description: lipase/hydrolase, putative [Arabidopsis thaliana]
  misc_feature (1)..(187): Homolog of NCBI NO: 21592417 NR Description: lipase/hydrolase, putative [Arabidopsis thaliana]
MPAFYNTGSRYTPEQFADSLIADYRRHLRVLYNYGARKVVMIGVGQVGCSPNELARYSADGVTCVDRIDDAIQMFNRRLVGLVDEFNALPGAHFTFINAYNIFDDILANAASYGFTVTNAGCCGVGRNNGQVTCLPYQAPCANRDQHIFWDAFHPSEAANIIVGRRSYRAESPNDVYPMDISTLASI

SEQ ID NO: 5598 - DNA, 1366 bp, Zea mays subsp. mays
  misc_feature (1)..(1366): Ceres Seq. ID no. 12405611
  misc_feature: MA Experiment ID: 108543 Result: Down-regulated in Transcription
  misc_feature: MA Experiment ID: 108687 Result: Down-regulated in Transcription
  misc_feature: MA Experiment 108687 PARAMETER Experiment Name: Zm_Embryos-Flowers__P Parameter: Tissue Value: Embryo vs. Aerial+
gtgtaggcatggcactaggttcgatttgggcctaaacaggctttggtgggacatccacatccttgtccgcggcgaaacaaaatttcccacagtgagcgaggttcccctcccgactcggtgatggcggcgccggcggcggacgaggcatggtgccggaagacggtgccacgggtgatggaactggtgtgtccgcgccttccgcagcgggacgcatgcgcgctgctcgctgtcagtccctggtgctaccgtgccctcgttgctaactccaggctctgggaggtacttgatctacgtgagatgaagaatgctggaaaccgacttatttcagcactttcactggcaaggtatcgtcacctcaaagtattaaaccttgaatttgctcaagatattgaggatcgatattttgttcatctaaaagaaacgagtggcatctcactggaaaatttggaattcctgaacctaaatgcatgtcagaagatctctgataaaggaattgaagctgttaccagtctttgtcctaatcttcagcgccttgctatctattggattgtaggactgacagactcaagtattgggcacattacaaagaactgcaagcatctagtgcaccttaacttgagcggttgtaagaatatcacggataaaggaatgcagttgattgctaataattaccaaggactaaagacattgaacataaccaggtgtgttaagttgacagatgatgggcttaaccaagttcttctgaagtgttcttcacttgaaagcctaaacctttttgccctttcaagttttactgacagtgtttatagggagataggatcattaagtaatcttacatttctagacctatgtggtgctcagaatctaacggacgatggccttgcatgcatatcaagatgtggacgtctaacatacctcaatttgacttggtgtgtacgtgttactgacgctggcattttagctattgcgcaaggttgtcgagccctcgaactgttaagtttgtttggaatagttggggtgaccgatgcatgccttgaggctttatcaaaatcttgctcgtccagcctcacaacactcgacgtaaatggctgcataggtattaagaggaggagccgggatgacctgctgaagctcttcccatcactgagttgcttcaaagtgcacagctagcaggcacggtggttctcgatggctttgtattctacatctaggaaggggaagggagatgttgaggtgtgtcttgacttcatgttcttgtgttagtatatactttctttgtttcggattttctatgttcgttgattttgctatgtatggagacattgtgtatatctaagttcgtatcaagagaagttctacagcagct

SEQ ID NO: 5599 - protein, 349 aa, Zea mays subsp. mays
  peptide (1)..(349): Ceres Seq. ID no. 12405612
  misc_feature (7)..(349): Homolog of NCBI NO: 18410977 NR Description: putative protein; protein id: At3g58530.1, by cDNA: 35534., supported by cDNA: gi_15450959, supported by gi_17978710 [Arabidopsis thaliana] >gi|21593045|gb|AAM64994.1|
  misc_feature (7)..(349): Homolog of NCBI NO: 15450960 NR Description: putative protein [Arabidopsis thaliana]
  misc_feature (96)..(349): Homolog of NCBI NO: 11357437 NR Description: hypothetical protein F14P22.120 - Arabidopsis >gi|6735370|emb|CAB68191.1| putative protein [Arabidopsis
  misc_feature (7)..(308): Homolog of NCBI NO: 11357437 NR Description: hypothetical protein F14P22.120 - Arabidopsis >gi|6735370|emb|CAB68191.1| putative protein [Arabidopsis
  misc_feature (7)..(324): Homolog of NCBI NO: 6164721 NR Description: F-box protein Fbl2 [Homo sapiens]
  misc_feature (7)..(324): Homolog of NCBI NO: 7022695 NR Description: unnamed protein product [Homo sapiens]
  misc_feature (1)..(324): Homolog of NCBI NO: 6063090 NR Description: F-box protein FBL2 [Homo sapiens]
  misc_feature (6)..(324): Homolog of NCBI NO: 30519963 NR Description: F-box and leucine-rich repeat protein 2 [Mus >gi|26332971|dbj|BAC30203.1| unnamed protein product [Mus >gi|26337583|dbj|BAC32477.1| unnamed protein product [Mus
  misc_feature (7)..(324): Homolog of NCBI NO: 5919219 NR Description: leucine-rich repeats containing F-box protein
  misc_feature (7)..(324): Homolog of NCBI NO: 16306582 NR Description: F-box and leucine-rich repeat protein 2; F-box
MAAPAADEAWCRKTVPRVMELVCPRLPQRDACALLAVSPWCYRALVANSRLWEVLDLREMKNAGNRLISALSLARYRHLKVLNLEFAQDIEDRYFVHLKETSGISLENLEFLNLNACQKISDKGIEAVTSLCPNLQRLAIYWIVGLTDSSIGHITKNCKHLVHLNLSGCKNITDKGMQLIANNYQGLKTLNITRCVKLTDDGLNQVLLKCSSLESLNLFALSSFTDSVYREIGSLSNLTFLDLCGAQNLTDDGLACISRCGRLTYLNLTWCVRVTDAGILAIAQGCRALELLSLFGIVGVTDACLEALSKSCSSSLTTLDVNGCIGIKRRSRDDLLKLFPSLSCFKVHS

SEQ ID NO: 5600 - protein, 331 aa, Zea mays subsp. mays
  peptide (1)..(331): Ceres Seq. ID no. 12405613
  misc_feature (1)..(331): Homolog of NCBI NO: 18410977 NR Description: putative protein; protein id: At3g58530.1, by cDNA: 35534., supported by cDNA: gi_15450959, supported by gi_17978710 [Arabidopsis thaliana] >gi|21593045|gb|AAM64994.1|
  misc_feature (1)..(331): Homolog of NCBI NO: 15450960 NR Description: putative protein [Arabidopsis thaliana]
  misc_feature (78)..(331): Homolog of NCBI NO: 11357437 NR Description: hypothetical protein F14P22.120 - Arabidopsis >gi|6735370|emb|CAB68191.1| putative protein [Arabidopsis
  misc_feature (1)..(290): Homolog of NCBI NO: 11357437 NR Description: hypothetical protein F14P22.120 - Arabidopsis >gi|6735370|emb|CAB68191.1| putative protein [Arabidopsis
  misc_feature (1)..(306): Homolog of NCBI NO: 6164721 NR Description: F-box protein Fbl2 [Homo sapiens]
  misc_feature (1)..(306): Homolog of NCBI NO: 7022695 NR Description: unnamed protein product [Homo sapiens]
  misc_feature (1)..(306): Homolog of NCBI NO: 6063090 NR Description: F-box protein FBL2 [Homo sapiens]
  misc_feature (1)..(306): Homolog of NCBI NO: 30519963 NR Description: F-box and leucine-rich repeat protein 2 [Mus >gi|26332971|dbj|BAC30203.1| unnamed protein product [Mus >gi|26337583|dbj|BAC32477.1| unnamed protein product [Mus
  misc_feature (1)..(306): Homolog of NCBI NO: 5919219 NR Description: leucine-rich repeats containing F-box protein
  misc_feature (1)..(306): Homolog of NCBI NO: 16306582 NR Description: F-box and leucine-rich repeat protein 2; F-box
MELVCPRLPQRDACALLAVSPWCYRALVANSRLWEVLDLREMKNAGNRLISALSLARYRHLKVLNLEFAQDIEDRYFVHLKETSGISLENLEFLNLNACQKISDKGIEAVTSLCPNLQRLAIYWIVGLTDSSIGHITKNCKHLVHLNLSGCKNITDKGMQLIANNYQGLKTLNITRCVKLTDDGLNQVLLKCSSLESLNLFALSSFTDSVYREIGSLSNLTFLDLCGAQNLTDDGLACISRCGRLTYLNLTWCVRVTDAGILAIAQGCRALELLSLFGIVGVTDACLEALSKSCSSSLTTLDVNGCIGIKRRSRDDLLKLFPSLSCFKVHS

SEQ ID NO: 5601 - protein, 290 aa, Zea mays subsp. mays
  peptide (1)..(290): Ceres Seq. ID no. 12405614
  misc_feature (1)..(290): Homolog of NCBI NO: 18410977 NR Description: putative protein; protein id: At3g58530.1, by cDNA: 35534., supported by cDNA: gi_15450959, supported by gi_17978710 [Arabidopsis thaliana] >gi|21593045|gb|AAM64994.1|
  misc_feature (1)..(290): Homolog of NCBI NO: 15450960 NR Description: putative protein [Arabidopsis thaliana]
  misc_feature (37)..(290): Homolog of NCBI NO: 11357437 NR Description: hypothetical protein F14P22.120 - Arabidopsis >gi|6735370|emb|CAB68191.1| putative protein [Arabidopsis
  misc_feature (1)..(249): Homolog of NCBI NO: 11357437 NR Description: hypothetical protein F14P22.120 - Arabidopsis >gi|6735370|emb|CAB68191.1| putative protein [Arabidopsis
  misc_feature (1)..(265): Homolog of NCBI NO: 6164721 NR Description: F-box protein Fbl2 [Homo sapiens]
  misc_feature (1)..(265): Homolog of NCBI NO: 7022695 NR Description: unnamed protein product [Homo sapiens]
  misc_feature (1)..(265): Homolog of NCBI NO: 6063090 NR Description: F-box protein FBL2 [Homo sapiens]
  misc_feature (1)..(265): Homolog of NCBI NO: 30519963 NR Description: F-box and leucine-rich repeat protein 2 [Mus >gi|26332971|dbj|BAC30203.1| unnamed protein product [Mus >gi|26337583|dbj|BAC32477.1| unnamed protein product [Mus
  misc_feature (1)..(265): Homolog of NCBI NO: 5919219 NR Description: leucine-rich repeats containing F-box protein
  misc_feature (1)..(265): Homolog of NCBI NO: 16306582 NR Description: F-box and leucine-rich repeat protein 2; F-box
MKNAGNRLISALSLARYRHLKVLNLEFAQDIEDRYFVHLKETSGISLENLEFLNLNACQKISDKGIEAVTSLCPNLQRLAIYWIVGLTDSSIGHITKNCKHLVHLNLSGCKNITDKGMQLIANNYQGLKTLNITRCVKLTDDGLNQVLLKCSSLESLNLFALSSFTDSVYREIGSLSNLTFLDLCGAQNLTDDGLACISRCGRLTYLNLTWCVRVTDAGILAIAQGCRALELLSLFGIVGVTDACLEALSKSCSSSLTTLDVNGCIGIKRRSRDDLLKLFPSLSCFKVHS

SEQ ID NO: 5602 - DNA, 1460 bp, Zea mays subsp. mays
  misc_feature (1)..(1460): Ceres Seq. ID no. 12405090
  misc_feature: MA Experiment ID: 108527 Result: Up-regulated in Transcription
  misc_feature: MA Experiment 108527 PARAMETER Experiment Name: Zm_5mM_NO_P Parameter: Age (day) Value: 8
  misc_feature: MA Experiment 108527 PARAMETER Experiment Name: Zm_5mM_NO_P Parameter: Organism Value: Zea mays
  misc_feature: MA Experiment 108527 PARAMETER Experiment Name: Zm_5mM_NO_P Parameter: Plant Line Value: 35A19
  misc_feature: MA Experiment 108527 PARAMETER Experiment Name: Zm_5mM_NO_P Parameter: Timepoint (hr) Value: 6
  misc_feature: MA Experiment 108527 PARAMETER Experiment Name: Zm_5mM_NO_P Parameter: Tissue Value: Aerial
  misc_feature: MA Experiment 108527 PARAMETER Experiment Name: Zm_5mM_NO_P Parameter: Treatment Value: 5mM NO vs. No Treatment
  misc_feature: MA Experiment ID: 20000492 Result: Down-regulated in Transcription
  misc_feature: MA Experiment 20000492 PARAMETER Experiment Name: Zm_Hybrid_Seed_Dev_P Parameter: DAP Value: 12
  misc_feature: MA Experiment 20000492 PARAMETER Experiment Name: Zm_Hybrid_Seed_Dev_P Parameter: Organism Value: Zea mays
  misc_feature: MA Experiment 20000492 PARAMETER Experiment Name: Zm_Hybrid_Seed_Dev_P Parameter: Plant Line Value: 35A19
  misc_feature: MA Experiment 20000492 PARAMETER Experiment Name: Zm_Hybrid_Seed_Dev_P Parameter: Tissue Value: Fert Kernel vs. Unfert Floret
acagccagctgcccagctccgtccggcggaactcggaagccctacgctacgcctaccctcgctgtactactagctgccttcctacccgcttcccctctcctcccgacgccgtctccctccctccctccgcctccgccgtcgccgccgggacacgcgaagcttccaggtcttgtctttgggtagaacatgtcgtgctttgcgtgctgtggtgatgaagatacccaagtaccagacaccagggctcaatacccaggacaccatccagcgagggctgatgcataccgcccttctgatcaacctcccaagggtcctcagcctgtgaaaatgcaaccaatcgcagtccctgctattcctgtggatgagattagggaggtgaccaagggttttggtgatgaagctttgattggtgagggatcctttggcagagtatacttgggtgttctaagaaatggtaggagtgccgcggtcaaaaagttggattctaacaagcagccagaccaagagttcttggcccaggtgtctatggtgtcaaggctgaagcatgaaaatgttgtcgagttgcttggttactgtgctgatgggacactccgcgtccttgcttatgagttcgctacaatgggttcccttcatgatatgcttcatggaaggaaaggggttaaaggggctcaacccggtccagtcttatcgtggtcgcaacgtgtgaagatagcggttggggcagcgaaaggcctcgagtatcttcatgagaaagcgcagccccatatcatacaccgagacatcaagtctagcaacgtccttcttttcgatgacgatgtagctaagatcgctgactttgatctgtcgaaccaagctcctgacatggcagctcggcttcactcaactagggttctcggaacattcggataccatgcgcctgagtatgcgatgacggggcaactcagctctaagagtgatgtatatagttttggggttgttcttcttgagctgttgactgggaggaaacctgtcgaccatacattgccaaggggacagcagagtcttgtgacctgggctacaccaagacttagcgaagacaaggttagacagtgtgttgactcaagacttggaggggactatcctcctaaagctgttgcgaagtttgcggctgtcgccgccttgtgtgttcaatacgaagcggacttccggccgaacatgagcattgttgtcaaggcgctacaacccctgctgaatgcgcatgcgcgggcgactaaccctggagaacatgctgggtcataagctttgcgtttgcttctctccctcctcttgttcttgtatgataggtaaggtatatgactcgtcgatgtcgttgttgcggacatgtggctggcagcgtgtaatgtctgtgattattcttcccctgagctgtaaacaagattcttgtatccccacagtatttgattctttctattggtgccgttttt

SEQ ID NO: 5603 - protein, 362 aa, Zea mays subsp. mays
  peptide (1)..(362): Ceres Seq. ID no. 12405091
  misc_feature (1)..(360): Homolog of NCBI NO: 15228711 NR Description: serine/threonine protein kinase-like protein; id: At3g62220.1 [Arabidopsis thaliana] >gi|11259788|pir||T48014
  misc_feature (1)..(348): Homolog of NCBI NO: 15221111 NR Description: Pto kinase interactor 1, putative; protein id: supported by cDNA: gi_15451195, supported by cDNA: gi_20148446
  misc_feature (1)..(361): Homolog of NCBI NO: 34894710 NR Description: Putative Pto kinase interactor 1 [Oryza sativa
  misc_feature (1)..(348): Homolog of NCBI NO: 15451196 NR Description: similar to Pto kinase interactor 1 gb|AAC61805.1 thaliana] >gi|20148447|gb|AAM10114.1| similar to Pto kinase
  misc_feature (1)..(341): Homolog of NCBI NO: 1586940 NR Description: Ser/Thr kinase
  misc_feature (1)..(340): Homolog of NCBI NO: 25405922 NR Description: protein F21D18.6 [imported] - Arabidopsis >gi|8778533|gb|AAF79541.1|AC023673_29 F21D18.6 [Arabidopsis
  misc_feature (1)..(359): Homolog of NCBI NO: 15226492 NR Description: putative protein kinase; protein id: At2g47060.1, by cDNA: gi_13272438, supported by cDNA: gi_19424107, supported cDNA: gi_21281065 [Arabidopsis thaliana] >gi|7434311|pir||T02181
  misc_feature (1)..(347): Homolog of NCBI NO: 3668069 NR Description: Pto kinase interactor 1 [Lycopersicon esculentum]
  misc_feature (1)..(348): Homolog of NCBI NO: 22331138 NR Description: putative protein kinase; protein id: At3g17410.1, by cDNA: gi_17979366, supported by cDNA: gi_20465524 [Arabidopsis
MSCFACCGDEDTQVPDTRAQYPGHHPARADAYRPSDQPPKGPQPVKMQPIAVPAIPVDEIREVTKGFGDEALIGEGSFGRVYLGVLRNGRSAAVKKLDSNKQPDQEFLAQVSMVSRLKHENVVELLGYCADGTLRVLAYEFATMGSLHDMLHGRKGVKGAQPGPVLSWSQRVKIAVGAAKGLEYLHEKAQPHIIHRDIKSSNVLLFDDDVAKIADFDLSNQAPDMAARLHSTRVLGTFGYHAPEYAMTGQLSSKSDVYSFGVVLLELLTGRKPVDHTLPRGQQSLVTWATPRLSEDKVRQCVDSRLGGDYPPKAVAKFAAVAALCVQYEADFRPNMSIVVKALQPLLNAHARATNPGEHAGS

SEQ ID NO: 5604 - protein, 316 aa, Zea mays subsp. mays
  peptide (1)..(316): Ceres Seq. ID no. 12405092
  misc_feature (1)..(313): Homolog of NCBI NO: 15226492 NR Description: putative protein kinase; protein id: At2g47060.1, by cDNA: gi_13272438, supported by cDNA: gi_19424107, supported cDNA: gi_21281065 [Arabidopsis thaliana] >gi|7434311|pir||T02181
  misc_feature (1)..(301): Homolog of NCBI NO: 3668069 NR Description: Pto kinase interactor 1 [Lycopersicon esculentum]
  misc_feature (1)..(302): Homolog of NCBI NO: 22331138 NR Description: putative protein kinase; protein id: At3g17410.1, by cDNA: gi_17979366, supported by cDNA: gi_20465524 [Arabidopsis
  misc_feature (1)..(314): Homolog of NCBI NO: 15228711 NR Description: serine/threonine protein kinase-like protein; id: At3g62220.1 [Arabidopsis thaliana] >gi|11259788|pir||T48014
  misc_feature (1)..(302): Homolog of NCBI NO: 15221111 NR Description: Pto kinase interactor 1, putative; protein id: supported by cDNA: gi_15451195, supported by cDNA: gi_20148446
  misc_feature (1)..(315): Homolog of NCBI NO: 34894710 NR Description: Putative Pto kinase interactor 1 [Oryza sativa
  misc_feature (1)..(302): Homolog of NCBI NO: 15451196 NR Description: similar to Pto kinase interactor 1 gb|AAC61805.1 thaliana] >gi|20148447|gb|AAM10114.1| similar to Pto kinase
  misc_feature (1)..(295): Homolog of NCBI NO: 1586940 NR Description: Ser/Thr kinase
  misc_feature (1)..(294): Homolog of NCBI NO: 25405922 NR Description: protein F21D18.6 [imported] - Arabidopsis >gi|8778533|gb|AAF79541.1|AC023673_29 F21D18.6 [Arabidopsis
MQPIAVPAIPVDEIREVTKGFGDEALIGEGSFGRVYLGVLRNGRSAAVKKLDSNKQPDQEFLAQVSMVSRLKHENVVELLGYCADGTLRVLAYEFATMGSLHDMLHGRKGVKGAQPGPVLSWSQRVKIAVGAAKGLEYLHEKAQPHIIHRDIKSSNVLLFDDDVAKIADFDLSNQAPDMAARLHSTRVLGTFGYHAPEYAMTGQLSSKSDVYSFGVVLLELLTGRKPVDHTLPRGQQSLVTWATPRLSEDKVRQCVDSRLGGDYPPKAVAKFAAVAALCVQYEADFRPNMSIVVKALQPLLNAHARATNPGEHAGS

SEQ ID NO: 5605 - protein, 250 aa, Zea mays subsp. mays
  peptide (1)..(250): Ceres Seq. ID no. 12405093
  misc_feature (1)..(247): Homolog of NCBI NO: 15226492 NR Description: putative protein kinase; protein id: At2g47060.1, by cDNA: gi_13272438, supported by cDNA: gi_19424107, supported cDNA: gi_21281065 [Arabidopsis thaliana] >gi|7434311|pir||T02181
  misc_feature (1)..(235): Homolog of NCBI NO: 3668069 NR Description: Pto kinase interactor 1 [Lycopersicon esculentum]
  misc_feature (1)..(236): Homolog of NCBI NO: 22331138 NR Description: putative protein kinase; protein id: At3g17410.1, by cDNA: gi_17979366, supported by cDNA: gi_20465524 [Arabidopsis
  misc_feature (1)..(248): Homolog of NCBI NO: 15228711 NR Description: serine/threonine protein kinase-like protein; id: At3g62220.1 [Arabidopsis thaliana] >gi|11259788|pir||T48014
  misc_feature (1)..(236): Homolog of NCBI NO: 15221111 NR Description: Pto kinase interactor 1, putative; protein id: supported by cDNA: gi_15451195, supported by cDNA: gi_20148446
  misc_feature (1)..(249): Homolog of NCBI NO: 34894710 NR Description: Putative Pto kinase interactor 1 [Oryza sativa
  misc_feature (1)..(236): Homolog of NCBI NO: 15451196 NR Description: similar to Pto kinase interactor 1 gb|AAC61805.1 thaliana] >gi|20148447|gb|AAM10114.1| similar to Pto kinase
  misc_feature (1)..(229): Homolog of NCBI NO: 1586940 NR Description: Ser/Thr kinase
  misc_feature (1)..(228): Homolog of NCBI NO: 25405922 NR Description: protein F21D18.6 [imported] - Arabidopsis >gi|8778533|gb|AAF79541.1|AC023673_29 F21D18.6 [Arabidopsis
MVSRLKHENVVELLGYCADGTLRVLAYEFATMGSLHDMLHGRKGVKGAQPGPVLSWSQRVKIAVGAAKGLEYLHEKAQPHIIHRDIKSSNVLLFDDDVAKIADFDLSNQAPDMAARLHSTRVLGTFGYHAPEYAMTGQLSSKSDVYSFGVVLLELLTGRKPVDHTLPRGQQSLVTWATPRLSEDKVRQCVDSRLGGDYPPKAVAKFAAVAALCVQYEADFRPNMSIVVKALQPLLNAHARATNPGEHAGS

SEQ ID NO: 5606 - DNA, 1161 bp, Zea mays subsp. mays
  misc_feature (1)..(1161): Ceres Seq. ID no. 12342860
  misc_feature: MA Experiment ID: 108515 Result: Up-regulated in Transcription
  misc_feature: MA Experiment 108515 PARAMETER Experiment Name: Zm_2mM_SA_P Parameter: Age (day) Value: 8
  misc_feature: MA Experiment 108515 PARAMETER Experiment Name: Zm_2mM_SA_P Parameter: Organism Value: Zea mays
  misc_feature: MA Experiment 108515 PARAMETER Experiment Name: Zm_2mM_SA_P Parameter: Plant Line Value: 35A19
  misc_feature: MA Experiment 108515 PARAMETER Experiment Name: Zm_2mM_SA_P Parameter: Timepoint (hr) Value: 12
  misc_feature: MA Experiment 108515 PARAMETER Experiment Name: Zm_2mM_SA_P Parameter: Tissue Value: Aerial
  misc_feature: MA Experiment 108515 PARAMETER Experiment Name: Zm_2mM_SA_P Parameter: Treatment Value: 2mM SA vs. No Treatment
  misc_feature: MA Experiment ID: 108527 Result: Up-regulated in Transcription
  misc_feature: MA Experiment 108527 PARAMETER Experiment Name: Zm_5mM_NO_P Parameter: Age (day) Value: 8
  misc_feature: MA Experiment 108527 PARAMETER Experiment Name: Zm_5mM_NO_P Parameter: Organism Value: Zea mays
  misc_feature: MA Experiment 108527 PARAMETER Experiment Name: Zm_5mM_NO_P Parameter: Plant Line Value: 35A19
  misc_feature: MA Experiment 108527 PARAMETER Experiment Name: Zm_5mM_NO_P Parameter: Timepoint (hr) Value: 6
  misc_feature: MA Experiment 108527 PARAMETER Experiment Name: Zm_5mM_NO_P Parameter: Tissue Value: Aerial
  misc_feature: MA Experiment 108527 PARAMETER Experiment Name: Zm_5mM_NO_P Parameter: Treatment Value: 5mM NO vs. No Treatment
  misc_feature: MA Experiment ID: 108529 Result: Up-regulated in Transcription
  misc_feature: MA Experiment 108529 PARAMETER Experiment Name: Zm_Imbibed_Seeds_P Parameter: Age (day) Value: 5 vs. 2
  misc_feature: MA Experiment 108529 PARAMETER Experiment Name: Zm_Imbibed_Seeds_P Parameter: Organism Value: Zea mays
  misc_feature: MA Experiment 108529 PARAMETER Experiment Name: Zm_Imbibed_Seeds_P Parameter: Plant Line Value: 35A19
  misc_feature: MA Experiment 108529 PARAMETER Experiment Name: Zm_Imbibed_Seeds_P Parameter: Tissue Value: Roots vs. Embryo
  misc_feature: MA Experiment ID: 108535 Result: Down-regulated in Transcription
  misc_feature: MA Experiment 108535 PARAMETER Experiment Name: Zm_Meristem_P Parameter: Age (day) Value: 8
  misc_feature: MA Experiment 108535 PARAMETER Experiment Name: Zm_Meristem_P Parameter: Organism Value: Zea mays
  misc_feature: MA Experiment 108535 PARAMETER Experiment Name: Zm_Meristem_P Parameter: Plant Line Value: 35A19
  misc_feature: MA Experiment 108535 PARAMETER Experiment Name: Zm_Meristem_P Parameter: Tissue Value: Root Meristem vs. Above Root Meristem
  misc_feature: MA Experiment ID: 108544 Result: Down-regulated in Transcription
  misc_feature: MA Experiment ID: 108547 Result: Down-regulated in Transcription
  misc_feature: MA Experiment 108547 PARAMETER Experiment Name: Zm_Imbibed_Seeds_P Parameter: Age (day) Value: 4 vs. 2
  misc_feature: MA Experiment 108547 PARAMETER Experiment Name: Zm_Imbibed_Seeds_P Parameter: Organism Value: Zea mays
  misc_feature: MA Experiment 108547 PARAMETER Experiment Name: Zm_Imbibed_Seeds_P Parameter: Plant Line Value: 35A19
  misc_feature: MA Experiment 108547 PARAMETER Experiment Name: Zm_Imbibed_Seeds_P Parameter: Tissue Value: Aerial vs. Embryo
  misc_feature: MA Experiment ID: 108687 Result: Down-regulated in Transcription
  misc_feature: MA Experiment 108687 PARAMETER Experiment Name: Zm_Embryos-Flowers__P Parameter: Tissue Value: Embryo vs. Aerial+
  misc_feature: MA Experiment ID: 20000535 Result: Up-regulated in Transcription
  misc_feature: MA Experiment 20000535 PARAMETER Experiment Name: Zm_Hybrid_Seed_Dev_P Parameter: DAP Value: 30 vs. 12
  misc_feature: MA Experiment 20000535 PARAMETER Experiment Name: Zm_Hybrid_Seed_Dev_P Parameter: Organism Value: Zea mays
  misc_feature: MA Experiment 20000535 PARAMETER Experiment Name: Zm_Hybrid_Seed_Dev_P Parameter: Plant Line Value: 35A19
  misc_feature: MA Experiment 20000535 PARAMETER Experiment Name: Zm_Hybrid_Seed_Dev_P Parameter: Tissue Value: Embryo vs. Unfert Floret
  misc_feature: MA Experiment ID: 20000626 Result: Up-regulated in Transcription
  misc_feature: MA Experiment 20000626 PARAMETER Experiment Name: Zm_Herbicide-Treatments_P Parameter: Timepoint (hr) Value: 12
  misc_feature: MA Experiment 20000626 PARAMETER Experiment Name: Zm_Herbicide-Treatments_P Parameter: Tissue Value: Aerial
  misc_feature: MA Experiment 20000626 PARAMETER Experiment Name: Zm_Herbicide-Treatments_P Parameter: Treatment Value: Roundup vs. No Treatment
  misc_feature: MA Experiment ID: 20000630 Result: Up-regulated in Transcription
  misc_feature: MA Experiment 20000630 PARAMETER Experiment Name: Zm_Herbicide-Treatments_P Parameter: Timepoint (hr) Value: 4
  misc_feature: MA Experiment 20000630 PARAMETER Experiment Name: Zm_Herbicide-Treatments_P Parameter: Tissue Value: Aerial
  misc_feature: MA Experiment 20000630 PARAMETER Experiment Name: Zm_Herbicide-Treatments_P Parameter: Treatment Value: Roundup vs. No Treatment
tcccctctgccccgctctgtcatctttgactgcccctgtccggttcctcccctccatcccactccacgccacgccacccccaccggccaagcaaacacgctgcacatttcagttcagacggtccaagaacagcaccaagaaagactccttgccgctcttcttgcttggctactgactaggagagctccctgccgctggttgatcaacagaggcaggcggacggcatggtcagctctatgccgctgtcctcgctgctgctgctgctctccgcagccagcttcggcggcggcgtaaggctcggcgatggtggctacgaggactggaggctcggcaccgccacctacgtcaaggagttccagtcacaccctctcaatgatggcggtggcgcctgcgggtacggcgacctggacatcttcaggtacgggcgctacacgacggggctgagcgcggcgctgttcgggcgcggcggcgcctgcggcggctgctacgagctgcggtgcgtcaaccacatccagtggtgcctccggggcagccccacggtggtggtgacggcgacggacttctgcccggccaacatgggcctcgccgacgacgacgccggcggctggtgcaacttcccgcgggagcacctcgagctgtcggaggccgcgttcctccgcgtcgccaaggccaaggccggcatcgtgccggtgcagttccggagggtgagctgcgacagggccggcggcatgcggttcaccatcaccggtagcgcccacttcctgcaggtgctcatcaccaacgtggcggcggacggcgaggtggcggccgtgaaggtgaaggggtcgaggacggggtggatcccgatggggcggaactggggccagaactggcagtgcgacgccgacctccgcgcccagccgctgtcgttcgaggtcaccggcgggaggggcaggacggtcaccgcctacagcgtggcgccggcggactggatgttcgcgcagacgttcgagggcaagcagttcgccgagtagagatcgacgccgaaaaccaactctccggcggtggtgatgtaagtagaattatacggatgtcttcttgctcgcgagtcgtgaccggcgactcgagaaaacgagacgtattgaatggcgaaaggatttccagtcacaagaaagtggcagt

SEQ ID NO: 5607 - protein, 262 aa, Zea mays subsp. mays
  peptide (1)..(262): Ceres Seq. ID no. 12342861
  misc_feature (169)..(246): Pfam Name: Pollen allergen Pfam Description: Pollen allergen
  misc_feature (53)..(262): Homolog of NCBI NO: 16517043 NR Description: alpha-expansin [Oryza sativa]
  misc_feature (31)..(260): Homolog of NCBI NO: 15233735 NR Description: expansin, putative; protein id: At4g38210.1, by cDNA: 32072. [Arabidopsis thaliana]
  misc_feature (1)..(260): Homolog of NCBI NO: 21314543 NR Description: alpha-expansin precursor [Gossypium hirsutum]
  misc_feature (1)..(260): Homolog of NCBI NO: 7484721 NR Description: expansin - upland cotton
  misc_feature (2)..(260): Homolog of NCBI NO: 20135554 NR Description: expansin 1 [Musa acuminata]
  misc_feature (32)..(260): Homolog of NCBI NO: 18396479 NR Description: expansin, putative; protein id: At3g03220.1, by cDNA: 37211., supported by cDNA: gi_16604574, supported by
  misc_feature (8)..(260): Homolog of NCBI NO: 14193751 NR Description: alpha-expansin [Zea mays]
  misc_feature (1)..(260): Homolog of NCBI NO: 30841322 NR Description: expansin [Gossypium hirsutum]
  misc_feature (32)..(260): Homolog of NCBI NO: 21618283 NR Description: Alpha-expansin 13 precursor (At-EXP13) (AtEx13)
  misc_feature (1)..(260): Homolog of NCBI NO: 40217880 NR Description: expansin-3 [Petunia x hybrida]
MVSSMPLSSLLLLLSAASFGGGVRLGDGGYEDWRLGTATYVKEFQSHPLNDGGGACGYGDLDIFRYGRYTTGLSAALFGRGGACGGCYELRCVNHIQWCLRGSPTVVVTATDFCPANMGLADDDAGGWCNFPREHLELSEAAFLRVAKAKAGIVPVQFRRVSCDRAGGMRFTITGSAHFLQVLITNVAADGEVAAVKVKGSRTGWIPMGRNWGQNWQCDADLRAQPLSFEVTGGRGRTVTAYSVAPADWMFAQTFEGKQFAE

SEQ ID NO: 5608 - protein, 258 aa, Zea mays subsp. mays
  peptide (1)..(258): Ceres Seq. ID no. 12342862
  misc_feature (165)..(242): Pfam Name: Pollen allergen Pfam Description: Pollen allergen
  misc_feature (49)..(258): Homolog of NCBI NO: 16517043 NR Description: alpha-expansin [Oryza sativa]
  misc_feature (27)..(256): Homolog of NCBI NO: 15233735 NR Description: expansin, putative; protein id: At4g38210.1, by cDNA: 32072. [Arabidopsis thaliana]
  misc_feature (1)..(256): Homolog of NCBI NO: 21314543 NR Description: alpha-expansin precursor [Gossypium hirsutum]
  misc_feature (1)..(256): Homolog of NCBI NO: 7484721 NR Description: expansin - upland cotton
  misc_feature (1)..(256): Homolog of NCBI NO: 20135554 NR Description: expansin 1 [Musa acuminata]
  misc_feature (28)..(256): Homolog of NCBI NO: 18396479 NR Description: expansin, putative; protein id: At3g03220.1, by cDNA: 37211., supported by cDNA: gi_16604574, supported by
  misc_feature (4)..(256): Homolog of NCBI NO: 14193751 NR Description: alpha-expansin [Zea mays]
  misc_feature (1)..(256): Homolog of NCBI NO: 30841322 NR Description: expansin [Gossypium hirsutum]
  misc_feature (28)..(256): Homolog of NCBI NO: 21618283 NR Description: Alpha-expansin 13 precursor (At-EXP13) (AtEx13)
  misc_feature (1)..(256): Homolog of NCBI NO: 40217880 NR Description: expansin-3 [Petunia x hybrida]
MPLSSLLLLLSAASFGGGVRLGDGGYEDWRLGTATYVKEFQSHPLNDGGGACGYGDLDIFRYGRYTTGLSAALFGRGGACGGCYELRCVNHIQWCLRGSPTVVVTATDFCPANMGLADDDAGGWCNFPREHLELSEAAFLRVAKAKAGIVPVQFRRVSCDRAGGMRFTITGSAHFLQVLITNVAADGEVAAVKVKGSRTGWIPMGRNWGQNWQCDADLRAQPLSFEVTGGRGRTVTAYSVAPADWMFAQTFEGKQFAE

SEQ ID NO: 5609 - protein, 145 aa, Zea mays subsp. mays
  peptide (1)..(145): Ceres Seq. ID no. 12342863
  misc_feature (52)..(129): Pfam Name: Pollen allergen Pfam Description: Pollen allergen
  misc_feature (1)..(145): Homolog of NCBI NO: 16517043 NR Description: alpha-expansin [Oryza sativa]
  misc_feature (1)..(143): Homolog of NCBI NO: 15233735 NR Description: expansin, putative; protein id: At4g38210.1, by cDNA: 32072. [Arabidopsis thaliana]
  misc_feature (1)..(143): Homolog of NCBI NO: 21314543 NR Description: alpha-expansin precursor [Gossypium hirsutum]
  misc_feature (1)..(143): Homolog of NCBI NO: 7484721 NR Description: expansin - upland cotton
  misc_feature (1)..(143): Homolog of NCBI NO: 20135554 NR Description: expansin 1 [Musa acuminata]
  misc_feature (1)..(143): Homolog of NCBI NO: 18396479 NR Description: expansin, putative; protein id: At3g03220.1, by cDNA: 37211., supported by cDNA: gi_16604574, supported by
  misc_feature (1)..(143): Homolog of NCBI NO: 14193751 NR Description: alpha-expansin [Zea mays]
  misc_feature (1)..(143): Homolog of NCBI NO: 30841322 NR Description: expansin [Gossypium hirsutum]
  misc_feature (1)..(143): Homolog of NCBI NO: 21618283 NR Description: Alpha-expansin 13 precursor (At-EXP13) (AtEx13)
  misc_feature (1)..(143): Homolog of NCBI NO: 40217880 NR Description: expansin-3 [Petunia x hybrida]
MGLADDDAGGWCNFPREHLELSEAAFLRVAKAKAGIVPVQFRRVSCDRAGGMRFTITGSAHFLQVLITNVAADGEVAAVKVKGSRTGWIPMGRNWGQNWQCDADLRAQPLSFEVTGGRGRTVTAYSVAPADWMFAQTFEGKQFAE

SEQ ID NO: 5610 - DNA, 1027 bp, Zea mays subsp. mays
  misc_feature (1)..(1027): Ceres Seq. ID no. 12374422
  misc_feature: MA Experiment ID: 108543 Result: Down-regulated in Transcription
atagtgccatagtggacaccatattcacccatttcagccggcagctaggtatttcttttttcaacaagccagaccgccaggcgccagtagccattgagtccttgacccgaagtcccacagccgccgccaaaagggttcctcaccatcttgaacgctcgccggaccaatcccaagcagtcctcgcagcagatggcagttcccggcggccgcaacggactcagggacgaggacgacgacatggcccagcacgccgaggccttcggcggcgtctctgacgacgaggacgtgcccccccaccttcgcgccctcgccaacgccgcccagtccggcgacgtcaccgcccttgtggctgccctcgataatcatgatggcagtattgatgttccagttgaagatggtgatactttgctccatctggcatgcttatatggtcatcttccttgtgtgcagctattgctggaacgtggagctagcttggaatgccaagacgaagaaggtgctattcctcttcacgatgcttgtgctggaggcttcactgagctggtccaatatattctcaactttgctgccaacaaggatggttgcgtagtgagaatgctcaacactattgattctgaaggcgatacgccgctccatcatgctgctagaggagaacatttggatgttgtcaagcttcttctccaggctggggcgtcccccaagaaggagaacacttacgggcagacacccgctgatatggctgaccaagacaccgaagttcgaaccctgttgactgccaagcaaattgaggcaagcacacacatgagtgatgattaagcggcattggaatccttagttgcaactggtactggtaatgttgagaaatagccgtaacatcttatctgccatccaaacttcatttgaactgaagtaatattgtaatcagactagtatggaggggttagcttagctacatgatcatgctccttttccttatcgctgcattatactaaagatgaagtggaacacccatcggtctttcttgtcc

SEQ ID NO: 5611 - protein, 208 aa, Zea mays subsp. mays
  peptide (1)..(208): Ceres Seq. ID no. 12374423
  misc_feature (69)..(101): Pfam Name: Ankyrin repeat Pfam Description: Ankyrin repeat
  misc_feature (1)..(204): Homolog of NCBI NO: 15451616 NR Description: Hypothetical protein with similarity to ankyrins
  misc_feature (1)..(194): Homolog of NCBI NO: 18398673 NR Description: expressed protein; protein id: At3g09890.1, by cDNA: 19531. [Arabidopsis thaliana]
  misc_feature (1)..(178): Homolog of NCBI NO: 6681330 NR Description: hypothetical protein [Arabidopsis thaliana]
  misc_feature (1)..(88): Homolog of NCBI NO: 27497215 NR Description: Unknown protein [Oryza sativa (japonica
  misc_feature (71)..(207): Homolog of NCBI NO: 27497215 NR Description: Unknown protein [Oryza sativa (japonica
  misc_feature (69)..(194): Homolog of NCBI NO: 28373837 NR Description: Chain A, 4ank: A Designed Ankyrin Repeat Protein
  misc_feature (32)..(207): Homolog of NCBI NO: 28274854 NR Description: ankyrin repeat protein E4_8 [synthetic construct]
  misc_feature (32)..(189): Homolog of NCBI NO: 28274850 NR Description: ankyrin repeat protein E3_19 [synthetic construct]
  misc_feature (32)..(189): Homolog of NCBI NO: 28373666 NR Description: Chain A, Sank E3_5: An Artificial Ankyrin Repeat >gi|28274848|gb|AAO25689.1| ankyrin repeat protein E3_5
  misc_feature (28)..(189): Homolog of NCBI NO: 28274852 NR Description: ankyrin repeat protein E4_2 [synthetic construct]
MAVPGGRNGLRDEDDDMAQHAEAFGGVSDDEDVPPHLRALANAAQSGDVTALVAALDNHDGSIDVPVEDGDTLLHLACLYGHLPCVQLLLERGASLECQDEEGAIPLHDACAGGFTELVQYILNFAANKDGCVVRMLNTIDSEGDTPLHHAARGEHLDVVKLLLQAGASPKKENTYGQTPADMADQDTEVRTLLTAKQIEASTHMSDD

SEQ ID NO: 5612 - protein, 192 aa, Zea mays subsp. mays
  peptide (1)..(192): Ceres Seq. ID no. 12374424
  misc_feature (53)..(85): Pfam Name: Ankyrin repeat Pfam Description: Ankyrin repeat
  misc_feature (1)..(188): Homolog of NCBI NO: 15451616 NR Description: Hypothetical protein with similarity to ankyrins
  misc_feature (1)..(178): Homolog of NCBI NO: 18398673 NR Description: expressed protein; protein id: At3g09890.1, by cDNA: 19531. [Arabidopsis thaliana]
  misc_feature (1)..(162): Homolog of NCBI NO: 6681330 NR Description: hypothetical protein [Arabidopsis thaliana]
  misc_feature (1)..(72): Homolog of NCBI NO: 27497215 NR Description: Unknown protein [Oryza sativa (japonica
  misc_feature (55)..(191): Homolog of NCBI NO: 27497215 NR Description: Unknown protein [Oryza sativa (japonica
  misc_feature (53)..(178): Homolog of NCBI NO: 28373837 NR Description: Chain A, 4ank: A Designed Ankyrin Repeat Protein
  misc_feature (16)..(191): Homolog of NCBI NO: 28274854 NR Description: ankyrin repeat protein E4_8 [synthetic construct]
  misc_feature (16)..(173): Homolog of NCBI NO: 28274850 NR Description: ankyrin repeat protein E3_19 [synthetic construct]
  misc_feature (16)..(173): Homolog of NCBI NO: 28373666 NR Description: Chain A, Sank E3_5: An Artificial Ankyrin Repeat >gi|28274848|gb|AAO25689.1| ankyrin repeat protein E3_5
  misc_feature (12)..(173): Homolog of NCBI NO: 28274852 NR Description: ankyrin repeat protein E4_2 [synthetic construct]
MAQHAEAFGGVSDDEDVPPHLRALANAAQSGDVTALVAALDNHDGSIDVPVEDGDTLLHLACLYGHLPCVQLLLERGASLECQDEEGAIPLHDACAGGFTELVQYILNFAANKDGCVVRMLNTIDSEGDTPLHHAARGEHLDVVKLLLQAGASPKKENTYGQTPADMADQDTEVRTLLTAKQIEASTHMSDD

SEQ ID NO: 5613 - DNA, 1345 bp, Zea mays subsp. mays
  misc_feature (1)..(1345): Ceres Seq. ID no. 13494449
  misc_feature: MA Experiment ID: 108522 Result: Up-regulated in Transcription
  misc_feature: MA Experiment 108522 PARAMETER Experiment Name: Zm_42deg_Heat_P Parameter: Age (day) Value: 8
  misc_feature: MA Experiment 108522 PARAMETER Experiment Name: Zm_42deg_Heat_P Parameter: Organism Value: Zea mays
  misc_feature: MA Experiment 108522 PARAMETER Experiment Name: Zm_42deg_Heat_P Parameter: Plant Line Value: 35A19
  misc_feature: MA Experiment 108522 PARAMETER Experiment Name: Zm_42deg_Heat_P Parameter: Temperature (deg C) Value: 42 vs. 22
  misc_feature: MA Experiment 108522 PARAMETER Experiment Name: Zm_42deg_Heat_P Parameter: Timepoint (hr) Value: 1
  misc_feature: MA Experiment 108522 PARAMETER Experiment Name: Zm_42deg_Heat_P Parameter: Tissue Value: Aerial
  misc_feature: MA Experiment ID: 20000108 Result: Down-regulated in Transcription
  misc_feature: MA Experiment 20000108 PARAMETER Experiment Name: Zm_Root-Tips_P Parameter: Age (day) Value: 12
  misc_feature: MA Experiment 20000108 PARAMETER Experiment Name: Zm_Root-Tips_P Parameter: Organism Value: Zea mays
  misc_feature: MA Experiment 20000108 PARAMETER Experiment Name: Zm_Root-Tips_P Parameter: Tissue Value: Root tips vs. Root mid region    35
  misc_feature: MA Experiment 20000108 PARAMETER Experiment Name: Zm_Root-Tips_P Parameter: Tissue Value: Root tips vs. Root mid region   Sequence Listing-Misc Features (4)
  misc_feature: MA Experiment ID: 20000479 Result: Up-regulated in Transcription
  misc_feature: MA Experiment 20000479 PARAMETER Experiment Name: Zm_Drought_P Parameter: Age (day) Value: 10
  misc_feature: MA Experiment 20000479 PARAMETER Experiment Name: Zm_Drought_P Parameter: Organism Value: Zea mays
  misc_feature: MA Experiment 20000479 PARAMETER Experiment Name: Zm_Drought_P Parameter: Plant Line Value: 35A19
  misc_feature: MA Experiment 20000479 PARAMETER Experiment Name: Zm_Drought_P Parameter: Timepoint (hr) Value: 48
  misc_feature: MA Experiment 20000479 PARAMETER Experiment Name: Zm_Drought_P Parameter: Tissue Value: Aerial
  misc_feature: MA Experiment 20000479 PARAMETER Experiment Name: Zm_Drought_P Parameter: Treatment Value: Drought vs. No Drought
gttgagaccgcagagcgctcgccgaagcccgtcctgtcctgtagctagctgatctccctccgaaactctctgctcgcccgctgcctgctggaagcttggcgcggtcccggcggcggcattctccggcaatggggtgcaaggcgtgcgacaagcccaagcccagctaccgcaagggcctgtggtcgccggaggaggaccagaagctccgcgactacatcctcctccacggccacggctgctggagcgcgctccccgccaaagccgggctccagcggaacggcaagagctgcaggctgcggtggatcaactacctccggccgggcctgaagcacggcaccttctccccggaggaggaggagacggtgatgagcctccacgccacgctcggcaacaagtggtctaggatcgccaaacacctgcctggcaggaccgacaacgaggtcaagaaccactggaactcgtacctcaagaagagggtcgagggcaaggatggacccagcacgccgccgtccgattcagacgactcgcattgcgccaagcccgggggcggaagcacggcgcgggagacgggagacgaccgcccagcggactactccggctcgtcggagccgcgcgagccgtcgtcgtcgtcgtcgcccgacacgagctgcctgacgggcccgcccaaggtcatgttcgtggactggctcgacatggactgcatgggtggtggtggtggtggcccgccgggcgcggcggcagcggcagcggcacctggtctgggcgctgctgcgggcgtggccagggccagcacgggcgatgatcagatgacgatggatgatgggtcggcgtccggtcgtgccgacgtgtccctgcacggtacgttcggtgacagcggcggcgccggctgctgggagttccacgagagcttcgatcagatgcaggcggccggcttctgcgacctgctctcctccattggcgagtactacttcggactcgactaggctctcggccctggttggtgatcggtcgttgctcaaaggatttgcgcgtttttttttttttaactttgttagaagtttcgatggatggctttgtctgtgcttgtaaattgttgtcgtgtacggtatagatagagcaattttaaaggcagataaaagtcaaggacggtgacgagtcacgagtgtcgtgtttcttgcgggttcactttggggaggagtggagagcaccgacggatgggtaggaagatttattagttatatatgaggatataaagtacttaagagttgcnacgcttgcagctagcgattgggctgcacaaactgtgctttcttaatttgaaaatggggcgtcctcttttagtgtt

SEQ ID NO: 5614 - protein, 284 aa, Zea mays subsp. mays
  peptide (1)..(284): Ceres Seq. ID no. 15222931
  misc_feature (15)..(62): Pfam Name: Myb-like DNA-binding domain Pfam Description: Myb-like DNA-binding domain
  misc_feature (4)..(187): Homolog of NCBI NO: 15242947 NR Description: myb family transcription factor(MYB19)
  misc_feature (13)..(187): Homolog of NCBI NO: 15235149 NR Description: myb family transcription factor [Arabidopsis
  misc_feature (13)..(187): Homolog of NCBI NO: 25387539 NR Description: myb-like protein [imported] - Arabidopsis thaliana
  misc_feature (1)..(183): Homolog of NCBI NO: 22329445 NR Description: myb family transcription factor [Arabidopsis >gi|17380966|gb|AAL36295.1| putative transcription factor thaliana] >gi|20465975|gb|AAM20173.1| putative transcription
  misc_feature (1)..(183): Homolog of NCBI NO: 25294104 NR Description: hypothetical protein [imported] - Arabidopsis >gi|3482929|gb|AAC33214.1| Putative transcription factor
  misc_feature (1)..(149): Homolog of NCBI NO: 34901838 NR Description: putative myb-related protein [Oryza sativa
  misc_feature (6)..(209): Homolog of NCBI NO: 28927688 NR Description: putative Myb-like DNA-binding protein [Oryza
  misc_feature (1)..(143): Homolog of NCBI NO: 34910458 NR Description: putative transcription factor [Oryza sativa
  misc_feature (8)..(188): Homolog of NCBI NO: 15229055 NR Description: myb family transcription factor [Arabidopsis
  misc_feature (1)..(134): Homolog of NCBI NO: 2129932 NR Description: myb-related protein 1 - tomato
MGCKACDKPKPSYRKGLWSPEEDQKLRDYILLHGHGCWSALPAKAGLQRNGKSCRLRWINYLRPGLKHGTFSPEEEETVMSLHATLGNKWSRIAKHLPGRTDNEVKNHWNSYLKKRVEGKDGPSTPPSDSDDSHCAKPGGGSTARETGDDRPADYSGSSEPREPSSSSSPDTSCLTGPPKVMFVDWLDMDCMGGGGGGPPGAAAAAAAPGLGAAAGVARASTGDDQMTMDDGSASGRADVSLHGTFGDSGGAGCWEFHESFDQMQAAGFCDLLSSIGEYYFGLD

SEQ ID NO: 5615 - protein, 205 aa, Zea mays subsp. mays
  peptide (1)..(205): Ceres Seq. ID no. 15222932
  misc_feature (1)..(108): Homolog of NCBI NO: 15242947 NR Description: myb family transcription factor(MYB19)
  misc_feature (1)..(108): Homolog of NCBI NO: 15235149 NR Description: myb family transcription factor [Arabidopsis
  misc_feature (1)..(108): Homolog of NCBI NO: 25387539 NR Description: myb-like protein [imported] - Arabidopsis thaliana
  misc_feature (1)..(104): Homolog of NCBI NO: 22329445 NR Description: myb family transcription factor [Arabidopsis >gi|17380966|gb|AAL36295.1| putative transcription factor thaliana] >gi|20465975|gb|AAM20173.1| putative transcription
  misc_feature (1)..(104): Homolog of NCBI NO: 25294104 NR Description: hypothetical protein [imported] - Arabidopsis >gi|3482929|gb|AAC33214.1| Putative transcription factor
  misc_feature (1)..(70): Homolog of NCBI NO: 34901838 NR Description: putative myb-related protein [Oryza sativa
  misc_feature (1)..(130): Homolog of NCBI NO: 28927688 NR Description: putative Myb-like DNA-binding protein [Oryza
  misc_feature (1)..(64): Homolog of NCBI NO: 34910458 NR Description: putative transcription factor [Oryza sativa
  misc_feature (1)..(109): Homolog of NCBI NO: 15229055 NR Description: myb family transcription factor [Arabidopsis
  misc_feature (1)..(55): Homolog of NCBI NO: 2129932 NR Description: myb-related protein 1 - tomato
MSLHATLGNKWSRIAKHLPGRTDNEVKNHWNSYLKKRVEGKDGPSTPPSDSDDSHCAKPGGGSTARETGDDRPADYSGSSEPREPSSSSSPDTSCLTGPPKVMFVDWLDMDCMGGGGGGPPGAAAAAAAPGLGAAAGVARASTGDDQMTMDDGSASGRADVSLHGTFGDSGGAGCWEFHESFDQMQAAGFCDLLSSIGEYYFGLD

SEQ ID NO: 5616 - DNA, 1041 bp, Zea mays subsp. mays
  misc_feature (1)..(1041): Ceres Seq. ID no. 13498730
  misc_feature: MA Experiment ID: 108529 Result: Up-regulated in Transcription
  misc_feature: MA Experiment 108529 PARAMETER Experiment Name: Zm_Imbibed_Seeds_P Parameter: Age (day) Value: 5 vs. 2
  misc_feature: MA Experiment 108529 PARAMETER Experiment Name: Zm_Imbibed_Seeds_P Parameter: Organism Value: Zea mays
  misc_feature: MA Experiment 108529 PARAMETER Experiment Name: Zm_Imbibed_Seeds_P Parameter: Plant Line Value: 35A19
  misc_feature: MA Experiment 108529 PARAMETER Experiment Name: Zm_Imbibed_Seeds_P Parameter: Tissue Value: Roots vs. Embryo
  misc_feature: MA Experiment ID: 108548 Result: Down-regulated in Transcription
  misc_feature: MA Experiment 108548 PARAMETER Experiment Name: Zm_20uM_KNO3_H-to-L_P Parameter: Age (day) Value: 11
  misc_feature: MA Experiment 108548 PARAMETER Experiment Name: Zm_20uM_KNO3_H-to-L_P Parameter: Organism Value: Zea mays
  misc_feature: MA Experiment 108548 PARAMETER Experiment Name: Zm_20uM_KNO3_H-to-L_P Parameter: Plant Line Value: 35A19
  misc_feature: MA Experiment 108548 PARAMETER Experiment Name: Zm_20uM_KNO3_H-to-L_P Parameter: Timepoint (hr) Value: 4
  misc_feature: MA Experiment 108548 PARAMETER Experiment Name: Zm_20uM_KNO3_H-to-L_P Parameter: Tissue Value: Roots
  misc_feature: MA Experiment 108548 PARAMETER Experiment Name: Zm_20uM_KNO3_H-to-L_P Parameter: Treatment Value: 20uM KNO3 vs. 60mM KNO3
  misc_feature: MA Experiment ID: 20000535 Result: Up-regulated in Transcription
  misc_feature: MA Experiment 20000535 PARAMETER Experiment Name: Zm_Hybrid_Seed_Dev_P Parameter: DAP Value: 30 vs. 12
  misc_feature: MA Experiment 20000535 PARAMETER Experiment Name: Zm_Hybrid_Seed_Dev_P Parameter: Organism Value: Zea mays
  misc_feature: MA Experiment 20000535 PARAMETER Experiment Name: Zm_Hybrid_Seed_Dev_P Parameter: Plant Line Value: 35A19
  misc_feature: MA Experiment 20000535 PARAMETER Experiment Name: Zm_Hybrid_Seed_Dev_P Parameter: Tissue Value: Embryo vs. Unfert Floret
taatcgaaaaaggtctctagtctccactccgctgtcgctccggcccagcagctcgaccaccaccgctccgcaggcaggaagccgccaaggacatggacgacgctcaggagcctccctcccctccctccccctcgcagtcatcctcctcctcttcctcgtcgtcctccgtggccccgaacccgaagaagcgggcgcgcaaggacggcagccggcacccgacgtaccgcggcgtgcgcatgcggagctggggcaagtgggtgtcggagatcagggagccccgcaagaagtctcgcatctggctgggcaccttcgccaccgcggagatggcggcgcgcgcgcacgacgtggccgcgctcgccatcaagggcgcgcgcgacgcgcacctcaacttcccgggcctcgcgcacctgctcccgcgcccggccaccgcggcgcccaaggacgtgcaggccgcggccgcgctcgccgcggccgccgacttccctctgccgccgtcccccggcggcgccaatgccaagagccccgagagcagcagctccggctccgcctccgcctccgcctccgacgacgccagcgccgcctcgccggcggcgccgcaggacgccgagcccaacccggacgacgcgctgttcgacctcccggacctgcttctggacctgagatgctgcgggccgtcgtcgtgggccgtcgacgacgacgtggccggcggcggcgcgttccggatcatcgaggagccgctgctgtgggagtactgaactgatcaatgccaccgcgccagtcctgtccttgagcggttggcagtgatcagcgagttcatgcatcggtagctgttgagtgttagatcgaccggacggacacatgtaaatgcagctcctttccgctcctctgtttcgtgctctggattactctgctgtttcttctctttatgccagatttaggtgccgcgcttgtataaagttagttcctttttttccctccttctcttgcttgatttggaagacaagaatatgtataaccataagaagcatcttatcttgtgcc

SEQ ID NO: 5617 - protein, 252 aa, Zea mays subsp. mays
  peptide (1)..(252): Ceres Seq. ID no. 13498731
NRKRSLVSTPLSLRPSSSTTTAPQAGSRQGHGRRSGASLPSLPLAVILLLFLVVLRGPEPEEAGAQGRQPAPDVPRRAHAELGQVGVGDQGAPQEVSHLAGHLRHRGDGGARARRGRARHQGRARRAPQLPGPRAPAPAPGHRGAQGRAGRGRARRGRRLPSAAVPRRRQCQEPREQQLRLRLRLRLRRRQRRLAGGAAGRRAQPGRRAVRPPGPASGPEMLRAVVVGRRRRRGRRRRVPDHRGAAAVGVLN

SEQ ID NO: 5618 - protein, 220 aa, Zea mays subsp. mays
  peptide (1)..(220): Ceres Seq. ID no. 13498732
  misc_feature (41)..(105): Pfam Name: AP2 domain Pfam Description: AP2 domain
  misc_feature (41)..(105): Pfam Name: AP2 domain Pfam Description: AP2 domain
  misc_feature (1)..(220): Homolog of NCBI NO: 38605848 NR Description: OSJNBb0034G17.6 [Oryza sativa (japonica
  misc_feature (1)..(220): Homolog of NCBI NO: 14140163 NR Description: putative AP2 domain containing protein [Oryza
  misc_feature (1)..(219): Homolog of NCBI NO: 21908034 NR Description: DRE binding factor 2 [Zea mays]
  misc_feature (1)..(219): Homolog of NCBI NO: 25990951 NR Description: DREB-like protein [Zea mays]
  misc_feature (1)..(220): Homolog of NCBI NO: 14140155 NR Description: putative AP2 domain transcription factor [Oryza
  misc_feature (1)..(220): Homolog of NCBI NO: 14140163 NR Description: putative AP2 domain containing protein [Oryza
  misc_feature (1)..(219): Homolog of NCBI NO: 25990951 NR Description: DREB-like protein [Zea mays]
  misc_feature (15)..(165): Homolog of NCBI NO: 15227471 NR Description: AP2 domain transcription factor, putative thaliana] >gi|25350648|pir||H84771 probable AP2 domain
  misc_feature (2)..(188): Homolog of NCBI NO: 15225381 NR Description: AP2 domain transcription factor TINY, putative thaliana] >gi|7488386|pir||T00399 probable AP2 domain
  misc_feature (1)..(218): Homolog of NCBI NO: 38605844 NR Description: OSJNBb0034G17.2 [Oryza sativa (japonica
  misc_feature (14)..(220): Homolog of NCBI NO: 38605845 NR Description: OSJNBb0034G17.3 [Oryza sativa (japonica
  misc_feature (1)..(219): Homolog of NCBI NO: 37536842 NR Description: putative DNA binding protein [Oryza sativa
  misc_feature (1)..(220): Homolog of NCBI NO: 14140155 NR Description: putative AP2 domain transcription factor [Oryza
  misc_feature (1)..(219): Homolog of NCBI NO: 21908034 NR Description: DRE binding factor 2 [Zea mays]
  misc_feature (1)..(220): Homolog of NCBI NO: 38605848 NR Description: OSJNBb0034G17.6 [Oryza sativa (japonica
  misc_feature (1)..(219): Homolog of NCBI NO: 37536842 NR Description: putative DNA binding protein [Oryza sativa
  misc_feature (14)..(220): Homolog of NCBI NO: 38605845 NR Description: OSJNBb0034G17.3 [Oryza sativa (japonica
  misc_feature (1)..(218): Homolog of NCBI NO: 38605844 NR Description: OSJNBb0034G17.2 [Oryza sativa (japonica
  misc_feature (2)..(188): Homolog of NCBI NO: 15225381 NR Description: AP2 domain transcription factor TINY, putative thaliana] >gi|7488386|pir||T00399 probable AP2 domain
  misc_feature (15)..(165): Homolog of NCBI NO: 15227471 NR Description: AP2 domain transcription factor, putative thaliana] >gi|25350648|pir||H84771 probable AP2 domain
MDDAQEPPSPPSPSQSSSSSSSSSSVAPNPKKRARKDGSRHPTYRGVRMRSWGKWVSEIREPRKKSRIWLGTFATAEMAARAHDVAALAIKGARDAHLNFPGLAHLLPRPATAAPKDVQAAAALAAAADFPLPPSPGGANAKSPESSSSGSASASASDDASAASPAAPQDAEPNPDDALFDLPDLLLDLRCCGPSSWAVDDDVAGGGAFRIIEEPLLWEY

SEQ ID NO: 5619 - protein, 172 aa, Zea mays subsp. mays
  peptide (1)..(172): Ceres Seq. ID no. 13498733
  misc_feature (1)..(57): Pfam Name: AP2 domain Pfam Description: AP2 domain
  misc_feature (1)..(57): Pfam Name: AP2 domain Pfam Description: AP2 domain
  misc_feature (1)..(172): Homolog of NCBI NO: 38605848 NR Description: OSJNBb0034G17.6 [Oryza sativa (japonica
  misc_feature (1)..(172): Homolog of NCBI NO: 14140163 NR Description: putative AP2 domain containing protein [Oryza
  misc_feature (1)..(171): Homolog of NCBI NO: 21908034 NR Description: DRE binding factor 2 [Zea mays]
  misc_feature (1)..(171): Homolog of NCBI NO: 25990951 NR Description: DREB-like protein [Zea mays]
  misc_feature (1)..(172): Homolog of NCBI NO: 14140155 NR Description: putative AP2 domain transcription factor [Oryza
  misc_feature (1)..(172): Homolog of NCBI NO: 14140163 NR Description: putative AP2 domain containing protein [Oryza
  misc_feature (1)..(171): Homolog of NCBI NO: 25990951 NR Description: DREB-like protein [Zea mays]
  misc_feature (1)..(117): Homolog of NCBI NO: 15227471 NR Description: AP2 domain transcription factor, putative thaliana] >gi|25350648|pir||H84771 probable AP2 domain
  misc_feature (1)..(140): Homolog of NCBI NO: 15225381 NR Description: AP2 domain transcription factor TINY, putative thaliana] >gi|7488386|pir||T00399 probable AP2 domain
  misc_feature (1)..(170): Homolog of NCBI NO: 38605844 NR Description: OSJNBb0034G17.2 [Oryza sativa (japonica
  misc_feature (1)..(172): Homolog of NCBI NO: 38605845 NR Description: OSJNBb0034G17.3 [Oryza sativa (japonica
  misc_feature (1)..(171): Homolog of NCBI NO: 37536842 NR Description: putative DNA binding protein [Oryza sativa
  misc_feature (1)..(172): Homolog of NCBI NO: 14140155 NR Description: putative AP2 domain transcription factor [Oryza
  misc_feature (1)..(171): Homolog of NCBI NO: 21908034 NR Description: DRE binding factor 2 [Zea mays]
  misc_feature (1)..(172): Homolog of NCBI NO: 38605848 NR Description: OSJNBb0034G17.6 [Oryza sativa (japonica
  misc_feature (1)..(171): Homolog of NCBI NO: 37536842 NR Description: putative DNA binding protein [Oryza sativa
  misc_feature (1)..(172): Homolog of NCBI NO: 38605845 NR Description: OSJNBb0034G17.3 [Oryza sativa (japonica
  misc_feature (1)..(170): Homolog of NCBI NO: 38605844 NR Description: OSJNBb0034G17.2 [Oryza sativa (japonica
  misc_feature (1)..(140): Homolog of NCBI NO: 15225381 NR Description: AP2 domain transcription factor TINY, putative thaliana] >gi|7488386|pir||T00399 probable AP2 domain
  misc_feature (1)..(117): Homolog of NCBI NO: 15227471 NR Description: AP2 domain transcription factor, putative thaliana] >gi|25350648|pir||H84771 probable AP2 domain
MRSWGKWVSEIREPRKKSRIWLGTFATAEMAARAHDVAALAIKGARDAHLNFPGLAHLLPRPATAAPKDVQAAAALAAAADFPLPPSPGGANAKSPESSSSGSASASASDDASAASPAAPQDAEPNPDDALFDLPDLLLDLRCCGPSSWAVDDDVAGGGAFRIIEEPLLWEY

SEQ ID NO: 5620 - DNA, 1578 bp, Zea mays subsp. mays
  misc_feature (1)..(1578): Ceres Seq. ID no. 12349057
  misc_feature: MA Experiment ID: 108527 Result: Up-regulated in Transcription
  misc_feature: MA Experiment 108527 PARAMETER Experiment Name: Zm_5mM_NO_P Parameter: Age (day) Value: 8
  misc_feature: MA Experiment 108527 PARAMETER Experiment Name: Zm_5mM_NO_P Parameter: Organism Value: Zea mays
  misc_feature: MA Experiment 108527 PARAMETER Experiment Name: Zm_5mM_NO_P Parameter: Plant Line Value: 35A19
  misc_feature: MA Experiment 108527 PARAMETER Experiment Name: Zm_5mM_NO_P Parameter: Timepoint (hr) Value: 6
  misc_feature: MA Experiment 108527 PARAMETER Experiment Name: Zm_5mM_NO_P Parameter: Tissue Value: Aerial
  misc_feature: MA Experiment 108527 PARAMETER Experiment Name: Zm_5mM_NO_P Parameter: Treatment Value: 5mM NO vs. No Treatment
  misc_feature: MA Experiment ID: 108536 Result: Up-regulated in Transcription
  misc_feature: MA Experiment 108536 PARAMETER Experiment Name: Zm_Meristem_P Parameter: Age (day) Value: 8
  misc_feature: MA Experiment 108536 PARAMETER Experiment Name: Zm_Meristem_P Parameter: Organism Value: Zea mays
  misc_feature: MA Experiment 108536 PARAMETER Experiment Name: Zm_Meristem_P Parameter: Plant Line Value: 35A19
  misc_feature: MA Experiment 108536 PARAMETER Experiment Name: Zm_Meristem_P Parameter: Tissue Value: Shoot Meristem vs. Above Shoot Meristem
  misc_feature: MA Experiment ID: 108559 Result: Up-regulated in Transcription
  misc_feature: MA Experiment 108559 PARAMETER Experiment Name: Zm_5mM_NO_P Parameter: Age (day) Value: 8
  misc_feature: MA Experiment 108559 PARAMETER Experiment Name: Zm_5mM_NO_P Parameter: Organism Value: Zea mays
  misc_feature: MA Experiment 108559 PARAMETER Experiment Name: Zm_5mM_NO_P Parameter: Plant Line Value: 35A19
  misc_feature: MA Experiment 108559 PARAMETER Experiment Name: Zm_5mM_NO_P Parameter: Timepoint (hr) Value: 12
  misc_feature: MA Experiment 108559 PARAMETER Experiment Name: Zm_5mM_NO_P Parameter: Tissue Value: Aerial
  misc_feature: MA Experiment 108559 PARAMETER Experiment Name: Zm_5mM_NO_P Parameter: Treatment Value: 5mM NO vs. No Treatment
  misc_feature: MA Experiment ID: 20000626 Result: Up-regulated in Transcription
  misc_feature: MA Experiment 20000626 PARAMETER Experiment Name: Zm_Herbicide-Treatments_P Parameter: Timepoint (hr) Value: 12
  misc_feature: MA Experiment 20000626 PARAMETER Experiment Name: Zm_Herbicide-Treatments_P Parameter: Tissue Value: Aerial
  misc_feature: MA Experiment 20000626 PARAMETER Experiment Name: Zm_Herbicide-Treatments_P Parameter: Treatment Value: Roundup vs. No Treatment
  misc_feature: MA Experiment ID: 20000630 Result: Up-regulated in Transcription
  misc_feature: MA Experiment 20000630 PARAMETER Experiment Name: Zm_Herbicide-Treatments_P Parameter: Timepoint (hr) Value: 4
  misc_feature: MA Experiment 20000630 PARAMETER Experiment Name: Zm_Herbicide-Treatments_P Parameter: Tissue Value: Aerial
  misc_feature: MA Experiment 20000630 PARAMETER Experiment Name: Zm_Herbicide-Treatments_P Parameter: Treatment Value: Roundup vs. No Treatment
accccaacccaacccctgccgcgcccgcacccagcgccccgagccctgctcccccatcgtcttcttccttgtccgtctccactaccgaccaacggctgcctgctcacacttcgccactactgctgctgcgcgttggcgagcgcgcgtggttcacgagcgagctccaccacaagcccagtcgcgcacggcagccgttttgcttgttttgtttgcttaccgcctcttccgtccttcctcttttgcgcggcctggctggctgggctagctagctgttctgttcattccgagttcccggcatagcacacgaggttggagttggaggcgtaccgagggagcagacagcagaggacactataagagtagctagccctacccaacatcttcagccgtgcttgccaacttggagagagagagagagaaaagagaagagaagggagtgatcgcaggaaggaggatcggagtgatgggagacgcagcagagaccaacaagactcttcacaactggatgggcgagccgaggccgaggtcgagcgaccagcgcgacgaggaggagacgcttcagctcagcctcggcctccccggaggaggagcaagtgcgggtggtgtggtagcacccgccgcctggagaatgctgccggccagagacgaggagatgcgctctgctgctgctgtcgtcgacacctccctgctctctctcggctactccgccccagctttctcgccccgctcaccaggcaaggcaaaggggtccccagcagcagctacagagaatgcccttgcatccaccaacaacgcctcccagagaagatctccaaataccccggttattgggtggcctccagttcgtgccttcagaagaaatctggccacctctagcagagcatctcttgaaaatcagaatgggaagaaggcagccaaacctgaacagaccacaaaaagagctccatttgtaaagatcaacatggacggcatccctattggtagaaaaatcgacctgagtgccctcggtagttacgatgagctgtctctgtctgtcgacaagctattccgggggcttcttgcagcacaacaagaccctctggctgccggcgcaaaggagtgttcacaggaagaggtggcgatatcgggtttactagatggaactggggagtacactctggtttatgaggattatgaaggcgatagggtgctggttggcgatgtcccctgggggatgtttgtttcttcggtgaagaggctgcgcgttctgaagacatctgacctctcttcatctctaacagcacctcctggccagaagaggacggtaaccgagtgtccagtgtttacctcttagacacttccttgcagtgatgttggtgtgctgtgaagaagaaaacgtcttctgagcttgtatcatctttcttcctggtttcttcctcttcttttccctactttctcttggaaggaatcatcaaagaaccgaaccgaccttttgggttttcctgctcttgtttattttgtttctctttccgggaagcgatgtgaccttttgggttgtatgtaaatgttcagacgaaccagctctatgtttatgcagcc

SEQ ID NO: 5621 - protein, 289 aa, Zea mays subsp. mays
  peptide (1)..(289): Ceres Seq. ID no. 12349058
  misc_feature (58)..(272): Pfam Name: AUX/IAA family Pfam Description: AUX/IAA family
  misc_feature (53)..(283): Homolog of NCBI NO: 34906394 NR Description: P0710E05.9 [Oryza sativa (japonica
  misc_feature (106)..(278): Homolog of NCBI NO: 15218080 NR Description: auxin regulated protein IAA18, putative; protein At1g51950.1, supported by cDNA: 6493., supported by cDNA: supported by cDNA: gi_15810072 [Arabidopsis thaliana]
  misc_feature (106)..(278): Homolog of NCBI NO: 21594025 NR Description: auxin regulated protein IAA18, putative
  misc_feature (106)..(278): Homolog of NCBI NO: 25296228 NR Description: auxin-induced protein IAA18 [imported] - thaliana (fragment) >gi|2618725|gb|AAB84355.1| IAA18 [Arabidopsis
  misc_feature (58)..(272): Homolog of NCBI NO: 21593333 NR Description: phytochrome-associated protein 1 (PAP1)
  misc_feature (103)..(272): Homolog of NCBI NO: 4093155 NR Description: phytochrome-associated protein 1 [Arabidopsis
  misc_feature (58)..(272): Homolog of NCBI NO: 15228226 NR Description: phytochrome-associated protein 1 (PAP1); protein At3g16500.1, supported by cDNA: 38146., supported by cDNA: supported by cDNA: gi_14423421, supported by cDNA: gi_18377501,
  misc_feature (90)..(271): Homolog of NCBI NO: 34909384 NR Description: putative phytochrome-associated protein [Oryza
  misc_feature (76)..(195): Homolog of NCBI NO: 18420964 NR Description: putative protein; protein id: At5g25890.1, by cDNA: 2499., supported by cDNA: gi_4929492 [Arabidopsis
  misc_feature (229)..(265): Homolog of NCBI NO: 18420964 NR Description: putative protein; protein id: At5g25890.1, by cDNA: 2499., supported by cDNA: gi_4929492 [Arabidopsis
MGDAAETNKTLHNWMGEPRPRSSDQRDEEETLQLSLGLPGGGASAGGVVAPAAWRMLPARDEEMRSAAAVVDTSLLSLGYSAPAFSPRSPGKAKGSPAAATENALASTNNASQRRSPNTPVIGWPPVRAFRRNLATSSRASLENQNGKKAAKPEQTTKRAPFVKINMDGIPIGRKIDLSALGSYDELSLSVDKLFRGLLAAQQDPLAAGAKECSQEEVAISGLLDGTGEYTLVYEDYEGDRVLVGDVPWGMFVSSVKRLRVLKTSDLSSSLTAPPGQKRTVTECPVFTS

SEQ ID NO: 5622 - protein, 275 aa, Zea mays subsp. mays
  peptide (1)..(275): Ceres Seq. ID no. 12349059
  misc_feature (44)..(258): Pfam Name: AUX/IAA family Pfam Description: AUX/IAA family
  misc_feature (44)..(258): Homolog of NCBI NO: 15228226 NR Description: phytochrome-associated protein 1 (PAP1); protein At3g16500.1, supported by cDNA: 38146., supported by cDNA: supported by cDNA: gi_14423421, supported by cDNA: gi_18377501,
  misc_feature (44)..(258): Homolog of NCBI NO: 21593333 NR Description: phytochrome-associated protein 1 (PAP1)
  misc_feature (89)..(258): Homolog of NCBI NO: 4093155 NR Description: phytochrome-associated protein 1 [Arabidopsis
  misc_feature (39)..(269): Homolog of NCBI NO: 34906394 NR Description: P0710E05.9 [Oryza sativa (japonica
  misc_feature (92)..(264): Homolog of NCBI NO: 15218080 NR Description: auxin regulated protein IAA18, putative; protein At1g51950.1, supported by cDNA: 6493., supported by cDNA: supported by cDNA: gi_15810072 [Arabidopsis thaliana]
  misc_feature (92)..(264): Homolog of NCBI NO: 21594025 NR Description: auxin regulated protein IAA18, putative
  misc_feature (92)..(264): Homolog of NCBI NO: 25296228 NR Description: auxin-induced protein IAA18 [imported] - thaliana (fragment) >gi|2618725|gb|AAB84355.1| IAA18 [Arabidopsis
  misc_feature (76)..(257): Homolog of NCBI NO: 34909384 NR Description: putative phytochrome-associated protein [Oryza
  misc_feature (62)..(181): Homolog of NCBI NO: 18420964 NR Description: putative protein; protein id: At5g25890.1, by cDNA: 2499., supported by cDNA: gi_4929492 [Arabidopsis
  misc_feature (215)..(251): Homolog of NCBI NO: 18420964 NR Description: putative protein; protein id: At5g25890.1, by cDNA: 2499., supported by cDNA: gi_4929492 [Arabidopsis
MGEPRPRSSDQRDEEETLQLSLGLPGGGASAGGVVAPAAWRMLPARDEEMRSAAAVVDTSLLSLGYSAPAFSPRSPGKAKGSPAAATENALASTNNASQRRSPNTPVIGWPPVRAFRRNLATSSRASLENQNGKKAAKPEQTTKRAPFVKINMDGIPIGRKIDLSALGSYDELSLSVDKLFRGLLAAQQDPLAAGAKECSQEEVAISGLLDGTGEYTLVYEDYEGDRVLVGDVPWGMFVSSVKRLRVLKTSDLSSSLTAPPGQKRTVTECPVFTS

SEQ ID NO: 5623 - protein, 234 aa, Zea mays subsp. mays
  peptide (1)..(234): Ceres Seq. ID no. 12349060
  misc_feature (3)..(217): Pfam Name: AUX/IAA family Pfam Description: AUX/IAA family
  misc_feature (3)..(217): Homolog of NCBI NO: 15228226 NR Description: phytochrome-associated protein 1 (PAP1); protein At3g16500.1, supported by cDNA: 38146., supported by cDNA: supported by cDNA: gi_14423421, supported by cDNA: gi_18377501,
  misc_feature (3)..(217): Homolog of NCBI NO: 21593333 NR Description: phytochrome-associated protein 1 (PAP1)
  misc_feature (48)..(217): Homolog of NCBI NO: 4093155 NR Description: phytochrome-associated protein 1 [Arabidopsis
  misc_feature (1)..(228): Homolog of NCBI NO: 34906394 NR Description: P0710E05.9 [Oryza sativa (japonica
  misc_feature (51)..(223): Homolog of NCBI NO: 15218080 NR Description: auxin regulated protein IAA18, putative; protein At1g51950.1, supported by cDNA: 6493., supported by cDNA: supported by cDNA: gi_15810072 [Arabidopsis thaliana]
  misc_feature (51)..(223): Homolog of NCBI NO: 21594025 NR Description: auxin regulated protein IAA18, putative
  misc_feature (51)..(223): Homolog of NCBI NO: 25296228 NR Description: auxin-induced protein IAA18 [imported] - thaliana (fragment) >gi|2618725|gb|AAB84355.1| IAA18 [Arabidopsis
  misc_feature (35)..(216): Homolog of NCBI NO: 34909384 NR Description: putative phytochrome-associated protein [Oryza
  misc_feature (21)..(140): Homolog of NCBI NO: 18420964 NR Description: putative protein; protein id: At5g25890.1, by cDNA: 2499., supported by cDNA: gi_4929492 [Arabidopsis
  misc_feature (174)..(210): Homolog of NCBI NO: 18420964 NR Description: putative protein; protein id: At5g25890.1, by cDNA: 2499., supported by cDNA: gi_4929492 [Arabidopsis
MLPARDEEMRSAAAVVDTSLLSLGYSAPAFSPRSPGKAKGSPAAATENALASTNNASQRRSPNTPVIGWPPVRAFRRNLATSSRASLENQNGKKAAKPEQTTKRAPFVKINMDGIPIGRKIDLSALGSYDELSLSVDKLFRGLLAAQQDPLAAGAKECSQEEVAISGLLDGTGEYTLVYEDYEGDRVLVGDVPWGMFVSSVKRLRVLKTSDLSSSLTAPPGQKRTVTECPVFTS

SEQ ID NO: 5624 - DNA, 1685 bp, Zea mays subsp. mays
  misc_feature (1)..(1685): Ceres Seq. ID no. 12409422
  misc_feature: MA Experiment ID: 108527 Result: Down-regulated in Transcription
  misc_feature: MA Experiment 108527 PARAMETER Experiment Name: Zm_5mM_NO_P Parameter: Age (day) Value: 8
  misc_feature: MA Experiment 108527 PARAMETER Experiment Name: Zm_5mM_NO_P Parameter: Organism Value: Zea mays
  misc_feature: MA Experiment 108527 PARAMETER Experiment Name: Zm_5mM_NO_P Parameter: Plant Line Value: 35A19
  misc_feature: MA Experiment 108527 PARAMETER Experiment Name: Zm_5mM_NO_P Parameter: Timepoint (hr) Value: 6
  misc_feature: MA Experiment 108527 PARAMETER Experiment Name: Zm_5mM_NO_P Parameter: Tissue Value: Aerial
  misc_feature: MA Experiment 108527 PARAMETER Experiment Name: Zm_5mM_NO_P Parameter: Treatment Value: 5mM NO vs. No Treatment
  misc_feature: MA Experiment ID: 108529 Result: Up-regulated in Transcription
  misc_feature: MA Experiment 108529 PARAMETER Experiment Name: Zm_Imbibed_Seeds_P Parameter: Age (day) Value: 5 vs. 2
  misc_feature: MA Experiment 108529 PARAMETER Experiment Name: Zm_Imbibed_Seeds_P Parameter: Organism Value: Zea mays
  misc_feature: MA Experiment 108529 PARAMETER Experiment Name: Zm_Imbibed_Seeds_P Parameter: Plant Line Value: 35A19
  misc_feature: MA Experiment 108529 PARAMETER Experiment Name: Zm_Imbibed_Seeds_P Parameter: Tissue Value: Roots vs. Embryo
  misc_feature: MA Experiment ID: 108535 Result: Down-regulated in Transcription
  misc_feature: MA Experiment 108535 PARAMETER Experiment Name: Zm_Meristem_P Parameter: Age (day) Value: 8
  misc_feature: MA Experiment 108535 PARAMETER Experiment Name: Zm_Meristem_P Parameter: Organism Value: Zea mays
  misc_feature: MA Experiment 108535 PARAMETER Experiment Name: Zm_Meristem_P Parameter: Plant Line Value: 35A19
  misc_feature: MA Experiment 108535 PARAMETER Experiment Name: Zm_Meristem_P Parameter: Tissue Value: Root Meristem vs. Above Root Meristem
  misc_feature: MA Experiment ID: 108543 Result: Up-regulated in Transcription
  misc_feature: MA Experiment ID: 108545 Result: Down-regulated in Transcription
  misc_feature: MA Experiment 108545 PARAMETER Experiment Name: Zm_Imbibed_Seeds_P Parameter: Age (day) Value: 3 vs. 2
  misc_feature: MA Experiment 108545 PARAMETER Experiment Name: Zm_Imbibed_Seeds_P Parameter: Organism Value: Zea mays
  misc_feature: MA Experiment 108545 PARAMETER Experiment Name: Zm_Imbibed_Seeds_P Parameter: Plant Line Value: 35A19
  misc_feature: MA Experiment 108545 PARAMETER Experiment Name: Zm_Imbibed_Seeds_P Parameter: Tissue Value: Aerial vs. Embryo
  misc_feature: MA Experiment ID: 108546 Result: Up-regulated in Transcription
  misc_feature: MA Experiment 108546 PARAMETER Experiment Name: Zm_Imbibed_Seeds_P Parameter: Age (day) Value: 3 vs. 2
  misc_feature: MA Experiment 108546 PARAMETER Experiment Name: Zm_Imbibed_Seeds_P Parameter: Organism Value: Zea mays
  misc_feature: MA Experiment 108546 PARAMETER Experiment Name: Zm_Imbibed_Seeds_P Parameter: Plant Line Value: 35A19
  misc_feature: MA Experiment 108546 PARAMETER Experiment Name: Zm_Imbibed_Seeds_P Parameter: Tissue Value: Roots vs. Embryo
  misc_feature: MA Experiment ID: 108547 Result: Down-regulated in Transcription
  misc_feature: MA Experiment 108547 PARAMETER Experiment Name: Zm_Imbibed_Seeds_P Parameter: Age (day) Value: 4 vs. 2
  misc_feature: MA Experiment 108547 PARAMETER Experiment Name: Zm_Imbibed_Seeds_P Parameter: Organism Value: Zea mays
  misc_feature: MA Experiment 108547 PARAMETER Experiment Name: Zm_Imbibed_Seeds_P Parameter: Plant Line Value: 35A19
  misc_feature: MA Experiment 108547 PARAMETER Experiment Name: Zm_Imbibed_Seeds_P Parameter: Tissue Value: Aerial vs. Embryo
  misc_feature: MA Experiment ID: 108556 Result: Down-regulated in Transcription
  misc_feature: MA Experiment 108556 PARAMETER Experiment Name: Zm_Drought_P Parameter: Age (day) Value: 9
  misc_feature: MA Experiment 108556 PARAMETER Experiment Name: Zm_Drought_P Parameter: Organism Value: Zea mays
  misc_feature: MA Experiment 108556 PARAMETER Experiment Name: Zm_Drought_P Parameter: Plant Line Value: 35A19
  misc_feature: MA Experiment 108556 PARAMETER Experiment Name: Zm_Drought_P Parameter: Timepoint (hr) Value: 24
  misc_feature: MA Experiment 108556 PARAMETER Experiment Name: Zm_Drought_P Parameter: Tissue Value: Aerial
  misc_feature: MA Experiment 108556 PARAMETER Experiment Name: Zm_Drought_P Parameter: Treatment Value: Drought vs. No Drought
  misc_feature: MA Experiment ID: 108559 Result: Down-regulated in Transcription
  misc_feature: MA Experiment 108559 PARAMETER Experiment Name: Zm_5mM_NO_P Parameter: Age (day) Value: 8
  misc_feature: MA Experiment 108559 PARAMETER Experiment Name: Zm_5mM_NO_P Parameter: Organism Value: Zea mays
  misc_feature: MA Experiment 108559 PARAMETER Experiment Name: Zm_5mM_NO_P Parameter: Plant Line Value: 35A19
  misc_feature: MA Experiment 108559 PARAMETER Experiment Name: Zm_5mM_NO_P Parameter: Timepoint (hr) Value: 12
  misc_feature: MA Experiment 108559 PARAMETER Experiment Name: Zm_5mM_NO_P Parameter: Tissue Value: Aerial
  misc_feature: MA Experiment 108559 PARAMETER Experiment Name: Zm_5mM_NO_P Parameter: Treatment Value: 5mM NO vs. No Treatment
  misc_feature: MA Experiment ID: 20000477 Result: Down-regulated in Transcription
  misc_feature: MA Experiment 20000477 PARAMETER Experiment Name: Zm_5mM_SA_P Parameter: Age (day) Value: 10
  misc_feature: MA Experiment 20000477 PARAMETER Experiment Name: Zm_5mM_SA_P Parameter: Organism Value: Zea mays
  misc_feature: MA Experiment 20000477 PARAMETER Experiment Name: Zm_5mM_SA_P Parameter: Plant Line Value: 35A19
  misc_feature: MA Experiment 20000477 PARAMETER Experiment Name: Zm_5mM_SA_P Parameter: Timepoint (hr) Value: 48
  misc_feature: MA Experiment 20000477 PARAMETER Experiment Name: Zm_5mM_SA_P Parameter: Tissue Value: Aerial
  misc_feature: MA Experiment 20000477 PARAMETER Experiment Name: Zm_5mM_SA_P Parameter: Treatment Value: 5mM SA vs. No Treatment
  misc_feature: MA Experiment ID: 20000478 Result: Down-regulated in Transcription
  misc_feature: MA Experiment 20000478 PARAMETER Experiment Name: Zm_5mM_SA_P Parameter: Age (day) Value: 11
  misc_feature: MA Experiment 20000478 PARAMETER Experiment Name: Zm_5mM_SA_P Parameter: Organism Value: Zea mays
  misc_feature: MA Experiment 20000478 PARAMETER Experiment Name: Zm_5mM_SA_P Parameter: Plant Line Value: 35A19
  misc_feature: MA Experiment 20000478 PARAMETER Experiment Name: Zm_5mM_SA_P Parameter: Timepoint (hr) Value: 72
  misc_feature: MA Experiment 20000478 PARAMETER Experiment Name: Zm_5mM_SA_P Parameter: Tissue Value: Aerial
  misc_feature: MA Experiment 20000478 PARAMETER Experiment Name: Zm_5mM_SA_P Parameter: Treatment Value: 5mM SA vs. No Treatment
  misc_feature: MA Experiment ID: 20000479 Result: Down-regulated in Transcription
  misc_feature: MA Experiment 20000479 PARAMETER Experiment Name: Zm_Drought_P Parameter: Age (day) Value: 10
  misc_feature: MA Experiment 20000479 PARAMETER Experiment Name: Zm_Drought_P Parameter: Organism Value: Zea mays
  misc_feature: MA Experiment 20000479 PARAMETER Experiment Name: Zm_Drought_P Parameter: Plant Line Value: 35A19
  misc_feature: MA Experiment 20000479 PARAMETER Experiment Name: Zm_Drought_P Parameter: Timepoint (hr) Value: 48
  misc_feature: MA Experiment 20000479 PARAMETER Experiment Name: Zm_Drought_P Parameter: Tissue Value: Aerial
  misc_feature: MA Experiment 20000479 PARAMETER Experiment Name: Zm_Drought_P Parameter: Treatment Value: Drought vs. No Drought
  misc_feature: MA Experiment ID: 20000480 Result: Down-regulated in Transcription
  misc_feature: MA Experiment 20000480 PARAMETER Experiment Name: Zm_Drought_P Parameter: Age (day) Value: 11
  misc_feature: MA Experiment 20000480 PARAMETER Experiment Name: Zm_Drought_P Parameter: Organism Value: Zea mays
  misc_feature: MA Experiment 20000480 PARAMETER Experiment Name: Zm_Drought_P Parameter: Plant Line Value: 35A19
  misc_feature: MA Experiment 20000480 PARAMETER Experiment Name: Zm_Drought_P Parameter: Timepoint (hr) Value: 72
  misc_feature: MA Experiment 20000480 PARAMETER Experiment Name: Zm_Drought_P Parameter: Tissue Value: Aerial
  misc_feature: MA Experiment 20000480 PARAMETER Experiment Name: Zm_Drought_P Parameter: Treatment Value: Drought vs. No Drought
  misc_feature: MA Experiment ID: 20000492 Result: Down-regulated in Transcription
  misc_feature: MA Experiment 20000492 PARAMETER Experiment Name: Zm_Hybrid_Seed_Dev_P Parameter: DAP Value: 12
  misc_feature: MA Experiment 20000492 PARAMETER Experiment Name: Zm_Hybrid_Seed_Dev_P Parameter: Organism Value: Zea mays
  misc_feature: MA Experiment 20000492 PARAMETER Experiment Name: Zm_Hybrid_Seed_Dev_P Parameter: Plant Line Value: 35A19
  misc_feature: MA Experiment 20000492 PARAMETER Experiment Name: Zm_Hybrid_Seed_Dev_P Parameter: Tissue Value: Fert Kernel vs. Unfert Floret
  misc_feature: MA Experiment ID: 20000535 Result: Down-regulated in Transcription
  misc_feature: MA Experiment 20000535 PARAMETER Experiment Name: Zm_Hybrid_Seed_Dev_P Parameter: DAP Value: 30 vs. 12
  misc_feature: MA Experiment 20000535 PARAMETER Experiment Name: Zm_Hybrid_Seed_Dev_P Parameter: Organism Value: Zea mays
  misc_feature: MA Experiment 20000535 PARAMETER Experiment Name: Zm_Hybrid_Seed_Dev_P Parameter: Plant Line Value: 35A19
  misc_feature: MA Experiment 20000535 PARAMETER Experiment Name: Zm_Hybrid_Seed_Dev_P Parameter: Tissue Value: Embryo vs. Unfert Floret
attcgccctgcctctagctgctgcttcttccaggatcggggatcggagcttgtgctgctactgctactataccagcgctagctagcagcagccgccggccggctcgcgcaagctaaggaagggtcgacatgacgatggggctccgcgtccgcgactcctccgcgctgctggctctggccgtcgcgctcgcctgctgctccgttgcagtggtggcctacgaccccctggacccgaacggcaacatcaccatcaagtgggacgtgatctcgtggacgcccgacgggtacgtggcgatggtgacgatgagcaactaccagatgtaccggcacatcatggcgcccgggtggacgttggggtggtcgtgggccaagaaggaggtgatctggtccatcgtgggggcgcaggccacggagcagggggactgctccaagttcaagggcggcatcccgcactgctgcaagcgcaccccggccgtggtggacctcctcccgggggtgccctacaaccagcagatcgccaactgctgcaaggccggcgtggtgtcggcgtacgggcaggacccggcggggtccgtctccgcgttccaggtctccgtcggcctggccggtaccaccaacaagacggtgaagctgcccaggaacttcacgctcatggggcccgggctgggctacacctgcgggcccgccgccgtggtgccgtccaccgtgtactggacgcccgaccaccggcgccggacgcaggcgctcatgacgtggacggtgacctgcacctactcgcagcagctggcgtcccggtacccgtcctgctgcgtctccttctcctccttctacaacagcaccatcgtgccgtgcgcccggtgcgcgtgcggctgcggcggccacggcggccacgcgggtccgggcggctgcatcgagggggactccaagcgcgcgctgtcggccggggtgaacacgccgngcaaggacggccaggcgctgctgcagtgcacgccgcacatgtgccccatccgggtgcactggcangtcaagctcaactacaaggantactggcgcgccaagatcgccatcaccaactacaactacaggatgaactacacgcagtggacgctggtggcgcagcaccccaacctggacaacgtcaccgaggtcttcagcttccagtacaagccgctgcaaccatacgggagcatcaatgacactggcatgttctacgggctcaagttctacaacgactttctcatggaggccggcccgttcggcaacgtgcagtcggaggtgctcatgcgcaaggacgcaaggaccttcaccttcagcatgggctgggcgttcccgcgcaagatctacttcaacggcgacgagtgcaagatgccgccgccggactcctacccctacctgcccaacgccgcgcccgtcgtcgcctcgcagctggtcctgtccgccgccgcctcggcgttcctactgttgctgctcctggtggcatgaccgtgaccgaaccaagggcaaggcctccgttttgttttcccgtctcgtcccgtgggcagggagcagacttcagtaggcagggcattttatttggtttttttgccaaggattcaacacttgggttttcgtcagaggaaaactgtcgtgtatgtagtgtgagttgcaggtcgtcggatccccacgtacaagacaatctttggatcg

SEQ ID NO: 5625 - protein, 450 aa, Zea mays subsp. mays
  peptide (1)..(450): Ceres Seq. ID no. 12409423
  misc_feature (29)..(447): Homolog of NCBI NO: 21553837 NR Description: phytochelatin synthetase-like protein
  misc_feature (29)..(447): Homolog of NCBI NO: 18424412 NR Description: phytochelatin synthetase - like protein; protein At5g60920.1, supported by cDNA: 17250., supported by cDNA: [Arabidopsis thaliana] >gi|14193657|gb|AAK56072.1|AF319663_1
  misc_feature (29)..(448): Homolog of NCBI NO: 15232863 NR Description: unknown protein; protein id: At3g02210.1 thaliana] >gi|6041808|gb|AAF02128.1|AC009755_21 unknown protein
  misc_feature (29)..(449): Homolog of NCBI NO: 13477083 NR Description: phytochelatin synthetase-like protein
  misc_feature (8)..(449): Homolog of NCBI NO: 18406342 NR Description: phytochelatin synthetase-like protein; protein
  misc_feature (29)..(449): Homolog of NCBI NO: 21618129 NR Description: phytochelatin synthetase-like protein
  misc_feature (8)..(262): Homolog of NCBI NO: 10092257 NR Description: unknown protein; 31818-33764 [Arabidopsis
  misc_feature (301)..(449): Homolog of NCBI NO: 10092257 NR Description: unknown protein; 31818-33764 [Arabidopsis
  misc_feature (88)..(447): Homolog of NCBI NO: 25456127 NR Description: probable phytochelatin synthetase [imported] - thaliana >gi|3559805|emb|CAA07251.1| putative phytochelatin [Arabidopsis thaliana] >gi|10177315|dbj|BAB10641.1| phytochelatin
  misc_feature (88)..(428): Homolog of NCBI NO: 6690554 NR Description: phytochelatin synthetase-like protein [Zea mays]
  misc_feature (277)..(277): Xaa is any aa, unknown or other
  misc_feature (298)..(298): Xaa is any aa, unknown or other
  misc_feature (305)..(305): Xaa is any aa, unknown or other
MTMGLRVRDSSALLALAVALACCSVAVVAYDPLDPNGNITIKWDVISWTPDGYVAMVTMSNYQMYRHIMAPGWTLGWSWAKKEVIWSIVGAQATEQGDCSKFKGGIPHCCKRTPAVVDLLPGVPYNQQIANCCKAGVVSAYGQDPAGSVSAFQVSVGLAGTTNKTVKLPRNFTLMGPGLGYTCGPAAVVPSTVYWTPDHRRRTQALMTWTVTCTYSQQLASRYPSCCVSFSSFYNSTIVPCARCACGCGGHGGHAGPGGCIEGDSKRALSAGVNTPXKDGQALLQCTPHMCPIRVHWXVKLNYKXYWRAKIAITNYNYRMNYTQWTLVAQHPNLDNVTEVFSFQYKPLQPYGSINDTGMFYGLKFYNDFLMEAGPFGNVQSEVLMRKDARTFTFSMGWAFPRKIYFNGDECKMPPPDSYPYLPNAAPVVASQLVLSAAASAFLLLLLLVA

SEQ ID NO: 5626 - protein, 448 aa, Zea mays subsp. mays
  peptide (1)..(448): Ceres Seq. ID no. 12409424
  misc_feature (27)..(445): Homolog of NCBI NO: 21553837 NR Description: phytochelatin synthetase-like protein
  misc_feature (27)..(445): Homolog of NCBI NO: 18424412 NR Description: phytochelatin synthetase - like protein; protein At5g60920.1, supported by cDNA: 17250., supported by cDNA: [Arabidopsis thaliana] >gi|14193657|gb|AAK56072.1|AF319663_1
  misc_feature (27)..(446): Homolog of NCBI NO: 15232863 NR Description: unknown protein; protein id: At3g02210.1 thaliana] >gi|6041808|gb|AAF02128.1|AC009755_21 unknown protein
  misc_feature (27)..(447): Homolog of NCBI NO: 13477083 NR Description: phytochelatin synthetase-like protein
  misc_feature (6)..(447): Homolog of NCBI NO: 18406342 NR Description: phytochelatin synthetase-like protein; protein
  misc_feature (27)..(447): Homolog of NCBI NO: 21618129 NR Description: phytochelatin synthetase-like protein
  misc_feature (6)..(260): Homolog of NCBI NO: 10092257 NR Description: unknown protein; 31818-33764 [Arabidopsis
  misc_feature (299)..(447): Homolog of NCBI NO: 10092257 NR Description: unknown protein; 31818-33764 [Arabidopsis
  misc_feature (86)..(445): Homolog of NCBI NO: 25456127 NR Description: probable phytochelatin synthetase [imported] - thaliana >gi|3559805|emb|CAA07251.1| putative phytochelatin [Arabidopsis thaliana] >gi|10177315|dbj|BAB10641.1| phytochelatin
  misc_feature (86)..(426): Homolog of NCBI NO: 6690554 NR Description: phytochelatin synthetase-like protein [Zea mays]
  misc_feature (275)..(275): Xaa is any aa, unknown or other
  misc_feature (296)..(296): Xaa is any aa, unknown or other
  misc_feature (303)..(303): Xaa is any aa, unknown or other
MGLRVRDSSALLALAVALACCSVAVVAYDPLDPNGNITIKWDVISWTPDGYVAMVTMSNYQMYRHIMAPGWTLGWSWAKKEVIWSIVGAQATEQGDCSKFKGGIPHCCKRTPAVVDLLPGVPYNQQIANCCKAGVVSAYGQDPAGSVSAFQVSVGLAGTTNKTVKLPRNFTLMGPGLGYTCGPAAVVPSTVYWTPDHRRRTQALMTWTVTCTYSQQLASRYPSCCVSFSSFYNSTIVPCARCACGCGGHGGHAGPGGCIEGDSKRALSAGVNTPXKDGQALLQCTPHMCPIRVHWXVKLNYKXYWRAKIAITNYNYRMNYTQWTLVAQHPNLDNVTEVFSFQYKPLQPYGSINDTGMFYGLKFYNDFLMEAGPFGNVQSEVLMRKDARTFTFSMGWAFPRKIYFNGDECKMPPPDSYPYLPNAAPVVASQLVLSAAASAFLLLLLLVA

SEQ ID NO: 5627 - protein, 395 aa, Zea mays subsp. mays
  peptide (1)..(395): Ceres Seq. ID no. 12409425
  misc_feature (1)..(392): Homolog of NCBI NO: 21553837 NR Description: phytochelatin synthetase-like protein
  misc_feature (1)..(392): Homolog of NCBI NO: 18424412 NR Description: phytochelatin synthetase - like protein; protein At5g60920.1, supported by cDNA: 17250., supported by cDNA: [Arabidopsis thaliana] >gi|14193657|gb|AAK56072.1|AF319663_1
  misc_feature (1)..(393): Homolog of NCBI NO: 15232863 NR Description: unknown protein; protein id: At3g02210.1 thaliana] >gi|6041808|gb|AAF02128.1|AC009755_21 unknown protein
  misc_feature (1)..(394): Homolog of NCBI NO: 13477083 NR Description: phytochelatin synthetase-like protein
  misc_feature (1)..(394): Homolog of NCBI NO: 18406342 NR Description: phytochelatin synthetase-like protein; protein
  misc_feature (1)..(394): Homolog of NCBI NO: 21618129 NR Description: phytochelatin synthetase-like protein
  misc_feature (1)..(207): Homolog of NCBI NO: 10092257 NR Description: unknown protein; 31818-33764 [Arabidopsis
  misc_feature (246)..(394): Homolog of NCBI NO: 10092257 NR Description: unknown protein; 31818-33764 [Arabidopsis
  misc_feature (33)..(392): Homolog of NCBI NO: 25456127 NR Description: probable phytochelatin synthetase [imported] - thaliana >gi|3559805|emb|CAA07251.1| putative phytochelatin [Arabidopsis thaliana] >gi|10177315|dbj|BAB10641.1| phytochelatin
  misc_feature (33)..(373): Homolog of NCBI NO: 6690554 NR Description: phytochelatin synthetase-like protein [Zea mays]
  misc_feature (222)..(222): Xaa is any aa, unknown or other
  misc_feature (243)..(243): Xaa is any aa, unknown or other
  misc_feature (250)..(250): Xaa is any aa, unknown or other
MVTMSNYQMYRHIMAPGWTLGWSWAKKEVIWSIVGAQATEQGDCSKFKGGIPHCCKRTPAVVDLLPGVPYNQQIANCCKAGVVSAYGQDPAGSVSAFQVSVGLAGTTNKTVKLPRNFTLMGPGLGYTCGPAAVVPSTVYWTPDHRRRTQALMTWTVTCTYSQQLASRYPSCCVSFSSFYNSTIVPCARCACGCGGHGGHAGPGGCIEGDSKRALSAGVNTPXKDGQALLQCTPHMCPIRVHWXVKLNYKXYWRAKIAITNYNYRMNYTQWTLVAQHPNLDNVTEVFSFQYKPLQPYGSINDTGMFYGLKFYNDFLMEAGPFGNVQSEVLMRKDARTFTFSMGWAFPRKIYFNGDECKMPPPDSYPYLPNAAPVVASQLVLSAAASAFLLLLLLVA

SEQ ID NO: 5628 - DNA, 1237 bp, Zea mays subsp. mays
  misc_feature (1)..(1237): Ceres Seq. ID no. 12356266
  misc_feature: MA Experiment ID: 108527 Result: Down-regulated in Transcription
  misc_feature: MA Experiment 108527 PARAMETER Experiment Name: Zm_5mM_NO_P Parameter: Age (day) Value: 8
  misc_feature: MA Experiment 108527 PARAMETER Experiment Name: Zm_5mM_NO_P Parameter: Organism Value: Zea mays
  misc_feature: MA Experiment 108527 PARAMETER Experiment Name: Zm_5mM_NO_P Parameter: Plant Line Value: 35A19
  misc_feature: MA Experiment 108527 PARAMETER Experiment Name: Zm_5mM_NO_P Parameter: Timepoint (hr) Value: 6
  misc_feature: MA Experiment 108527 PARAMETER Experiment Name: Zm_5mM_NO_P Parameter: Tissue Value: Aerial
  misc_feature: MA Experiment 108527 PARAMETER Experiment Name: Zm_5mM_NO_P Parameter: Treatment Value: 5mM NO vs. No Treatment
  misc_feature: MA Experiment ID: 108530 Result: Up-regulated in Transcription
  misc_feature: MA Experiment 108530 PARAMETER Experiment Name: Zm_Imbibed_Seeds_P Parameter: Age (day) Value: 6 vs. 2
  misc_feature: MA Experiment 108530 PARAMETER Experiment Name: Zm_Imbibed_Seeds_P Parameter: Organism Value: Zea mays
  misc_feature: MA Experiment 108530 PARAMETER Experiment Name: Zm_Imbibed_Seeds_P Parameter: Plant Line Value: 35A19
  misc_feature: MA Experiment 108530 PARAMETER Experiment Name: Zm_Imbibed_Seeds_P Parameter: Tissue Value: Aerial vs. Embryo
  misc_feature: MA Experiment ID: 108689 Result: Down-regulated in Transcription
  misc_feature: MA Experiment 108689 PARAMETER Experiment Name: Zm_Drought_Roots_P Parameter: Age (day) Value: 9
  misc_feature: MA Experiment 108689 PARAMETER Experiment Name: Zm_Drought_Roots_P Parameter: Organism Value: Zea mays
  misc_feature: MA Experiment 108689 PARAMETER Experiment Name: Zm_Drought_Roots_P Parameter: Plant Line Value: 35A19
  misc_feature: MA Experiment 108689 PARAMETER Experiment Name: Zm_Drought_Roots_P Parameter: Timepoint (hr) Value: 24
  misc_feature: MA Experiment 108689 PARAMETER Experiment Name: Zm_Drought_Roots_P Parameter: Tissue Value: Roots
  misc_feature: MA Experiment 108689 PARAMETER Experiment Name: Zm_Drought_Roots_P Parameter: Treatment Value: Drought vs. No Drought
  misc_feature: MA Experiment ID: 20000478 Result: Down-regulated in Transcription
  misc_feature: MA Experiment 20000478 PARAMETER Experiment Name: Zm_5mM_SA_P Parameter: Age (day) Value: 11
  misc_feature: MA Experiment 20000478 PARAMETER Experiment Name: Zm_5mM_SA_P Parameter: Organism Value: Zea mays
  misc_feature: MA Experiment 20000478 PARAMETER Experiment Name: Zm_5mM_SA_P Parameter: Plant Line Value: 35A19
  misc_feature: MA Experiment 20000478 PARAMETER Experiment Name: Zm_5mM_SA_P Parameter: Timepoint (hr) Value: 72
  misc_feature: MA Experiment 20000478 PARAMETER Experiment Name: Zm_5mM_SA_P Parameter: Tissue Value: Aerial
  misc_feature: MA Experiment 20000478 PARAMETER Experiment Name: Zm_5mM_SA_P Parameter: Treatment Value: 5mM SA vs. No Treatment
  misc_feature: MA Experiment ID: 20000480 Result: Down-regulated in Transcription
  misc_feature: MA Experiment 20000480 PARAMETER Experiment Name: Zm_Drought_P Parameter: Age (day) Value: 11
  misc_feature: MA Experiment 20000480 PARAMETER Experiment Name: Zm_Drought_P Parameter: Organism Value: Zea mays
  misc_feature: MA Experiment 20000480 PARAMETER Experiment Name: Zm_Drought_P Parameter: Plant Line Value: 35A19
  misc_feature: MA Experiment 20000480 PARAMETER Experiment Name: Zm_Drought_P Parameter: Timepoint (hr) Value: 72
  misc_feature: MA Experiment 20000480 PARAMETER Experiment Name: Zm_Drought_P Parameter: Tissue Value: Aerial
  misc_feature: MA Experiment 20000480 PARAMETER Experiment Name: Zm_Drought_P Parameter: Treatment Value: Drought vs. No Drought
  misc_feature: MA Experiment ID: 20000487 Result: Down-regulated in Transcription
  misc_feature: MA Experiment 20000487 PARAMETER Experiment Name: Zm_50mM_NH4NO3_L_to_H_P Parameter: Organism Value: Zea mays
  misc_feature: MA Experiment 20000487 PARAMETER Experiment Name: Zm_50mM_NH4NO3_L_to_H_P Parameter: Timepoint (hr) Value: 4
  misc_feature: MA Experiment 20000487 PARAMETER Experiment Name: Zm_50mM_NH4NO3_L_to_H_P Parameter: Tissue Value: Leaves
  misc_feature: MA Experiment 20000487 PARAMETER Experiment Name: Zm_50mM_NH4NO3_L_to_H_P Parameter: Treatment Value: 50mM NH4NO3 vs. 100mM Mannitol
  misc_feature: MA Experiment ID: 20000492 Result: Up-regulated in Transcription
  misc_feature: MA Experiment 20000492 PARAMETER Experiment Name: Zm_Hybrid_Seed_Dev_P Parameter: DAP Value: 12
  misc_feature: MA Experiment 20000492 PARAMETER Experiment Name: Zm_Hybrid_Seed_Dev_P Parameter: Organism Value: Zea mays
  misc_feature: MA Experiment 20000492 PARAMETER Experiment Name: Zm_Hybrid_Seed_Dev_P Parameter: Plant Line Value: 35A19
  misc_feature: MA Experiment 20000492 PARAMETER Experiment Name: Zm_Hybrid_Seed_Dev_P Parameter: Tissue Value: Fert Kernel vs. Unfert Floret
atattcattgttcggcccccaagcgagagcatactccgcattgcgaatttgcaagctaaccatggcaccctcgcatgcccactctcgctccgtgccgctcctcctcctcgtgataggagtttgttgctgctgcagtggagcagtcatcgccccgtcgtcggtcgtctccgacgacgacccgacctgtcctcgggagccgacggcggcggtggcagccgtgtcgtcagctgagtctagctacgtcgagccacgccggtgccagccgccggcgccgcacatcgcggtggccgtgttcccctacgacgtcgacccgatgcagttcgcgctgaacctggagtacaccgaggccgagttcttcctgcacggcgcgtacggcgtggggctcgaccacctcgcgccgaggctggcgctgggcggcccgcctccggtgggcgcccggaaggccaacctcgacgaggtgacgaggcgcatcgtcgcggagtttggcctgcaggaagttggccacatcagggctatccagcgcacggtcggcgggattcctcggccgttgatagacctcagcgcccacaacttcgctagggtgatggacgaggcgttcgggacccgcctggaccctcccttcgatccctacgtcaacagcctcaacttcctgctggcctcgtacgtcatcccctacctcggcatcaacggctacgtcggcaccaaccccatcgtcgacggctaccagacaaagaagcttctggcagggctgctgggggtggaggcggcgcaggacgcggtgttccgggcacgcctcttcgagcgcctcggcgaggccgtgccaccgtacgggaacatcacggtggccgagttcacggaccgcgtgtcggcgctgcgcaaccggctggggcggtgcggggtcaaggacgaggggctcacggtgccccgccggctcggcgccgagggcgccatctgcaccaacgtgctctccgcggacagggactcgctctcctacgcccggacgcccgccgagctgctcagcatcctctacctcaccggcgacgagcgcgtgcccggcgggttctatccggagggtgccaacgggaggatcgccaggtcctttcttggcaagccacatggaaactagccaatgcaagctgccgatttgaactacgtgtccgtgcagaaacccggaacatatatatgcatggttggatgaacttgcaaagtttgctgaataatataacagtggattgat

SEQ ID NO: 5629 - protein, 374 aa, Zea mays subsp. mays
  peptide (1)..(374): Ceres Seq. ID no. 12356267
  misc_feature (101)..(368): Homolog of NCBI NO: 15228845 NR Description: putative protein; protein id: At3g62730.1, by cDNA: gi_15294283, supported by cDNA: gi_20147274 [Arabidopsis
  misc_feature (105)..(368): Homolog of NCBI NO: 18401988 NR Description: dessication-related protein, putative; protein
  misc_feature (105)..(368): Homolog of NCBI NO: 25357137 NR Description: hypothetical protein T2J15.11 [imported] -
  misc_feature (105)..(368): Homolog of NCBI NO: 21593191 NR Description: dessication-related protein, putative
  misc_feature (85)..(226): Homolog of NCBI NO: 12083528 NR Description: similar to Arabidopsis thaliana hypothetical
  misc_feature (228)..(367): Homolog of NCBI NO: 12083528 NR Description: similar to Arabidopsis thaliana hypothetical
  misc_feature (101)..(368): Homolog of NCBI NO: 38346151 NR Description: OSJNBb0118P14.11 [Oryza sativa (japonica
  misc_feature (64)..(362): Homolog of NCBI NO: 118926 NR Description: Desiccation-related protein PCC13-62 precursor
  misc_feature (99)..(366): Homolog of NCBI NO: 22984403 NR Description: hypothetical protein [Burkholderia fungorum]
  misc_feature (115)..(363): Homolog of NCBI NO: 16263242 NR Description: Conserved hypothetical protein [Sinorhizobium
  misc_feature (101)..(368): Homolog of NCBI NO: 15228845 NR Description: putative protein; protein id: At3g62730.1, by cDNA: gi_15294283, supported by cDNA: gi_20147274 [Arabidopsis
  misc_feature (105)..(368): Homolog of NCBI NO: 18401988 NR Description: dessication-related protein, putative; protein
  misc_feature (105)..(368): Homolog of NCBI NO: 25357137 NR Description: hypothetical protein T2J15.11 [imported] -
  misc_feature (105)..(368): Homolog of NCBI NO: 21593191 NR Description: dessication-related protein, putative
  misc_feature (85)..(226): Homolog of NCBI NO: 12083528 NR Description: similar to Arabidopsis thaliana hypothetical
  misc_feature (228)..(367): Homolog of NCBI NO: 12083528 NR Description: similar to Arabidopsis thaliana hypothetical
  misc_feature (101)..(368): Homolog of NCBI NO: 38346151 NR Description: OSJNBb0118P14.11 [Oryza sativa (japonica
  misc_feature (64)..(362): Homolog of NCBI NO: 118926 NR Description: Desiccation-related protein PCC13-62 precursor
  misc_feature (99)..(366): Homolog of NCBI NO: 22984403 NR Description: hypothetical protein [Burkholderia fungorum]
  misc_feature (115)..(363): Homolog of NCBI NO: 16263242 NR Description: Conserved hypothetical protein [Sinorhizobium
YSLFGPQARAYSALRICKLTMAPSHAHSRSVPLLLLVIGVCCCCSGAVIAPSSVVSDDDPTCPREPTAAVAAVSSAESSYVEPRRCQPPAPHIAVAVFPYDVDPMQFALNLEYTEAEFFLHGAYGVGLDHLAPRLALGGPPPVGARKANLDEVTRRIVAEFGLQEVGHIRAIQRTVGGIPRPLIDLSAHNFARVMDEAFGTRLDPPFDPYVNSLNFLLASYVIPYLGINGYVGTNPIVDGYQTKKLLAGLLGVEAAQDAVFRARLFERLGEAVPPYGNITVAEFTDRVSALRNRLGRCGVKDEGLTVPRRLGAEGAICTNVLSADRDSLSYARTPAELLSILYLTGDERVPGGFYPEGANGRIARSFLGKPHGN

SEQ ID NO: 5630 - protein, 354 aa, Zea mays subsp. mays
  peptide (1)..(354): Ceres Seq. ID no. 12356268
  misc_feature (81)..(348): Homolog of NCBI NO: 15228845 NR Description: putative protein; protein id: At3g62730.1, by cDNA: gi_15294283, supported by cDNA: gi_20147274 [Arabidopsis
  misc_feature (85)..(348): Homolog of NCBI NO: 18401988 NR Description: dessication-related protein, putative; protein
  misc_feature (85)..(348): Homolog of NCBI NO: 25357137 NR Description: hypothetical protein T2J15.11 [imported] -
  misc_feature (85)..(348): Homolog of NCBI NO: 21593191 NR Description: dessication-related protein, putative
  misc_feature (65)..(206): Homolog of NCBI NO: 12083528 NR Description: similar to Arabidopsis thaliana hypothetical
  misc_feature (208)..(347): Homolog of NCBI NO: 12083528 NR Description: similar to Arabidopsis thaliana hypothetical
  misc_feature (81)..(348): Homolog of NCBI NO: 38346151 NR Description: OSJNBb0118P14.11 [Oryza sativa (japonica
  misc_feature (44)..(342): Homolog of NCBI NO: 118926 NR Description: Desiccation-related protein PCC13-62 precursor
  misc_feature (79)..(346): Homolog of NCBI NO: 22984403 NR Description: hypothetical protein [Burkholderia fungorum]
  misc_feature (95)..(343): Homolog of NCBI NO: 16263242 NR Description: Conserved hypothetical protein [Sinorhizobium
  misc_feature (81)..(348): Homolog of NCBI NO: 15228845 NR Description: putative protein; protein id: At3g62730.1, by cDNA: gi_15294283, supported by cDNA: gi_20147274 [Arabidopsis
  misc_feature (85)..(348): Homolog of NCBI NO: 18401988 NR Description: dessication-related protein, putative; protein
  misc_feature (85)..(348): Homolog of NCBI NO: 25357137 NR Description: hypothetical protein T2J15.11 [imported] -
  misc_feature (85)..(348): Homolog of NCBI NO: 21593191 NR Description: dessication-related protein, putative
  misc_feature (65)..(206): Homolog of NCBI NO: 12083528 NR Description: similar to Arabidopsis thaliana hypothetical
  misc_feature (208)..(347): Homolog of NCBI NO: 12083528 NR Description: similar to Arabidopsis thaliana hypothetical
  misc_feature (81)..(348): Homolog of NCBI NO: 38346151 NR Description: OSJNBb0118P14.11 [Oryza sativa (japonica
  misc_feature (44)..(342): Homolog of NCBI NO: 118926 NR Description: Desiccation-related protein PCC13-62 precursor
  misc_feature (79)..(346): Homolog of NCBI NO: 22984403 NR Description: hypothetical protein [Burkholderia fungorum]
  misc_feature (95)..(343): Homolog of NCBI NO: 16263242 NR Description: Conserved hypothetical protein [Sinorhizobium
MAPSHAHSRSVPLLLLVIGVCCCCSGAVIAPSSVVSDDDPTCPREPTAAVAAVSSAESSYVEPRRCQPPAPHIAVAVFPYDVDPMQFALNLEYTEAEFFLHGAYGVGLDHLAPRLALGGPPPVGARKANLDEVTRRIVAEFGLQEVGHIRAIQRTVGGIPRPLIDLSAHNFARVMDEAFGTRLDPPFDPYVNSLNFLLASYVIPYLGINGYVGTNPIVDGYQTKKLLAGLLGVEAAQDAVFRARLFERLGEAVPPYGNITVAEFTDRVSALRNRLGRCGVKDEGLTVPRRLGAEGAICTNVLSADRDSLSYARTPAELLSILYLTGDERVPGGFYPEGANGRIARSFLGKPHGN

SEQ ID NO: 5631 - protein, 270 aa, Zea mays subsp. mays
  peptide (1)..(270): Ceres Seq. ID no. 12356269
  misc_feature (1)..(264): Homolog of NCBI NO: 15228845 NR Description: putative protein; protein id: At3g62730.1, by cDNA: gi_15294283, supported by cDNA: gi_20147274 [Arabidopsis
  misc_feature (1)..(264): Homolog of NCBI NO: 18401988 NR Description: dessication-related protein, putative; protein
  misc_feature (1)..(264): Homolog of NCBI NO: 25357137 NR Description: hypothetical protein T2J15.11 [imported] -
  misc_feature (1)..(264): Homolog of NCBI NO: 21593191 NR Description: dessication-related protein, putative
  misc_feature (1)..(122): Homolog of NCBI NO: 12083528 NR Description: similar to Arabidopsis thaliana hypothetical
  misc_feature (124)..(263): Homolog of NCBI NO: 12083528 NR Description: similar to Arabidopsis thaliana hypothetical
  misc_feature (1)..(264): Homolog of NCBI NO: 38346151 NR Description: OSJNBb0118P14.11 [Oryza sativa (japonica
  misc_feature (1)..(258): Homolog of NCBI NO: 118926 NR Description: Desiccation-related protein PCC13-62 precursor
  misc_feature (1)..(262): Homolog of NCBI NO: 22984403 NR Description: hypothetical protein [Burkholderia fungorum]
  misc_feature (11)..(259): Homolog of NCBI NO: 16263242 NR Description: Conserved hypothetical protein [Sinorhizobium
  misc_feature (1)..(264): Homolog of NCBI NO: 15228845 NR Description: putative protein; protein id: At3g62730.1, by cDNA: gi_15294283, supported by cDNA: gi_20147274 [Arabidopsis
  misc_feature (1)..(264): Homolog of NCBI NO: 18401988 NR Description: dessication-related protein, putative; protein
  misc_feature (1)..(264): Homolog of NCBI NO: 25357137 NR Description: hypothetical protein T2J15.11 [imported] -
  misc_feature (1)..(264): Homolog of NCBI NO: 21593191 NR Description: dessication-related protein, putative
  misc_feature (1)..(122): Homolog of NCBI NO: 12083528 NR Description: similar to Arabidopsis thaliana hypothetical
  misc_feature (124)..(263): Homolog of NCBI NO: 12083528 NR Description: similar to Arabidopsis thaliana hypothetical
  misc_feature (1)..(264): Homolog of NCBI NO: 38346151 NR Description: OSJNBb0118P14.11 [Oryza sativa (japonica
  misc_feature (1)..(258): Homolog of NCBI NO: 118926 NR Description: Desiccation-related protein PCC13-62 precursor
  misc_feature (1)..(262): Homolog of NCBI NO: 22984403 NR Description: hypothetical protein [Burkholderia fungorum]
  misc_feature (11)..(259): Homolog of NCBI NO: 16263242 NR Description: Conserved hypothetical protein [Sinorhizobium
MQFALNLEYTEAEFFLHGAYGVGLDHLAPRLALGGPPPVGARKANLDEVTRRIVAEFGLQEVGHIRAIQRTVGGIPRPLIDLSAHNFARVMDEAFGTRLDPPFDPYVNSLNFLLASYVIPYLGINGYVGTNPIVDGYQTKKLLAGLLGVEAAQDAVFRARLFERLGEAVPPYGNITVAEFTDRVSALRNRLGRCGVKDEGLTVPRRLGAEGAICTNVLSADRDSLSYARTPAELLSILYLTGDERVPGGFYPEGANGRIARSFLGKPHGN

SEQ ID NO: 5632 - DNA, 1354 bp, Zea mays subsp. mays
  misc_feature (1)..(1354): Ceres Seq. ID no. 12405084
  misc_feature: MA Experiment ID: 108528 Result: Up-regulated in Transcription
  misc_feature: MA Experiment 108528 PARAMETER Experiment Name: Zm_Imbibed_Seeds_P Parameter: Age (day) Value: 5 vs. 2
  misc_feature: MA Experiment 108528 PARAMETER Experiment Name: Zm_Imbibed_Seeds_P Parameter: Organism Value: Zea mays
  misc_feature: MA Experiment 108528 PARAMETER Experiment Name: Zm_Imbibed_Seeds_P Parameter: Plant Line Value: 35A19
  misc_feature: MA Experiment 108528 PARAMETER Experiment Name: Zm_Imbibed_Seeds_P Parameter: Tissue Value: Aerial vs. Embryo
  misc_feature: MA Experiment ID: 108530 Result: Up-regulated in Transcription
  misc_feature: MA Experiment 108530 PARAMETER Experiment Name: Zm_Imbibed_Seeds_P Parameter: Age (day) Value: 6 vs. 2
  misc_feature: MA Experiment 108530 PARAMETER Experiment Name: Zm_Imbibed_Seeds_P Parameter: Organism Value: Zea mays
  misc_feature: MA Experiment 108530 PARAMETER Experiment Name: Zm_Imbibed_Seeds_P Parameter: Plant Line Value: 35A19
  misc_feature: MA Experiment 108530 PARAMETER Experiment Name: Zm_Imbibed_Seeds_P Parameter: Tissue Value: Aerial vs. Embryo
  misc_feature: MA Experiment ID: 108545 Result: Up-regulated in Transcription
  misc_feature: MA Experiment 108545 PARAMETER Experiment Name: Zm_Imbibed_Seeds_P Parameter: Age (day) Value: 3 vs. 2
  misc_feature: MA Experiment 108545 PARAMETER Experiment Name: Zm_Imbibed_Seeds_P Parameter: Organism Value: Zea mays
  misc_feature: MA Experiment 108545 PARAMETER Experiment Name: Zm_Imbibed_Seeds_P Parameter: Plant Line Value: 35A19
  misc_feature: MA Experiment 108545 PARAMETER Experiment Name: Zm_Imbibed_Seeds_P Parameter: Tissue Value: Aerial vs. Embryo
  misc_feature: MA Experiment ID: 108547 Result: Up-regulated in Transcription
  misc_feature: MA Experiment 108547 PARAMETER Experiment Name: Zm_Imbibed_Seeds_P Parameter: Age (day) Value: 4 vs. 2
  misc_feature: MA Experiment 108547 PARAMETER Experiment Name: Zm_Imbibed_Seeds_P Parameter: Organism Value: Zea mays
  misc_feature: MA Experiment 108547 PARAMETER Experiment Name: Zm_Imbibed_Seeds_P Parameter: Plant Line Value: 35A19
  misc_feature: MA Experiment 108547 PARAMETER Experiment Name: Zm_Imbibed_Seeds_P Parameter: Tissue Value: Aerial vs. Embryo
  misc_feature: MA Experiment ID: 20000492 Result: Up-regulated in Transcription
  misc_feature: MA Experiment 20000492 PARAMETER Experiment Name: Zm_Hybrid_Seed_Dev_P Parameter: DAP Value: 12
  misc_feature: MA Experiment 20000492 PARAMETER Experiment Name: Zm_Hybrid_Seed_Dev_P Parameter: Organism Value: Zea mays
  misc_feature: MA Experiment 20000492 PARAMETER Experiment Name: Zm_Hybrid_Seed_Dev_P Parameter: Plant Line Value: 35A19
  misc_feature: MA Experiment 20000492 PARAMETER Experiment Name: Zm_Hybrid_Seed_Dev_P Parameter: Tissue Value: Fert Kernel vs. Unfert Floret
  misc_feature: MA Experiment ID: 20000534 Result: Down-regulated in Transcription
  misc_feature: MA Experiment 20000534 PARAMETER Experiment Name: Zm_Hybrid_Pollen_P Parameter: Age (day) Value: 8
  misc_feature: MA Experiment 20000534 PARAMETER Experiment Name: Zm_Hybrid_Pollen_P Parameter: Organism Value: Zea mays
  misc_feature: MA Experiment 20000534 PARAMETER Experiment Name: Zm_Hybrid_Pollen_P Parameter: Plant Line Value: 35A19
  misc_feature: MA Experiment 20000534 PARAMETER Experiment Name: Zm_Hybrid_Pollen_P Parameter: Tissue Value: Pollen vs. Aerial
atcgaaaagctcgttcagtcgtcctcttcctccaaacctttccgctgccggtgaacttcctccacctgaagcccctaccacgataagccctaatcccagcgccacctcgatggcgaccacctctttctttcatccgctcgccgccccgatggaccgcggtaggtgtgtgttttcgtcgctgcccgttcagcctaaccatccccgcccgtacagcgccccggcgaccggcgccgnttctcgtcgtcngcgctaagcgcgcnnggcagccagcnccctgntgcngcngcntcgcgtnanccgcgaatcccagcgcnggtcccgaagccgggacgtggnaagaagaggaggaggaggtcgagggaggagatgccctggatccaggacaaggcgctggacctcgtggagttcactggcaccgtcacacaggccatcccagggccccgtgttggctctagccctgttccatggcttctcgcggttcccctcgcctacgtcggggtctcctttgtgctcgcggtcgtccgcaccgtgcgcaagttcacctcgccgcacactaagaagaagcgaagggtgagtaagaatatattcttgttgaagtcactagatgatctgtttcagaagggcagggaggcaataaattatcctgctcttcaggacctaatgcaaaagacaggatttgacatggatgatgtagtaaggaagtacatccgttacacactgaatgaaaaacagttcagtcctgatgtggttgtggatctcatacatcttaggaaggcatcaatgctggaagatgcagaagttgctgaaattttaaatgagatttcaagacgaattgtccgggaaaaagggccagtagttatggacttattctggttttacagagcaaggttttaagcggaagcttgctgtacaagcactgtttggaaaaatcctatacttatcagaacttccggagttctgttcacgggacagctcacttgtagtcaaagaaatctttggagttacagatgaggatgcagacagcctgcggattcacaccctatcancaacaggtgatatcgaatctatacagaagatggtggacgatctagacctagaacaaggtcccccatcatcgtcttgagttatggtggtggaataatgctaaacatcttcgttgatagtgttgcaattttagattgatgtgagtttctcgaatcttttcgtttagttttttcagctgctgaagtaggacttgggcctgtgaacacaggatactttcggctggagcctggaggttttgtaaattgcctctcgattaggataacgtatgtcagacctgcccatgatttgagtaaacgagaatactattatt

SEQ ID NO: 5633 - protein, 175 aa, Zea mays subsp. mays
  peptide (1)..(175): Ceres Seq. ID no. 12405085
  misc_feature (1)..(175): Homolog of NCBI NO: 38344450 NR Description: OSJNBa0038O10.22 [Oryza sativa (japonica
  misc_feature (1)..(175): Homolog of NCBI NO: 18415850 NR Description: putative protein; protein id: At5g08540.1, by cDNA: 249722., supported by cDNA: gi_14334821, supported by gi_15293202 [Arabidopsis thaliana] >gi|14334822|gb|AAK59589.1|
  misc_feature (1)..(175): Homolog of NCBI NO: 21592521 NR Description: unknown [Arabidopsis thaliana]
  misc_feature (1)..(175): Homolog of NCBI NO: 9759348 NR Description: gene_id:MAH20.10~pir||T27191~similar to unknown
MPWIQDKALDLVEFTGTVTQAIPGPRVGSSPVPWLLAVPLAYVGVSFVLAVVRTVRKFTSPHTKKKRRVSKNIFLLKSLDDLFQKGREAINYPALQDLMQKTGFDMDDVVRKYIRYTLNEKQFSPDVVVDLIHLRKASMLEDAEVAEILNEISRRIVREKGPVVMDLFWFYRARF

SEQ ID NO: 5634 - DNA, 1766 bp, Zea mays subsp. mays
  misc_feature (1)..(1766): Ceres Seq. ID no. 12408037
  misc_feature: MA Experiment ID: 108523 Result: Up-regulated in Transcription
  misc_feature: MA Experiment 108523 PARAMETER Experiment Name: Zm_42deg_Heat_P Parameter: Age (day) Value: 8
  misc_feature: MA Experiment 108523 PARAMETER Experiment Name: Zm_42deg_Heat_P Parameter: Organism Value: Zea mays
  misc_feature: MA Experiment 108523 PARAMETER Experiment Name: Zm_42deg_Heat_P Parameter: Plant Line Value: 35A19
  misc_feature: MA Experiment 108523 PARAMETER Experiment Name: Zm_42deg_Heat_P Parameter: Temperature (deg C) Value: 42 vs. 22
  misc_feature: MA Experiment 108523 PARAMETER Experiment Name: Zm_42deg_Heat_P Parameter: Timepoint (hr) Value: 6
  misc_feature: MA Experiment 108523 PARAMETER Experiment Name: Zm_42deg_Heat_P Parameter: Tissue Value: Aerial
  misc_feature: MA Experiment ID: 108528 Result: Up-regulated in Transcription
  misc_feature: MA Experiment 108528 PARAMETER Experiment Name: Zm_Imbibed_Seeds_P Parameter: Age (day) Value: 5 vs. 2
  misc_feature: MA Experiment 108528 PARAMETER Experiment Name: Zm_Imbibed_Seeds_P Parameter: Organism Value: Zea mays
  misc_feature: MA Experiment 108528 PARAMETER Experiment Name: Zm_Imbibed_Seeds_P Parameter: Plant Line Value: 35A19
  misc_feature: MA Experiment 108528 PARAMETER Experiment Name: Zm_Imbibed_Seeds_P Parameter: Tissue Value: Aerial vs. Embryo
  misc_feature: MA Experiment ID: 108530 Result: Up-regulated in Transcription
  misc_feature: MA Experiment 108530 PARAMETER Experiment Name: Zm_Imbibed_Seeds_P Parameter: Age (day) Value: 6 vs. 2
  misc_feature: MA Experiment 108530 PARAMETER Experiment Name: Zm_Imbibed_Seeds_P Parameter: Organism Value: Zea mays
  misc_feature: MA Experiment 108530 PARAMETER Experiment Name: Zm_Imbibed_Seeds_P Parameter: Plant Line Value: 35A19
  misc_feature: MA Experiment 108530 PARAMETER Experiment Name: Zm_Imbibed_Seeds_P Parameter: Tissue Value: Aerial vs. Embryo
  misc_feature: MA Experiment ID: 108535 Result: Up-regulated in Transcription
  misc_feature: MA Experiment 108535 PARAMETER Experiment Name: Zm_Meristem_P Parameter: Age (day) Value: 8
  misc_feature: MA Experiment 108535 PARAMETER Experiment Name: Zm_Meristem_P Parameter: Organism Value: Zea mays
  misc_feature: MA Experiment 108535 PARAMETER Experiment Name: Zm_Meristem_P Parameter: Plant Line Value: 35A19
  misc_feature: MA Experiment 108535 PARAMETER Experiment Name: Zm_Meristem_P Parameter: Tissue Value: Root Meristem vs. Above Root Meristem
  misc_feature: MA Experiment ID: 20000477 Result: Up-regulated in Transcription
  misc_feature: MA Experiment 20000477 PARAMETER Experiment Name: Zm_5mM_SA_P Parameter: Age (day) Value: 10
  misc_feature: MA Experiment 20000477 PARAMETER Experiment Name: Zm_5mM_SA_P Parameter: Organism Value: Zea mays
  misc_feature: MA Experiment 20000477 PARAMETER Experiment Name: Zm_5mM_SA_P Parameter: Plant Line Value: 35A19
  misc_feature: MA Experiment 20000477 PARAMETER Experiment Name: Zm_5mM_SA_P Parameter: Timepoint (hr) Value: 48
  misc_feature: MA Experiment 20000477 PARAMETER Experiment Name: Zm_5mM_SA_P Parameter: Tissue Value: Aerial
  misc_feature: MA Experiment 20000477 PARAMETER Experiment Name: Zm_5mM_SA_P Parameter: Treatment Value: 5mM SA vs. No Treatment
caggctccctcctcctccctgcaaatcctgcagacaccaccgctcgtttttctctccgggacaggagaaaaggggagagagaggtgaggcgcggtgtccgcccgatctgctctgccccgacgcagctgttacgacctcctcagtctcaggagcaagatgggtgccggcggcaggatgaccgagaaggagcgggagaagcaggagcagctcgcccgagctaccggtggcgccgcgatgcagcggtcgccggtggagaagcctccgttcactctgggtcagatcaagaaggccatcccgccacactgcttcgagcgctcggtgcctcaagtccttctcgtacgtggtccacgacctggtgatcgccgcggcgctcctctacttcgcgctggccatcataccggcgctcccaagcccgctcggctacgcggcctggccgctgtactggatcgcgcaggggtgcgtgtgcaccggcgtgtgggtcatcgcgcacgagtgcggccaccacgccttctcggactactcgctcctggacgacgtggtcggcctggtgctgcactcgtcgctcatggtgccctacttctcgtggaagtacagccaccggcgccaccactccaacactgggtccctggagcgcgacgaggtgttcgtgcccaagaagaaggaggcgctgccgtggtacaccccgtacgtgtacaacaacccggtcggccggctggtgcacatcgtggtgcagctcaccctcgggtggcccgctgtacctggcgaccaacgcgtcggggcggcccgtacccgcgcttcgcctgccacttcgacccctacggccccatctacaacgaccgggagcgcgcccagatcttcgtctcggacgccggcgtcgtggccgtggcgttcgggctgtacaagctggcggcggcgttcggggtctggtgggtggtgcgcgtgtacgccgtgccgctgctgatcgtgaacgcgtggctggtgctcatcacctacctgcagcacacccacccgtcgctcccccactacgactcgagcgagtgggactggctgcgcggcgcgctggccaccatggaccgcgactacggcatcctcaaccgcgtgttccacaacatcacggacacgcacgtcgcgcaccacctcttctccaccatgccgcactaccacgccatggaggccaccaaggcgatcaggcccatcctcggcgactactaccacttcgacccgacccctgtggccaaggcgacctggcgcgaggccggggaatgcatctacgtcgagcccgaggaccgcaagggcgtcttctctacaacaagaagttctagccgccgccgctcgcagagctgagaggacgctaccataggaatgggagcaggaaccaggaggaggagacggtactcgccccaaagtctccgtctacctatctaatcgttagtcgtcagtcttttagacgggaagagagagcatttggacacagagacgaaggcttactgcagtgccatcgctagagctgccatcaagtacaagtaggcaaattcgtcaacttagtgtgtcccatgttgtttttcttagtcgtccgctgctgtaggctttccggcggcggtcgtttgtgtggttggcatccgtggccatgcctgtgcgtgcgtggccgcgcttgtcgtgtgcgtctgtcgtcgcgttggcgtcgtctcttcgtgctccccgtgtgttgttgtaaaacaagaagatgttttctggtgtctttggcggaataacagatcgtccgaacg

SEQ ID NO: 5635 - protein, 395 aa, Zea mays subsp. mays
  peptide (1)..(395): Ceres Seq. ID no. 12408038
  misc_feature (208)..(348): Pfam Name: Fatty acid desaturase Pfam Description: Fatty acid desaturase
  misc_feature (208)..(382): Homolog of NCBI NO: 28371827 NR Description: delta-12 oleate desaturase [Punica granatum]
  misc_feature (1)..(55): Homolog of NCBI NO: 28371827 NR Description: delta-12 oleate desaturase [Punica granatum]
  misc_feature (208)..(382): Homolog of NCBI NO: 34903462 NR Description: putative omega-6 fatty acid desaturase [Oryza
  misc_feature (1)..(55): Homolog of NCBI NO: 34903462 NR Description: putative omega-6 fatty acid desaturase [Oryza
  misc_feature (208)..(382): Homolog of NCBI NO: 28564441 NR Description: delta 12-acyl-lipid-desaturase [Punica granatum]
  misc_feature (1)..(55): Homolog of NCBI NO: 28564441 NR Description: delta 12-acyl-lipid-desaturase [Punica granatum]
  misc_feature (208)..(382): Homolog of NCBI NO: 8886726 NR Description: omega-6 fatty acid desaturase [Sesamum indicum]
  misc_feature (1)..(55): Homolog of NCBI NO: 8886726 NR Description: omega-6 fatty acid desaturase [Sesamum indicum]
  misc_feature (208)..(382): Homolog of NCBI NO: 27261181 NR Description: delta 12 oleic acid desaturase FAD2 [Vernicia
  misc_feature (1)..(55): Homolog of NCBI NO: 27261181 NR Description: delta 12 oleic acid desaturase FAD2 [Vernicia
MGAGGRMTEKEREKQEQLARATGGAAMQRSPVEKPPFTLGQIKKAIPPHCFERSVPQVLLVRGPRPGDRRGAPLLRAGHHTGAPKPARLRGLAAVLDRAGVRVHRRVGHRARVRPPRLLGLLAPGRRGRPGAALVAHGALLLVEVQPPAPPLQHWVPGARRGVRAQEEGGAAVVHPVRVQQPGRPAGAHRGAAHPRVARCTWRPTRRGGPYPRFACHFDPYGPIYNDRERAQIFVSDAGVVAVAFGLYKLAAAFGVWWVVRVYAVPLLIVNAWLVLITYLQHTHPSLPHYDSSEWDWLRGALATMDRDYGILNRVFHNITDTHVAHHLFSTMPHYHAMEATKAIRPILGDYYHFDPTPVAKATWREAGECIYVEPEDRKGVFSTTRSSSRRRSQS

SEQ ID NO: 5636 - protein, 389 aa, Zea mays subsp. mays
  peptide (1)..(389): Ceres Seq. ID no. 12408039
  misc_feature (202)..(342): Pfam Name: Fatty acid desaturase Pfam Description: Fatty acid desaturase
  misc_feature (202)..(376): Homolog of NCBI NO: 28371827 NR Description: delta-12 oleate desaturase [Punica granatum]
  misc_feature (1)..(49): Homolog of NCBI NO: 28371827 NR Description: delta-12 oleate desaturase [Punica granatum]
  misc_feature (202)..(376): Homolog of NCBI NO: 34903462 NR Description: putative omega-6 fatty acid desaturase [Oryza
  misc_feature (1)..(49): Homolog of NCBI NO: 34903462 NR Description: putative omega-6 fatty acid desaturase [Oryza
  misc_feature (202)..(376): Homolog of NCBI NO: 28564441 NR Description: delta 12-acyl-lipid-desaturase [Punica granatum]
  misc_feature (1)..(49): Homolog of NCBI NO: 28564441 NR Description: delta 12-acyl-lipid-desaturase [Punica granatum]
  misc_feature (202)..(376): Homolog of NCBI NO: 8886726 NR Description: omega-6 fatty acid desaturase [Sesamum indicum]
  misc_feature (1)..(49): Homolog of NCBI NO: 8886726 NR Description: omega-6 fatty acid desaturase [Sesamum indicum]
  misc_feature (202)..(376): Homolog of NCBI NO: 27261181 NR Description: delta 12 oleic acid desaturase FAD2 [Vernicia
  misc_feature (1)..(49): Homolog of NCBI NO: 27261181 NR Description: delta 12 oleic acid desaturase FAD2 [Vernicia
MTEKEREKQEQLARATGGAAMQRSPVEKPPFTLGQIKKAIPPHCFERSVPQVLLVRGPRPGDRRGAPLLRAGHHTGAPKPARLRGLAAVLDRAGVRVHRRVGHRARVRPPRLLGLLAPGRRGRPGAALVAHGALLLVEVQPPAPPLQHWVPGARRGVRAQEEGGAAVVHPVRVQQPGRPAGAHRGAAHPRVARCTWRPTRRGGPYPRFACHFDPYGPIYNDRERAQIFVSDAGVVAVAFGLYKLAAAFGVWWVVRVYAVPLLIVNAWLVLITYLQHTHPSLPHYDSSEWDWLRGALATMDRDYGILNRVFHNITDTHVAHHLFSTMPHYHAMEATKAIRPILGDYYHFDPTPVAKATWREAGECIYVEPEDRKGVFSTTRSSSRRRSQS

SEQ ID NO: 5637 - protein, 369 aa, Zea mays subsp. mays
  peptide (1)..(369): Ceres Seq. ID no. 12408040
  misc_feature (182)..(322): Pfam Name: Fatty acid desaturase Pfam Description: Fatty acid desaturase
  misc_feature (1)..(29): Homolog of NCBI NO: 28564441 NR Description: delta 12-acyl-lipid-desaturase [Punica granatum]
  misc_feature (182)..(356): Homolog of NCBI NO: 8886726 NR Description: omega-6 fatty acid desaturase [Sesamum indicum]
  misc_feature (1)..(29): Homolog of NCBI NO: 8886726 NR Description: omega-6 fatty acid desaturase [Sesamum indicum]
  misc_feature (1)..(29): Homolog of NCBI NO: 28371827 NR Description: delta-12 oleate desaturase [Punica granatum]
  misc_feature (1)..(29): Homolog of NCBI NO: 34903462 NR Description: putative omega-6 fatty acid desaturase [Oryza
  misc_feature (182)..(356): Homolog of NCBI NO: 28564441 NR Description: delta 12-acyl-lipid-desaturase [Punica granatum]
  misc_feature (182)..(356): Homolog of NCBI NO: 34903462 NR Description: putative omega-6 fatty acid desaturase [Oryza
  misc_feature (182)..(356): Homolog of NCBI NO: 28371827 NR Description: delta-12 oleate desaturase [Punica granatum]
  misc_feature (182)..(356): Homolog of NCBI NO: 27261181 NR Description: delta 12 oleic acid desaturase FAD2 [Vernicia
  misc_feature (1)..(29): Homolog of NCBI NO: 27261181 NR Description: delta 12 oleic acid desaturase FAD2 [Vernicia
MQRSPVEKPPFTLGQIKKAIPPHCFERSVPQVLLVRGPRPGDRRGAPLLRAGHHTGAPKPARLRGLAAVLDRAGVRVHRRVGHRARVRPPRLLGLLAPGRRGRPGAALVAHGALLLVEVQPPAPPLQHWVPGARRGVRAQEEGGAAVVHPVRVQQPGRPAGAHRGAAHPRVARCTWRPTRRGGPYPRFACHFDPYGPIYNDRERAQIFVSDAGVVAVAFGLYKLAAAFGVWWVVRVYAVPLLIVNAWLVLITYLQHTHPSLPHYDSSEWDWLRGALATMDRDYGILNRVFHNITDTHVAHHLFSTMPHYHAMEATKAIRPILGDYYHFDPTPVAKATWREAGECIYVEPEDRKGVFSTTRSSSRRRSQS

SEQ ID NO: 5638 - DNA, 1434 bp, Zea mays subsp. mays
  misc_feature (1)..(1434): Ceres Seq. ID no. 12362303
  misc_feature: MA Experiment ID: 108527 Result: Up-regulated in Transcription
  misc_feature: MA Experiment 108527 PARAMETER Experiment Name: Zm_5mM_NO_P Parameter: Age (day) Value: 8
  misc_feature: MA Experiment 108527 PARAMETER Experiment Name: Zm_5mM_NO_P Parameter: Organism Value: Zea mays
  misc_feature: MA Experiment 108527 PARAMETER Experiment Name: Zm_5mM_NO_P Parameter: Plant Line Value: 35A19
  misc_feature: MA Experiment 108527 PARAMETER Experiment Name: Zm_5mM_NO_P Parameter: Timepoint (hr) Value: 6
  misc_feature: MA Experiment 108527 PARAMETER Experiment Name: Zm_5mM_NO_P Parameter: Tissue Value: Aerial
  misc_feature: MA Experiment 108527 PARAMETER Experiment Name: Zm_5mM_NO_P Parameter: Treatment Value: 5mM NO vs. No Treatment
  misc_feature: MA Experiment ID: 108529 Result: Up-regulated in Transcription
  misc_feature: MA Experiment 108529 PARAMETER Experiment Name: Zm_Imbibed_Seeds_P Parameter: Age (day) Value: 5 vs. 2
  misc_feature: MA Experiment 108529 PARAMETER Experiment Name: Zm_Imbibed_Seeds_P Parameter: Organism Value: Zea mays
  misc_feature: MA Experiment 108529 PARAMETER Experiment Name: Zm_Imbibed_Seeds_P Parameter: Plant Line Value: 35A19
  misc_feature: MA Experiment 108529 PARAMETER Experiment Name: Zm_Imbibed_Seeds_P Parameter: Tissue Value: Roots vs. Embryo
  misc_feature: MA Experiment ID: 108535 Result: Down-regulated in Transcription
  misc_feature: MA Experiment 108535 PARAMETER Experiment Name: Zm_Meristem_P Parameter: Age (day) Value: 8
  misc_feature: MA Experiment 108535 PARAMETER Experiment Name: Zm_Meristem_P Parameter: Organism Value: Zea mays
  misc_feature: MA Experiment 108535 PARAMETER Experiment Name: Zm_Meristem_P Parameter: Plant Line Value: 35A19
  misc_feature: MA Experiment 108535 PARAMETER Experiment Name: Zm_Meristem_P Parameter: Tissue Value: Root Meristem vs. Above Root Meristem
  misc_feature: MA Experiment ID: 20000108 Result: Down-regulated in Transcription
  misc_feature: MA Experiment 20000108 PARAMETER Experiment Name: Zm_Root-Tips_P Parameter: Age (day) Value: 12
  misc_feature: MA Experiment 20000108 PARAMETER Experiment Name: Zm_Root-Tips_P Parameter: Organism Value: Zea mays
  misc_feature: MA Experiment 20000108 PARAMETER Experiment Name: Zm_Root-Tips_P Parameter: Tissue Value: Root tips vs. Root mid region    35
  misc_feature: MA Experiment 20000108 PARAMETER Experiment Name: Zm_Root-Tips_P Parameter: Tissue Value: Root tips vs. Root mid region   Sequence Listing-Misc Features (4)
  misc_feature: MA Experiment ID: 20000626 Result: Up-regulated in Transcription
  misc_feature: MA Experiment 20000626 PARAMETER Experiment Name: Zm_Herbicide-Treatments_P Parameter: Timepoint (hr) Value: 12
  misc_feature: MA Experiment 20000626 PARAMETER Experiment Name: Zm_Herbicide-Treatments_P Parameter: Tissue Value: Aerial
  misc_feature: MA Experiment 20000626 PARAMETER Experiment Name: Zm_Herbicide-Treatments_P Parameter: Treatment Value: Roundup vs. No Treatment
  misc_feature: MA Experiment ID: 20000627 Result: Up-regulated in Transcription
  misc_feature: MA Experiment 20000627 PARAMETER Experiment Name: Zm_Herbicide-Treatments_P Parameter: Timepoint (hr) Value: 12
  misc_feature: MA Experiment 20000627 PARAMETER Experiment Name: Zm_Herbicide-Treatments_P Parameter: Tissue Value: Aerial
  misc_feature: MA Experiment 20000627 PARAMETER Experiment Name: Zm_Herbicide-Treatments_P Parameter: Treatment Value: Finale vs. No Treatment
  misc_feature: MA Experiment ID: 20001612 Result: Up-regulated in Transcription
  misc_feature: MA Experiment 20001612 PARAMETER Experiment Name: Zm_50ppm_KNO3_L-to-H_P Parameter: Age (day) Value: 19
  misc_feature: MA Experiment 20001612 PARAMETER Experiment Name: Zm_50ppm_KNO3_L-to-H_P Parameter: Organism Value: Zea mays
  misc_feature: MA Experiment 20001612 PARAMETER Experiment Name: Zm_50ppm_KNO3_L-to-H_P Parameter: Plant Line Value: 35A19
  misc_feature: MA Experiment 20001612 PARAMETER Experiment Name: Zm_50ppm_KNO3_L-to-H_P Parameter: Timepoint (hr) Value: 8
  misc_feature: MA Experiment 20001612 PARAMETER Experiment Name: Zm_50ppm_KNO3_L-to-H_P Parameter: Tissue Value: Roots
  misc_feature: MA Experiment 20001612 PARAMETER Experiment Name: Zm_50ppm_KNO3_L-to-H_P Parameter: Treatment Value: 50ppm KNO3 vs. 50ppm KCl
accgatcacacaatcccgacttcccgaggccgcccggcccgagagcaccgagcacgcttctcccaaactgcactgctccgtccacggcacggcgaggcggggacgccaaagcaaaaaggcaataaagccagcggccagggccaggaccaggagccggcgtcggtggaggctgaggcagaggcgccgaagcggcggcggcatgggggtgctgcggagcacgcagagcctggaggccgaggtagaggagatgcgcggcgcgctgctgctccatggcgcgtgggcgtggaggcccggcgggggcgccgccaagcgcgcggcccgcgccgtggagcccgccgccgcggaggcgcgcaccgtgtgcgtcacggggggcacgtccttcctcggcttcgccgtcgtcgaccgcctgctccgccacggctacaccgtccgcctcgccctcgagacgcaagaggaccttgacaagctgcgggagatggagatgtttggggagaatggcagggatggggtctggactgtgatcgcaaatgtgatggacccggagagtttgcatgaggctttcgacggctgtgttggtgtctttcacacttcgtcgcatgtggatccagcgggcatctccggttacacgaaacacatggcaggcttggaggccaaagcagcagagctggtggtggaagcatgtgtgaggacagaatccgtgaggaagtgcgtcctgacgtcgtcactgttggcatgcgtctggaggcagaactaccctcatgaccgccgccggttcccaactaccatcgatgagaactgttggagcgacgagagcttgtgccgcgacaacaagctgtggctgtcactcggcaagacgatggcggaaaaggcggcgtggagggccgcacggggaacagacctgaagctagtgaccatatgcccagcactggtaactgggccggggttccggaggcggaaccctactccatccattgcatacctcaaaggagcgcacgccatgctcgtccaaggtctgctggcgactgcgaacgtggagagggtggcggaggcgcacgtccgcgtgtacgaggagctgagcggcacggccgggggccggtacatctgctacgaccacgtggtgcgacgaggcgaggagttcgcggagctgcagcggcagctggggctcagggtccccgcgacgcccgacggctatggtggcgacgacgacgacggccgggcgccgcggttccagctctgtaaccggaagctggcggcgctcatgtccgcgcggaggcggtgcacctacgacgcctacttccccatgccgcaggagtgagaccggaagaggagagagagctgctgatgctggacaacgactggagcgtgcgtgacaagtgacctcgtgtacatagcaatagtggtgatcggctcgcatcaatataataaatcggcccc

SEQ ID NO: 5639 - protein, 437 aa, Zea mays subsp. mays
  peptide (1)..(437): Ceres Seq. ID no. 12362304
  misc_feature (67)..(432): Homolog of NCBI NO: 34911590 NR Description: putative cinnamoyl CoA reductase [Oryza sativa
  misc_feature (67)..(428): Homolog of NCBI NO: 15241467 NR Description: cinnamoyl CoA reductase - like protein; protein At5g14700.1, supported by cDNA: 17229., supported by cDNA: supported by cDNA: gi_20259644 [Arabidopsis thaliana]
  misc_feature (67)..(428): Homolog of NCBI NO: 21553833 NR Description: cinnamoyl CoA reductase-like protein [Arabidopsis
  misc_feature (120)..(426): Homolog of NCBI NO: 25412171 NR Description: probable cinnamoyl CoA reductase [imported] -
  misc_feature (120)..(426): Homolog of NCBI NO: 15234751 NR Description: cinnamoyl-CoA reductase - like protein; protein At4g30470.1, supported by cDNA: 150515., supported by cDNA:
  misc_feature (120)..(426): Homolog of NCBI NO: 18400407 NR Description: putative cinnamoyl CoA reductase; protein id: supported by cDNA: 14133. [Arabidopsis thaliana]
  misc_feature (120)..(426): Homolog of NCBI NO: 21553548 NR Description: cinnamoyl-CoA reductase-like protein [Arabidopsis
  misc_feature (120)..(426): Homolog of NCBI NO: 21553382 NR Description: putative cinnamoyl CoA reductase [Arabidopsis
  misc_feature (115)..(437): Homolog of NCBI NO: 17978649 NR Description: cinnamoyl-CoA reductase [Pinus taeda]
  misc_feature (107)..(420): Homolog of NCBI NO: 37537132 NR Description: putative cinnamoyl-CoA reductase [Oryza sativa
PITQSRLPEAARPESTEHASPKLHCSVHGTARRGRQSKKAIKPAARARTRSRRRWRLRQRRRSGGGMGVLRSTQSLEAEVEEMRGALLLHGAWAWRPGGGAAKRAARAVEPAAAEARTVCVTGGTSFLGFAVVDRLLRHGYTVRLALETQEDLDKLREMEMFGENGRDGVWTVIANVMDPESLHEAFDGCVGVFHTSSHVDPAGISGYTKHMAGLEAKAAELVVEACVRTESVRKCVLTSSLLACVWRQNYPHDRRRFPTTIDENCWSDESLCRDNKLWLSLGKTMAEKAAWRAARGTDLKLVTICPALVTGPGFRRRNPTPSIAYLKGAHAMLVQGLLATANVERVAEAHVRVYEELSGTAGGRYICYDHVVRRGEEFAELQRQLGLRVPATPDGYGGDDDDGRAPRFQLCNRKLAALMSARRRCTYDAYFPMPQE

SEQ ID NO: 5640 - protein, 371 aa, Zea mays subsp. mays
  peptide (1)..(371): Ceres Seq. ID no. 12362305
  misc_feature (1)..(366): Homolog of NCBI NO: 34911590 NR Description: putative cinnamoyl CoA reductase [Oryza sativa
  misc_feature (1)..(362): Homolog of NCBI NO: 15241467 NR Description: cinnamoyl CoA reductase - like protein; protein At5g14700.1, supported by cDNA: 17229., supported by cDNA: supported by cDNA: gi_20259644 [Arabidopsis thaliana]
  misc_feature (1)..(362): Homolog of NCBI NO: 21553833 NR Description: cinnamoyl CoA reductase-like protein [Arabidopsis
  misc_feature (54)..(360): Homolog of NCBI NO: 25412171 NR Description: probable cinnamoyl CoA reductase [imported] -
  misc_feature (54)..(360): Homolog of NCBI NO: 15234751 NR Description: cinnamoyl-CoA reductase - like protein; protein At4g30470.1, supported by cDNA: 150515., supported by cDNA:
  misc_feature (54)..(360): Homolog of NCBI NO: 18400407 NR Description: putative cinnamoyl CoA reductase; protein id: supported by cDNA: 14133. [Arabidopsis thaliana]
  misc_feature (54)..(360): Homolog of NCBI NO: 21553548 NR Description: cinnamoyl-CoA reductase-like protein [Arabidopsis
  misc_feature (54)..(360): Homolog of NCBI NO: 21553382 NR Description: putative cinnamoyl CoA reductase [Arabidopsis
  misc_feature (49)..(371): Homolog of NCBI NO: 17978649 NR Description: cinnamoyl-CoA reductase [Pinus taeda]
  misc_feature (41)..(354): Homolog of NCBI NO: 37537132 NR Description: putative cinnamoyl-CoA reductase [Oryza sativa
MGVLRSTQSLEAEVEEMRGALLLHGAWAWRPGGGAAKRAARAVEPAAAEARTVCVTGGTSFLGFAVVDRLLRHGYTVRLALETQEDLDKLREMEMFGENGRDGVWTVIANVMDPESLHEAFDGCVGVFHTSSHVDPAGISGYTKHMAGLEAKAAELVVEACVRTESVRKCVLTSSLLACVWRQNYPHDRRRFPTTIDENCWSDESLCRDNKLWLSLGKTMAEKAAWRAARGTDLKLVTICPALVTGPGFRRRNPTPSIAYLKGAHAMLVQGLLATANVERVAEAHVRVYEELSGTAGGRYICYDHVVRRGEEFAELQRQLGLRVPATPDGYGGDDDDGRAPRFQLCNRKLAALMSARRRCTYDAYFPMPQE

SEQ ID NO: 5641 - protein, 355 aa, Zea mays subsp. mays
  peptide (1)..(355): Ceres Seq. ID no. 12362306
  misc_feature (1)..(350): Homolog of NCBI NO: 34911590 NR Description: putative cinnamoyl CoA reductase [Oryza sativa
  misc_feature (1)..(346): Homolog of NCBI NO: 15241467 NR Description: cinnamoyl CoA reductase - like protein; protein At5g14700.1, supported by cDNA: 17229., supported by cDNA: supported by cDNA: gi_20259644 [Arabidopsis thaliana]
  misc_feature (1)..(346): Homolog of NCBI NO: 21553833 NR Description: cinnamoyl CoA reductase-like protein [Arabidopsis
  misc_feature (38)..(344): Homolog of NCBI NO: 25412171 NR Description: probable cinnamoyl CoA reductase [imported] -
  misc_feature (38)..(344): Homolog of NCBI NO: 15234751 NR Description: cinnamoyl-CoA reductase - like protein; protein At4g30470.1, supported by cDNA: 150515., supported by cDNA:
  misc_feature (38)..(344): Homolog of NCBI NO: 18400407 NR Description: putative cinnamoyl CoA reductase; protein id: supported by cDNA: 14133. [Arabidopsis thaliana]
  misc_feature (38)..(344): Homolog of NCBI NO: 21553548 NR Description: cinnamoyl-CoA reductase-like protein [Arabidopsis
  misc_feature (38)..(344): Homolog of NCBI NO: 21553382 NR Description: putative cinnamoyl CoA reductase [Arabidopsis
  misc_feature (33)..(355): Homolog of NCBI NO: 17978649 NR Description: cinnamoyl-CoA reductase [Pinus taeda]
  misc_feature (25)..(338): Homolog of NCBI NO: 37537132 NR Description: putative cinnamoyl-CoA reductase [Oryza sativa
MRGALLLHGAWAWRPGGGAAKRAARAVEPAAAEARTVCVTGGTSFLGFAVVDRLLRHGYTVRLALETQEDLDKLREMEMFGENGRDGVWTVIANVMDPESLHEAFDGCVGVFHTSSHVDPAGISGYTKHMAGLEAKAAELVVEACVRTESVRKCVLTSSLLACVWRQNYPHDRRRFPTTIDENCWSDESLCRDNKLWLSLGKTMAEKAAWRAARGTDLKLVTICPALVTGPGFRRRNPTPSIAYLKGAHAMLVQGLLATANVERVAEAHVRVYEELSGTAGGRYICYDHVVRRGEEFAELQRQLGLRVPATPDGYGGDDDDGRAPRFQLCNRKLAALMSARRRCTYDAYFPMPQE

SEQ ID NO: 5642 - DNA, 1334 bp, Zea mays subsp. mays
  misc_feature (1)..(1334): Ceres Seq. ID no. 12365472
  misc_feature: MA Experiment ID: 108504 Result: Up-regulated in Transcription
  misc_feature: MA Experiment 108504 PARAMETER Experiment Name: Zm_Drought_P Parameter: Age (day) Value: 8
  misc_feature: MA Experiment 108504 PARAMETER Experiment Name: Zm_Drought_P Parameter: Organism Value: Zea mays
  misc_feature: MA Experiment 108504 PARAMETER Experiment Name: Zm_Drought_P Parameter: Plant Line Value: 35A19
  misc_feature: MA Experiment 108504 PARAMETER Experiment Name: Zm_Drought_P Parameter: Timepoint (hr) Value: 12
  misc_feature: MA Experiment 108504 PARAMETER Experiment Name: Zm_Drought_P Parameter: Tissue Value: Aerial
  misc_feature: MA Experiment 108504 PARAMETER Experiment Name: Zm_Drought_P Parameter: Treatment Value: Drought vs. No Drought
  misc_feature: MA Experiment ID: 108522 Result: Up-regulated in Transcription
  misc_feature: MA Experiment 108522 PARAMETER Experiment Name: Zm_42deg_Heat_P Parameter: Age (day) Value: 8
  misc_feature: MA Experiment 108522 PARAMETER Experiment Name: Zm_42deg_Heat_P Parameter: Organism Value: Zea mays
  misc_feature: MA Experiment 108522 PARAMETER Experiment Name: Zm_42deg_Heat_P Parameter: Plant Line Value: 35A19
  misc_feature: MA Experiment 108522 PARAMETER Experiment Name: Zm_42deg_Heat_P Parameter: Temperature (deg C) Value: 42 vs. 22
  misc_feature: MA Experiment 108522 PARAMETER Experiment Name: Zm_42deg_Heat_P Parameter: Timepoint (hr) Value: 1
  misc_feature: MA Experiment 108522 PARAMETER Experiment Name: Zm_42deg_Heat_P Parameter: Tissue Value: Aerial
  misc_feature: MA Experiment ID: 108523 Result: Up-regulated in Transcription
  misc_feature: MA Experiment 108523 PARAMETER Experiment Name: Zm_42deg_Heat_P Parameter: Age (day) Value: 8
  misc_feature: MA Experiment 108523 PARAMETER Experiment Name: Zm_42deg_Heat_P Parameter: Organism Value: Zea mays
  misc_feature: MA Experiment 108523 PARAMETER Experiment Name: Zm_42deg_Heat_P Parameter: Plant Line Value: 35A19
  misc_feature: MA Experiment 108523 PARAMETER Experiment Name: Zm_42deg_Heat_P Parameter: Temperature (deg C) Value: 42 vs. 22
  misc_feature: MA Experiment 108523 PARAMETER Experiment Name: Zm_42deg_Heat_P Parameter: Timepoint (hr) Value: 6
  misc_feature: MA Experiment 108523 PARAMETER Experiment Name: Zm_42deg_Heat_P Parameter: Tissue Value: Aerial
  misc_feature: MA Experiment ID: 108527 Result: Up-regulated in Transcription
  misc_feature: MA Experiment 108527 PARAMETER Experiment Name: Zm_5mM_NO_P Parameter: Age (day) Value: 8
  misc_feature: MA Experiment 108527 PARAMETER Experiment Name: Zm_5mM_NO_P Parameter: Organism Value: Zea mays
  misc_feature: MA Experiment 108527 PARAMETER Experiment Name: Zm_5mM_NO_P Parameter: Plant Line Value: 35A19
  misc_feature: MA Experiment 108527 PARAMETER Experiment Name: Zm_5mM_NO_P Parameter: Timepoint (hr) Value: 6
  misc_feature: MA Experiment 108527 PARAMETER Experiment Name: Zm_5mM_NO_P Parameter: Tissue Value: Aerial
  misc_feature: MA Experiment 108527 PARAMETER Experiment Name: Zm_5mM_NO_P Parameter: Treatment Value: 5mM NO vs. No Treatment
  misc_feature: MA Experiment ID: 108530 Result: Up-regulated in Transcription
  misc_feature: MA Experiment 108530 PARAMETER Experiment Name: Zm_Imbibed_Seeds_P Parameter: Age (day) Value: 6 vs. 2
  misc_feature: MA Experiment 108530 PARAMETER Experiment Name: Zm_Imbibed_Seeds_P Parameter: Organism Value: Zea mays
  misc_feature: MA Experiment 108530 PARAMETER Experiment Name: Zm_Imbibed_Seeds_P Parameter: Plant Line Value: 35A19
  misc_feature: MA Experiment 108530 PARAMETER Experiment Name: Zm_Imbibed_Seeds_P Parameter: Tissue Value: Aerial vs. Embryo
  misc_feature: MA Experiment ID: 108533 Result: Up-regulated in Transcription
  misc_feature: MA Experiment 108533 PARAMETER Experiment Name: Zm_4deg_Cold_P Parameter: Age (hr) Value: 8
  misc_feature: MA Experiment 108533 PARAMETER Experiment Name: Zm_4deg_Cold_P Parameter: Organism Value: Zea mays
  misc_feature: MA Experiment 108533 PARAMETER Experiment Name: Zm_4deg_Cold_P Parameter: Plant Line Value: 35A19
  misc_feature: MA Experiment 108533 PARAMETER Experiment Name: Zm_4deg_Cold_P Parameter: Temperature (deg C) Value: 4 vs. 22
  misc_feature: MA Experiment 108533 PARAMETER Experiment Name: Zm_4deg_Cold_P Parameter: Timepoint (hr) Value: 1
  misc_feature: MA Experiment 108533 PARAMETER Experiment Name: Zm_4deg_Cold_P Parameter: Tissue Value: Aerial
  misc_feature: MA Experiment ID: 108534 Result: Up-regulated in Transcription
  misc_feature: MA Experiment 108534 PARAMETER Experiment Name: Zm_4deg_Cold_P Parameter: Age (hr) Value: 8
  misc_feature: MA Experiment 108534 PARAMETER Experiment Name: Zm_4deg_Cold_P Parameter: Organism Value: Zea mays
  misc_feature: MA Experiment 108534 PARAMETER Experiment Name: Zm_4deg_Cold_P Parameter: Plant Line Value: 35A19
  misc_feature: MA Experiment 108534 PARAMETER Experiment Name: Zm_4deg_Cold_P Parameter: Temperature (deg C) Value: 4 vs. 22
  misc_feature: MA Experiment 108534 PARAMETER Experiment Name: Zm_4deg_Cold_P Parameter: Timepoint (hr) Value: 6
  misc_feature: MA Experiment 108534 PARAMETER Experiment Name: Zm_4deg_Cold_P Parameter: Tissue Value: Aerial
  misc_feature: MA Experiment ID: 108535 Result: Down-regulated in Transcription
  misc_feature: MA Experiment 108535 PARAMETER Experiment Name: Zm_Meristem_P Parameter: Age (day) Value: 8
  misc_feature: MA Experiment 108535 PARAMETER Experiment Name: Zm_Meristem_P Parameter: Organism Value: Zea mays
  misc_feature: MA Experiment 108535 PARAMETER Experiment Name: Zm_Meristem_P Parameter: Plant Line Value: 35A19
  misc_feature: MA Experiment 108535 PARAMETER Experiment Name: Zm_Meristem_P Parameter: Tissue Value: Root Meristem vs. Above Root Meristem
  misc_feature: MA Experiment ID: 108542 Result: Up-regulated in Transcription
  misc_feature: MA Experiment 108542 PARAMETER Experiment Name: Zm_150mM_NaCl_P Parameter: Age (day) Value: 8
  misc_feature: MA Experiment 108542 PARAMETER Experiment Name: Zm_150mM_NaCl_P Parameter: Organism Value: Zea mays
  misc_feature: MA Experiment 108542 PARAMETER Experiment Name: Zm_150mM_NaCl_P Parameter: Plant Line Value: 35A19
  misc_feature: MA Experiment 108542 PARAMETER Experiment Name: Zm_150mM_NaCl_P Parameter: Timepoint (hr) Value: 6
  misc_feature: MA Experiment 108542 PARAMETER Experiment Name: Zm_150mM_NaCl_P Parameter: Tissue Value: Aerial
  misc_feature: MA Experiment 108542 PARAMETER Experiment Name: Zm_150mM_NaCl_P Parameter: Treatment Value: 150mM NaCl vs. No Treatment
  misc_feature: MA Experiment ID: 108543 Result: Up-regulated in Transcription
  misc_feature: MA Experiment ID: 108547 Result: Up-regulated in Transcription
  misc_feature: MA Experiment 108547 PARAMETER Experiment Name: Zm_Imbibed_Seeds_P Parameter: Age (day) Value: 4 vs. 2
  misc_feature: MA Experiment 108547 PARAMETER Experiment Name: Zm_Imbibed_Seeds_P Parameter: Organism Value: Zea mays
  misc_feature: MA Experiment 108547 PARAMETER Experiment Name: Zm_Imbibed_Seeds_P Parameter: Plant Line Value: 35A19
  misc_feature: MA Experiment 108547 PARAMETER Experiment Name: Zm_Imbibed_Seeds_P Parameter: Tissue Value: Aerial vs. Embryo
  misc_feature: MA Experiment ID: 108556 Result: Up-regulated in Transcription
  misc_feature: MA Experiment 108556 PARAMETER Experiment Name: Zm_Drought_P Parameter: Age (day) Value: 9
  misc_feature: MA Experiment 108556 PARAMETER Experiment Name: Zm_Drought_P Parameter: Organism Value: Zea mays
  misc_feature: MA Experiment 108556 PARAMETER Experiment Name: Zm_Drought_P Parameter: Plant Line Value: 35A19
  misc_feature: MA Experiment 108556 PARAMETER Experiment Name: Zm_Drought_P Parameter: Timepoint (hr) Value: 24
  misc_feature: MA Experiment 108556 PARAMETER Experiment Name: Zm_Drought_P Parameter: Tissue Value: Aerial
  misc_feature: MA Experiment 108556 PARAMETER Experiment Name: Zm_Drought_P Parameter: Treatment Value: Drought vs. No Drought
  misc_feature: MA Experiment ID: 108688 Result: Down-regulated in Transcription
  misc_feature: MA Experiment 108688 PARAMETER Experiment Name: Zm_Embryos-Flowers__P Parameter: Tissue Value: Immature Flowers vs. Aerial+
  misc_feature: MA Experiment ID: 108689 Result: Down-regulated in Transcription
  misc_feature: MA Experiment 108689 PARAMETER Experiment Name: Zm_Drought_Roots_P Parameter: Age (day) Value: 9
  misc_feature: MA Experiment 108689 PARAMETER Experiment Name: Zm_Drought_Roots_P Parameter: Organism Value: Zea mays
  misc_feature: MA Experiment 108689 PARAMETER Experiment Name: Zm_Drought_Roots_P Parameter: Plant Line Value: 35A19
  misc_feature: MA Experiment 108689 PARAMETER Experiment Name: Zm_Drought_Roots_P Parameter: Timepoint (hr) Value: 24
  misc_feature: MA Experiment 108689 PARAMETER Experiment Name: Zm_Drought_Roots_P Parameter: Tissue Value: Roots
  misc_feature: MA Experiment 108689 PARAMETER Experiment Name: Zm_Drought_Roots_P Parameter: Treatment Value: Drought vs. No Drought
  misc_feature: MA Experiment ID: 20000532 Result: Up-regulated in Transcription
  misc_feature: MA Experiment 20000532 PARAMETER Experiment Name: Zm_0.001percent_MeJA_P Parameter: Age (day) Value: 10
  misc_feature: MA Experiment 20000532 PARAMETER Experiment Name: Zm_0.001percent_MeJA_P Parameter: Organism Value: Zea mays
  misc_feature: MA Experiment 20000532 PARAMETER Experiment Name: Zm_0.001percent_MeJA_P Parameter: Plant Line Value: 35A19
  misc_feature: MA Experiment 20000532 PARAMETER Experiment Name: Zm_0.001percent_MeJA_P Parameter: Timepoint (hr) Value: 48
  misc_feature: MA Experiment 20000532 PARAMETER Experiment Name: Zm_0.001percent_MeJA_P Parameter: Tissue Value: Aerial
  misc_feature: MA Experiment 20000532 PARAMETER Experiment Name: Zm_0.001percent_MeJA_P Parameter: Treatment Value: 0.001percent MeJA vs. No Treatment
  misc_feature: MA Experiment ID: 20000626 Result: Up-regulated in Transcription
  misc_feature: MA Experiment 20000626 PARAMETER Experiment Name: Zm_Herbicide-Treatments_P Parameter: Timepoint (hr) Value: 12
  misc_feature: MA Experiment 20000626 PARAMETER Experiment Name: Zm_Herbicide-Treatments_P Parameter: Tissue Value: Aerial
  misc_feature: MA Experiment 20000626 PARAMETER Experiment Name: Zm_Herbicide-Treatments_P Parameter: Treatment Value: Roundup vs. No Treatment
  misc_feature: MA Experiment ID: 20000627 Result: Up-regulated in Transcription
  misc_feature: MA Experiment 20000627 PARAMETER Experiment Name: Zm_Herbicide-Treatments_P Parameter: Timepoint (hr) Value: 12
  misc_feature: MA Experiment 20000627 PARAMETER Experiment Name: Zm_Herbicide-Treatments_P Parameter: Tissue Value: Aerial
  misc_feature: MA Experiment 20000627 PARAMETER Experiment Name: Zm_Herbicide-Treatments_P Parameter: Treatment Value: Finale vs. No Treatment
  misc_feature: MA Experiment ID: 20000628 Result: Up-regulated in Transcription
  misc_feature: MA Experiment 20000628 PARAMETER Experiment Name: Zm_Herbicide-Treatments_P Parameter: Timepoint (hr) Value: 12
  misc_feature: MA Experiment 20000628 PARAMETER Experiment Name: Zm_Herbicide-Treatments_P Parameter: Tissue Value: Aerial
  misc_feature: MA Experiment 20000628 PARAMETER Experiment Name: Zm_Herbicide-Treatments_P Parameter: Treatment Value: Glean vs. No Treatment
  misc_feature: MA Experiment ID: 20000629 Result: Up-regulated in Transcription
  misc_feature: MA Experiment 20000629 PARAMETER Experiment Name: Zm_Herbicide-Treatments_P Parameter: Timepoint (hr) Value: 12
  misc_feature: MA Experiment 20000629 PARAMETER Experiment Name: Zm_Herbicide-Treatments_P Parameter: Tissue Value: Aerial
  misc_feature: MA Experiment 20000629 PARAMETER Experiment Name: Zm_Herbicide-Treatments_P Parameter: Treatment Value: Trimec vs. No Treatment
gccagtcttctcgccttcacgccgcccgctgtcctgcaaggccgctcccgcgtcgccggagcccgccgtcgccgtctccgcctcttccgcggcgcccgcgcccgccgccgccggttcgccgctccgccccttcgcgctccgcgcgctgctccgggaggaggtatttccgtctccatcgccccagctggcctctgccgcagcggtggcctcggtaccaagcggggccgtgctgaagcggcggcgacctgcgccgctccttgtgccggcgtccggcgcggctgctgctgctccggtggccgccgtggaggcagatccgaggaacgaggtggaggaggagggggaggagttcgcagcgtattgccggagggggaaggggagaagggtggaaatggaggaccggcatgtggccaaggtcgctctcggcggagatccccaagtggcgctctttggtgtattcgatggtcacgggggcaaaaatgcggcagagttcgctgcggagaacatgcccaagtttttggccgaggagttcaagaaggtgaacggcggaggagagatcgaaggagttgtcaagaggggttacctcaagacggacgaggagttcctcaagagggacgagagcgggggcgcgtgctgcgtcacagccgttctccaaaagggtggactggtcgtctccaatgctggagactgccgtgcggtgctcagccgagcagggaaggcagaggtgctcacctctgaccaccggggcctcccgggaggatgagaaggagagaattgaaaaattgggtggatttgtggtgaattaccatgggacatggcgagtccagggttccctggcagtgtctaggggcattggggatggacaactaaagcagtgggttgtggctaacccagacactaggacgctcctcgtcgaccaccagtgcgagttcttgatacttgcttctgatggcctatgggataaggtcgataatcaggaggcagtagaccttgcacgtcctctatgcattagcaatgacaagacctctcgcctggctgcctgcaggatgctcactgagacgtcgatttccaggggctcaactgatgatatcagtgttatgatcgtgcaattgcagaagttttcaagttcctaacttaattggagaaacttgaccaaaactctaggcattagcaccaacagactggcggaaggcaggactttgctggctaaagttttcatgagtcagcgctatttttggctgtttaacgttcattcattcattctttgtcatagaaccatttttattattattagatgtaattagatctatttgattcattctttgacaatatttatc

SEQ ID NO: 5643 - protein, 252 aa, Zea mays subsp. mays
  peptide (1)..(252): Ceres Seq. ID no. 12365473
  misc_feature (114)..(247): Pfam Name: Protein phosphatase 2C Pfam Description: Protein phosphatase 2C
  misc_feature (107)..(247): Homolog of NCBI NO: 6478146 NR Description: putative serine/threonine phosphatase type 2c
  misc_feature (126)..(247): Homolog of NCBI NO: 23506609 NR Description: putative serine/threonine phosphatase [Leymus
  misc_feature (1)..(247): Homolog of NCBI NO: 15227687 NR Description: protein phosphatase 2C (PP2C); protein id: supported by cDNA: gi_13877670 [Arabidopsis thaliana]
  misc_feature (126)..(247): Homolog of NCBI NO: 23506607 NR Description: putative serine/threonine phosphatase [Leymus
  misc_feature (1)..(247): Homolog of NCBI NO: 7488754 NR Description: protein phosphatase 2C - alfalfa
  misc_feature (1)..(247): Homolog of NCBI NO: 15222312 NR Description: protein phosphatase 2C (PP2C); protein id: supported by cDNA: gi_20258779 [Arabidopsis thaliana]
  misc_feature (1)..(247): Homolog of NCBI NO: 25352225 NR Description: hypothetical protein [imported] - Arabidopsis >gi|8954030|gb|AAF82204.1|AC067971_12 Contains similarity to phosphatase 2C from Arabidopsis thaliana gb|AF085279. It contains
  misc_feature (1)..(247): Homolog of NCBI NO: 30013681 NR Description: Avr9/Cf-9 rapidly elicited protein 284 [Nicotiana
  misc_feature (23)..(251): Homolog of NCBI NO: 15220548 NR Description: protein phosphatase 2C (PP2C); protein id:
  misc_feature (130)..(194): Homolog of NCBI NO: 15236450 NR Description: protein phosphatase 2C (PP2C), putative; protein At4g08260.1 [Arabidopsis thaliana] >gi|7486866|pir||T10553
PVFSPSRRPLSCKAAPASPEPAVAVSASSAAPAPAAAGSPLRPFALRALLREEVFPSPSPQLASAAAVASVPSGAVLKRRRPAPLLVPASGAAAAAPVAAVEADPRNEVEEEGEEFAAYCRRGKGRRVEMEDRHVAKVALGGDPQVALFGVFDGHGGKNAAEFAAENMPKFLAEEFKKVNGGGEIEGVVKRGYLKTDEEFLKRDESGGACCVTAVLQKGGLVVSNAGDCRAVLSRAGKAEVLTSDHRGLPGG

SEQ ID NO: 5644 - protein, 244 aa, Zea mays subsp. mays
  peptide (1)..(244): Ceres Seq. ID no. 12365474
ASLLAFTPPAVLQGRSRVAGARRRRLRLFRGARARRRRFAAPPLRAPRAAPGGGISVSIAPAGLCRSGGLGTKRGRAEAAATCAAPCAGVRRGCCCSGGRRGGRSEERGGGGGGGVRSVLPEGEGEKGGNGGPACGQGRSRRRSPSGALWCIRWSRGQKCGRVRCGEHAQVFGRGVQEGERRRRDRRSCQEGLPQDGRGVPQEGRERGRVLRHSRSPKGWTGRLQCWRLPCGAQPSREGRGAHL

SEQ ID NO: 5645 - protein, 151 aa, Zea mays subsp. mays
  peptide (1)..(151): Ceres Seq. ID no. 12365475
  misc_feature (8)..(138): Pfam Name: Protein phosphatase 2C Pfam Description: Protein phosphatase 2C
  misc_feature (8)..(151): Homolog of NCBI NO: 6478146 NR Description: putative serine/threonine phosphatase type 2c
  misc_feature (8)..(118): Homolog of NCBI NO: 23506609 NR Description: putative serine/threonine phosphatase [Leymus
  misc_feature (25)..(148): Homolog of NCBI NO: 15227687 NR Description: protein phosphatase 2C (PP2C); protein id: supported by cDNA: gi_13877670 [Arabidopsis thaliana]
  misc_feature (24)..(118): Homolog of NCBI NO: 23506607 NR Description: putative serine/threonine phosphatase [Leymus
  misc_feature (25)..(148): Homolog of NCBI NO: 7488754 NR Description: protein phosphatase 2C - alfalfa
  misc_feature (25)..(145): Homolog of NCBI NO: 15222312 NR Description: protein phosphatase 2C (PP2C); protein id: supported by cDNA: gi_20258779 [Arabidopsis thaliana]
  misc_feature (37)..(145): Homolog of NCBI NO: 25352225 NR Description: hypothetical protein [imported] - Arabidopsis >gi|8954030|gb|AAF82204.1|AC067971_12 Contains similarity to phosphatase 2C from Arabidopsis thaliana gb|AF085279. It contains
  misc_feature (25)..(148): Homolog of NCBI NO: 30013681 NR Description: Avr9/Cf-9 rapidly elicited protein 284 [Nicotiana
  misc_feature (26)..(103): Homolog of NCBI NO: 15220548 NR Description: protein phosphatase 2C (PP2C); protein id:
  misc_feature (47)..(148): Homolog of NCBI NO: 15236450 NR Description: protein phosphatase 2C (PP2C), putative; protein At4g08260.1 [Arabidopsis thaliana] >gi|7486866|pir||T10553
MLETAVRCSAEQGRQRCSPLTTGASREDEKERIEKLGGFVVNYHGTWRVQGSLAVSRGIGDGQLKQWVVANPDTRTLLVDHQCEFLILASDGLWDKVDNQEAVDLARPLCISNDKTSRLAACRMLTETSISRGSTDDISVMIVQLQKFSSS

SEQ ID NO: 5646 - DNA, 1800 bp, Zea mays subsp. mays
  misc_feature (1)..(1800): Ceres Seq. ID no. 12409414
  misc_feature: MA Experiment ID: 108504 Result: Up-regulated in Transcription
  misc_feature: MA Experiment 108504 PARAMETER Experiment Name: Zm_Drought_P Parameter: Age (day) Value: 8
  misc_feature: MA Experiment 108504 PARAMETER Experiment Name: Zm_Drought_P Parameter: Organism Value: Zea mays
  misc_feature: MA Experiment 108504 PARAMETER Experiment Name: Zm_Drought_P Parameter: Plant Line Value: 35A19
  misc_feature: MA Experiment 108504 PARAMETER Experiment Name: Zm_Drought_P Parameter: Timepoint (hr) Value: 12
  misc_feature: MA Experiment 108504 PARAMETER Experiment Name: Zm_Drought_P Parameter: Tissue Value: Aerial
  misc_feature: MA Experiment 108504 PARAMETER Experiment Name: Zm_Drought_P Parameter: Treatment Value: Drought vs. No Drought
  misc_feature: MA Experiment ID: 108522 Result: Up-regulated in Transcription
  misc_feature: MA Experiment 108522 PARAMETER Experiment Name: Zm_42deg_Heat_P Parameter: Age (day) Value: 8
  misc_feature: MA Experiment 108522 PARAMETER Experiment Name: Zm_42deg_Heat_P Parameter: Organism Value: Zea mays
  misc_feature: MA Experiment 108522 PARAMETER Experiment Name: Zm_42deg_Heat_P Parameter: Plant Line Value: 35A19
  misc_feature: MA Experiment 108522 PARAMETER Experiment Name: Zm_42deg_Heat_P Parameter: Temperature (deg C) Value: 42 vs. 22
  misc_feature: MA Experiment 108522 PARAMETER Experiment Name: Zm_42deg_Heat_P Parameter: Timepoint (hr) Value: 1
  misc_feature: MA Experiment 108522 PARAMETER Experiment Name: Zm_42deg_Heat_P Parameter: Tissue Value: Aerial
  misc_feature: MA Experiment ID: 108523 Result: Up-regulated in Transcription
  misc_feature: MA Experiment 108523 PARAMETER Experiment Name: Zm_42deg_Heat_P Parameter: Age (day) Value: 8
  misc_feature: MA Experiment 108523 PARAMETER Experiment Name: Zm_42deg_Heat_P Parameter: Organism Value: Zea mays
  misc_feature: MA Experiment 108523 PARAMETER Experiment Name: Zm_42deg_Heat_P Parameter: Plant Line Value: 35A19
  misc_feature: MA Experiment 108523 PARAMETER Experiment Name: Zm_42deg_Heat_P Parameter: Temperature (deg C) Value: 42 vs. 22
  misc_feature: MA Experiment 108523 PARAMETER Experiment Name: Zm_42deg_Heat_P Parameter: Timepoint (hr) Value: 6
  misc_feature: MA Experiment 108523 PARAMETER Experiment Name: Zm_42deg_Heat_P Parameter: Tissue Value: Aerial
  misc_feature: MA Experiment ID: 108527 Result: Down-regulated in Transcription
  misc_feature: MA Experiment 108527 PARAMETER Experiment Name: Zm_5mM_NO_P Parameter: Age (day) Value: 8
  misc_feature: MA Experiment 108527 PARAMETER Experiment Name: Zm_5mM_NO_P Parameter: Organism Value: Zea mays
  misc_feature: MA Experiment 108527 PARAMETER Experiment Name: Zm_5mM_NO_P Parameter: Plant Line Value: 35A19
  misc_feature: MA Experiment 108527 PARAMETER Experiment Name: Zm_5mM_NO_P Parameter: Timepoint (hr) Value: 6
  misc_feature: MA Experiment 108527 PARAMETER Experiment Name: Zm_5mM_NO_P Parameter: Tissue Value: Aerial
  misc_feature: MA Experiment 108527 PARAMETER Experiment Name: Zm_5mM_NO_P Parameter: Treatment Value: 5mM NO vs. No Treatment
  misc_feature: MA Experiment ID: 108528 Result: Up-regulated in Transcription
  misc_feature: MA Experiment 108528 PARAMETER Experiment Name: Zm_Imbibed_Seeds_P Parameter: Age (day) Value: 5 vs. 2
  misc_feature: MA Experiment 108528 PARAMETER Experiment Name: Zm_Imbibed_Seeds_P Parameter: Organism Value: Zea mays
  misc_feature: MA Experiment 108528 PARAMETER Experiment Name: Zm_Imbibed_Seeds_P Parameter: Plant Line Value: 35A19
  misc_feature: MA Experiment 108528 PARAMETER Experiment Name: Zm_Imbibed_Seeds_P Parameter: Tissue Value: Aerial vs. Embryo
  misc_feature: MA Experiment ID: 108530 Result: Up-regulated in Transcription
  misc_feature: MA Experiment 108530 PARAMETER Experiment Name: Zm_Imbibed_Seeds_P Parameter: Age (day) Value: 6 vs. 2
  misc_feature: MA Experiment 108530 PARAMETER Experiment Name: Zm_Imbibed_Seeds_P Parameter: Organism Value: Zea mays
  misc_feature: MA Experiment 108530 PARAMETER Experiment Name: Zm_Imbibed_Seeds_P Parameter: Plant Line Value: 35A19
  misc_feature: MA Experiment 108530 PARAMETER Experiment Name: Zm_Imbibed_Seeds_P Parameter: Tissue Value: Aerial vs. Embryo
  misc_feature: MA Experiment ID: 108534 Result: Up-regulated in Transcription
  misc_feature: MA Experiment 108534 PARAMETER Experiment Name: Zm_4deg_Cold_P Parameter: Age (hr) Value: 8
  misc_feature: MA Experiment 108534 PARAMETER Experiment Name: Zm_4deg_Cold_P Parameter: Organism Value: Zea mays
  misc_feature: MA Experiment 108534 PARAMETER Experiment Name: Zm_4deg_Cold_P Parameter: Plant Line Value: 35A19
  misc_feature: MA Experiment 108534 PARAMETER Experiment Name: Zm_4deg_Cold_P Parameter: Temperature (deg C) Value: 4 vs. 22
  misc_feature: MA Experiment 108534 PARAMETER Experiment Name: Zm_4deg_Cold_P Parameter: Timepoint (hr) Value: 6
  misc_feature: MA Experiment 108534 PARAMETER Experiment Name: Zm_4deg_Cold_P Parameter: Tissue Value: Aerial
  misc_feature: MA Experiment ID: 108540 Result: Up-regulated in Transcription
  misc_feature: MA Experiment 108540 PARAMETER Experiment Name: Zm_20percent_PEG_P Parameter: Age (day) Value: 8
  misc_feature: MA Experiment 108540 PARAMETER Experiment Name: Zm_20percent_PEG_P Parameter: Organism Value: Zea mays
  misc_feature: MA Experiment 108540 PARAMETER Experiment Name: Zm_20percent_PEG_P Parameter: Plant Line Value: 35A19
  misc_feature: MA Experiment 108540 PARAMETER Experiment Name: Zm_20percent_PEG_P Parameter: Timepoint (hr) Value: 6
  misc_feature: MA Experiment 108540 PARAMETER Experiment Name: Zm_20percent_PEG_P Parameter: Tissue Value: Aerial
  misc_feature: MA Experiment 108540 PARAMETER Experiment Name: Zm_20percent_PEG_P Parameter: Treatment Value: 20percent PEG vs. No Treatment
  misc_feature: MA Experiment ID: 108542 Result: Up-regulated in Transcription
  misc_feature: MA Experiment 108542 PARAMETER Experiment Name: Zm_150mM_NaCl_P Parameter: Age (day) Value: 8
  misc_feature: MA Experiment 108542 PARAMETER Experiment Name: Zm_150mM_NaCl_P Parameter: Organism Value: Zea mays
  misc_feature: MA Experiment 108542 PARAMETER Experiment Name: Zm_150mM_NaCl_P Parameter: Plant Line Value: 35A19
  misc_feature: MA Experiment 108542 PARAMETER Experiment Name: Zm_150mM_NaCl_P Parameter: Timepoint (hr) Value: 6
  misc_feature: MA Experiment 108542 PARAMETER Experiment Name: Zm_150mM_NaCl_P Parameter: Tissue Value: Aerial
  misc_feature: MA Experiment 108542 PARAMETER Experiment Name: Zm_150mM_NaCl_P Parameter: Treatment Value: 150mM NaCl vs. No Treatment
  misc_feature: MA Experiment ID: 108547 Result: Up-regulated in Transcription
  misc_feature: MA Experiment 108547 PARAMETER Experiment Name: Zm_Imbibed_Seeds_P Parameter: Age (day) Value: 4 vs. 2
  misc_feature: MA Experiment 108547 PARAMETER Experiment Name: Zm_Imbibed_Seeds_P Parameter: Organism Value: Zea mays
  misc_feature: MA Experiment 108547 PARAMETER Experiment Name: Zm_Imbibed_Seeds_P Parameter: Plant Line Value: 35A19
  misc_feature: MA Experiment 108547 PARAMETER Experiment Name: Zm_Imbibed_Seeds_P Parameter: Tissue Value: Aerial vs. Embryo
  misc_feature: MA Experiment ID: 108556 Result: Up-regulated in Transcription
  misc_feature: MA Experiment 108556 PARAMETER Experiment Name: Zm_Drought_P Parameter: Age (day) Value: 9
  misc_feature: MA Experiment 108556 PARAMETER Experiment Name: Zm_Drought_P Parameter: Organism Value: Zea mays
  misc_feature: MA Experiment 108556 PARAMETER Experiment Name: Zm_Drought_P Parameter: Plant Line Value: 35A19
  misc_feature: MA Experiment 108556 PARAMETER Experiment Name: Zm_Drought_P Parameter: Timepoint (hr) Value: 24
  misc_feature: MA Experiment 108556 PARAMETER Experiment Name: Zm_Drought_P Parameter: Tissue Value: Aerial
  misc_feature: MA Experiment 108556 PARAMETER Experiment Name: Zm_Drought_P Parameter: Treatment Value: Drought vs. No Drought
  misc_feature: MA Experiment ID: 108559 Result: Down-regulated in Transcription
  misc_feature: MA Experiment 108559 PARAMETER Experiment Name: Zm_5mM_NO_P Parameter: Age (day) Value: 8
  misc_feature: MA Experiment 108559 PARAMETER Experiment Name: Zm_5mM_NO_P Parameter: Organism Value: Zea mays
  misc_feature: MA Experiment 108559 PARAMETER Experiment Name: Zm_5mM_NO_P Parameter: Plant Line Value: 35A19
  misc_feature: MA Experiment 108559 PARAMETER Experiment Name: Zm_5mM_NO_P Parameter: Timepoint (hr) Value: 12
  misc_feature: MA Experiment 108559 PARAMETER Experiment Name: Zm_5mM_NO_P Parameter: Tissue Value: Aerial
  misc_feature: MA Experiment 108559 PARAMETER Experiment Name: Zm_5mM_NO_P Parameter: Treatment Value: 5mM NO vs. No Treatment
  misc_feature: MA Experiment ID: 108687 Result: Down-regulated in Transcription
  misc_feature: MA Experiment 108687 PARAMETER Experiment Name: Zm_Embryos-Flowers__P Parameter: Tissue Value: Embryo vs. Aerial+
  misc_feature: MA Experiment ID: 20000477 Result: Down-regulated in Transcription
  misc_feature: MA Experiment 20000477 PARAMETER Experiment Name: Zm_5mM_SA_P Parameter: Age (day) Value: 10
  misc_feature: MA Experiment 20000477 PARAMETER Experiment Name: Zm_5mM_SA_P Parameter: Organism Value: Zea mays
  misc_feature: MA Experiment 20000477 PARAMETER Experiment Name: Zm_5mM_SA_P Parameter: Plant Line Value: 35A19
  misc_feature: MA Experiment 20000477 PARAMETER Experiment Name: Zm_5mM_SA_P Parameter: Timepoint (hr) Value: 48
  misc_feature: MA Experiment 20000477 PARAMETER Experiment Name: Zm_5mM_SA_P Parameter: Tissue Value: Aerial
  misc_feature: MA Experiment 20000477 PARAMETER Experiment Name: Zm_5mM_SA_P Parameter: Treatment Value: 5mM SA vs. No Treatment
  misc_feature: MA Experiment ID: 20000492 Result: Down-regulated in Transcription
  misc_feature: MA Experiment 20000492 PARAMETER Experiment Name: Zm_Hybrid_Seed_Dev_P Parameter: DAP Value: 12
  misc_feature: MA Experiment 20000492 PARAMETER Experiment Name: Zm_Hybrid_Seed_Dev_P Parameter: Organism Value: Zea mays
  misc_feature: MA Experiment 20000492 PARAMETER Experiment Name: Zm_Hybrid_Seed_Dev_P Parameter: Plant Line Value: 35A19
  misc_feature: MA Experiment 20000492 PARAMETER Experiment Name: Zm_Hybrid_Seed_Dev_P Parameter: Tissue Value: Fert Kernel vs. Unfert Floret
  misc_feature: MA Experiment ID: 20000535 Result: Down-regulated in Transcription
  misc_feature: MA Experiment 20000535 PARAMETER Experiment Name: Zm_Hybrid_Seed_Dev_P Parameter: DAP Value: 30 vs. 12
  misc_feature: MA Experiment 20000535 PARAMETER Experiment Name: Zm_Hybrid_Seed_Dev_P Parameter: Organism Value: Zea mays
  misc_feature: MA Experiment 20000535 PARAMETER Experiment Name: Zm_Hybrid_Seed_Dev_P Parameter: Plant Line Value: 35A19
  misc_feature: MA Experiment 20000535 PARAMETER Experiment Name: Zm_Hybrid_Seed_Dev_P Parameter: Tissue Value: Embryo vs. Unfert Floret
acaagcgcaagcagggcaagaaaactccgcaggccagtctgcgcgagttggatggccttcttcttggccctcgtgtgcatcctcgtcttgctagccatcgcctcctacgtccagtacactcgctggcagaaggggaaaggccgcttcggcggccatgggaggtctgctcccttgaagctgcctcctggctccatgggctggccttaccttggcgagaccctccagctttactcccaggaccccagcgtcttcttcgcttccaaacagaagaggtacggcgagatcttcaagacgcaccttctgggctgcccgtgcgtgatgctggcgagcccggaggcggcgcggttcgtgctggtgacgcaggcgcacctgttcaagccgacctacccgcggagcaaggagcgcatgatcgggccgtcggctctcttcttccaccagggcgactaccacctccgcctccgcaagctcgtccagggcgcgctcggccccgacgcgctgcgcgcgctcgttcctgaggtggaggccgccgtgcggtccactctcgcttcctgggacgccggccacgtcagaagcacgttccacgccatgaagacgctgtcgtttgacgtgggcatcgtgacgatcttcggcggccggctggacgagtggcgcaaggcggagctgaggaagaattactccgtcgtggagaaggggtacaactccttccccaacagcctgccggggacgctccattacaaggcgatgcaggcgcggcggcggctgcacggcgtgctgtgcgacatcatgcgggagcgtcgtggccaggcccaggcgggcaccaccggcctgctgggctgcctgatgcggtcccggggcgacgacggcgcgccgctgctgagcgacgagcagatcgccgacaacgtcatcggcgtgctgttcgcggcgcaggacacgacggccagcgcgctcacctggatcgtcaagtacctccacgaccaccccaagctcctcgaggccgtccgggcggagcaggcggcggtccgcgaggccaccggcggcgggaggcagccgctggcgtgggcgcacacgaagagcatggcgctaacgcatagggtgattttggagagcttaaggatggcgagcatcatctcgttcacgttcagggaggccgtggccgacgtggagtacaaagggttccttatccccaaggggtgggaaggtgatgcctctcttcaggaacatccaccacagccctgactacttccaggatccacacaagttcgacccttctagattccaggtggcgccgcgtccgagcacgttcctgccgtttgggcacggcgtgcacgcgtgccccgggaacgagctgggccaagctcgagatgctcgtcctcatccaccacctggtcaccggctacaggtggcaaatcgttggatccagtgacgaggtcgagtacagcccgttccctgtgcccaagcacggcttgcctgtcagattatggagacaaaacaatccggtcgtcgacagaaaggggcgtgagaccgacgacgatgatgtggaggatattttagtttgactcttgagttaggcatgaatttaaccccaagctagctagagaagttttttttccctttgaaattcttctttgctcgccttcctcctggatcaaattacgttggaggacaagaaacggcagctttctctttcgttttctttgcctgcttcaccgcgacgataatggtgaaaatatgtaagctacgtggacatcaatgatccacagcatcgttgatatatataatatagagagaaaattctctgct

SEQ ID NO: 5647 - protein, 411 aa, Zea mays subsp. mays
  peptide (1)..(411): Ceres Seq. ID no. 12409415
  misc_feature (61)..(399): Pfam Name: Cytochrome P450 Pfam Description: Cytochrome P450
  misc_feature (59)..(399): Homolog of NCBI NO: 9294629 NR Description: cytochrome P450 [Arabidopsis thaliana]
  misc_feature (59)..(399): Homolog of NCBI NO: 18402179 NR Description: cytochrome P450, putative; protein id: supported by cDNA: 126144. [Arabidopsis thaliana]
  misc_feature (28)..(399): Homolog of NCBI NO: 30694740 NR Description: cytochrome P450 family [Arabidopsis thaliana] cytochrome P450 [Arabidopsis thaliana] AT5g45340/K9E15_12 [Arabidopsis thaliana]
  misc_feature (28)..(399): Homolog of NCBI NO: 30694744 NR Description: cytochrome P450 family [Arabidopsis thaliana]
  misc_feature (28)..(399): Homolog of NCBI NO: 7430728 NR Description: cytochrome P450 - Arabidopsis thaliana cytochrome P450 [Arabidopsis thaliana]
  misc_feature (28)..(399): Homolog of NCBI NO: 18415271 NR Description: cytochrome p450 family; protein id: At4g19230.1, by cDNA: gi_15293092, supported by cDNA: gi_20259298 [Arabidopsis >gi|15293093|gb|AAK93657.1| putative cytochrome P450 cytochrome
  misc_feature (52)..(399): Homolog of NCBI NO: 15227033 NR Description: taxane 13-alpha-hydroxylase(cytochrome p450 putative; protein id: At2g29090.1 [Arabidopsis thaliana]
  misc_feature (60)..(399): Homolog of NCBI NO: 15239203 NR Description: cytochrome p450, putative; protein id: supported by cDNA: 36334., supported by cDNA: gi_14596098, by cDNA: gi_15450716, supported by cDNA: gi_17380617, supported
  misc_feature (22)..(399): Homolog of NCBI NO: 33146520 NR Description: putative 5-alpha-taxadienol-10-beta-hydroxylase
  misc_feature (22)..(399): Homolog of NCBI NO: 34901962 NR Description: 5-alpha-taxadienol-10-beta-hydroxylase-like
TSASRARKLRRPVCASWMAFFLALVCILVLLAIASYVQYTRWQKGKGRFGGHGRSAPLKLPPGSMGWPYLGETLQLYSQDPSVFFASKQKRYGEIFKTHLLGCPCVMLASPEAARFVLVTQAHLFKPTYPRSKERMIGPSALFFHQGDYHLRLRKLVQGALGPDALRALVPEVEAAVRSTLASWDAGHVRSTFHAMKTLSFDVGIVTIFGGRLDEWRKAELRKNYSVVEKGYNSFPNSLPGTLHYKAMQARRRLHGVLCDIMRERRGQAQAGTTGLLGCLMRSRGDDGAPLLSDEQIADNVIGVLFAAQDTTASALTWIVKYLHDHPKLLEAVRAEQAAVREATGGGRQPLAWAHTKSMALTHRVILESLRMASIISFTFREAVADVEYKGFLIPKGWEGDASLQEHPPQP

SEQ ID NO: 5648 - protein, 394 aa, Zea mays subsp. mays
  peptide (1)..(394): Ceres Seq. ID no. 12409416
  misc_feature (44)..(382): Pfam Name: Cytochrome P450 Pfam Description: Cytochrome P450
  misc_feature (42)..(382): Homolog of NCBI NO: 9294629 NR Description: cytochrome P450 [Arabidopsis thaliana]
  misc_feature (42)..(382): Homolog of NCBI NO: 18402179 NR Description: cytochrome P450, putative; protein id: supported by cDNA: 126144. [Arabidopsis thaliana]
  misc_feature (11)..(382): Homolog of NCBI NO: 30694740 NR Description: cytochrome P450 family [Arabidopsis thaliana] cytochrome P450 [Arabidopsis thaliana] AT5g45340/K9E15_12 [Arabidopsis thaliana]
  misc_feature (11)..(382): Homolog of NCBI NO: 30694744 NR Description: cytochrome P450 family [Arabidopsis thaliana]
  misc_feature (11)..(382): Homolog of NCBI NO: 7430728 NR Description: cytochrome P450 - Arabidopsis thaliana cytochrome P450 [Arabidopsis thaliana]
  misc_feature (11)..(382): Homolog of NCBI NO: 18415271 NR Description: cytochrome p450 family; protein id: At4g19230.1, by cDNA: gi_15293092, supported by cDNA: gi_20259298 [Arabidopsis >gi|15293093|gb|AAK93657.1| putative cytochrome P450 cytochrome
  misc_feature (35)..(382): Homolog of NCBI NO: 15227033 NR Description: taxane 13-alpha-hydroxylase(cytochrome p450 putative; protein id: At2g29090.1 [Arabidopsis thaliana]
  misc_feature (43)..(382): Homolog of NCBI NO: 15239203 NR Description: cytochrome p450, putative; protein id: supported by cDNA: 36334., supported by cDNA: gi_14596098, by cDNA: gi_15450716, supported by cDNA: gi_17380617, supported
  misc_feature (5)..(382): Homolog of NCBI NO: 33146520 NR Description: putative 5-alpha-taxadienol-10-beta-hydroxylase
  misc_feature (5)..(382): Homolog of NCBI NO: 34901962 NR Description: 5-alpha-taxadienol-10-beta-hydroxylase-like
MAFFLALVCILVLLAIASYVQYTRWQKGKGRFGGHGRSAPLKLPPGSMGWPYLGETLQLYSQDPSVFFASKQKRYGEIFKTHLLGCPCVMLASPEAARFVLVTQAHLFKPTYPRSKERMIGPSALFFHQGDYHLRLRKLVQGALGPDALRALVPEVEAAVRSTLASWDAGHVRSTFHAMKTLSFDVGIVTIFGGRLDEWRKAELRKNYSVVEKGYNSFPNSLPGTLHYKAMQARRRLHGVLCDIMRERRGQAQAGTTGLLGCLMRSRGDDGAPLLSDEQIADNVIGVLFAAQDTTASALTWIVKYLHDHPKLLEAVRAEQAAVREATGGGRQPLAWAHTKSMALTHRVILESLRMASIISFTFREAVADVEYKGFLIPKGWEGDASLQEHPPQP

SEQ ID NO: 5649 - protein, 347 aa, Zea mays subsp. mays
  peptide (1)..(347): Ceres Seq. ID no. 12409417
  misc_feature (1)..(335): Pfam Name: Cytochrome P450 Pfam Description: Cytochrome P450
  misc_feature (1)..(335): Homolog of NCBI NO: 9294629 NR Description: cytochrome P450 [Arabidopsis thaliana]
  misc_feature (1)..(335): Homolog of NCBI NO: 18402179 NR Description: cytochrome P450, putative; protein id: supported by cDNA: 126144. [Arabidopsis thaliana]
  misc_feature (1)..(335): Homolog of NCBI NO: 30694740 NR Description: cytochrome P450 family [Arabidopsis thaliana] cytochrome P450 [Arabidopsis thaliana] AT5g45340/K9E15_12 [Arabidopsis thaliana]
  misc_feature (1)..(335): Homolog of NCBI NO: 30694744 NR Description: cytochrome P450 family [Arabidopsis thaliana]
  misc_feature (1)..(335): Homolog of NCBI NO: 7430728 NR Description: cytochrome P450 - Arabidopsis thaliana cytochrome P450 [Arabidopsis thaliana]
  misc_feature (1)..(335): Homolog of NCBI NO: 18415271 NR Description: cytochrome p450 family; protein id: At4g19230.1, by cDNA: gi_15293092, supported by cDNA: gi_20259298 [Arabidopsis >gi|15293093|gb|AAK93657.1| putative cytochrome P450 cytochrome
  misc_feature (1)..(335): Homolog of NCBI NO: 15227033 NR Description: taxane 13-alpha-hydroxylase(cytochrome p450 putative; protein id: At2g29090.1 [Arabidopsis thaliana]
  misc_feature (1)..(335): Homolog of NCBI NO: 15239203 NR Description: cytochrome p450, putative; protein id: supported by cDNA: 36334., supported by cDNA: gi_14596098, by cDNA: gi_15450716, supported by cDNA: gi_17380617, supported
  misc_feature (1)..(335): Homolog of NCBI NO: 33146520 NR Description: putative 5-alpha-taxadienol-10-beta-hydroxylase
  misc_feature (1)..(335): Homolog of NCBI NO: 34901962 NR Description: 5-alpha-taxadienol-10-beta-hydroxylase-like
MGWPYLGETLQLYSQDPSVFFASKQKRYGEIFKTHLLGCPCVMLASPEAARFVLVTQAHLFKPTYPRSKERMIGPSALFFHQGDYHLRLRKLVQGALGPDALRALVPEVEAAVRSTLASWDAGHVRSTFHAMKTLSFDVGIVTIFGGRLDEWRKAELRKNYSVVEKGYNSFPNSLPGTLHYKAMQARRRLHGVLCDIMRERRGQAQAGTTGLLGCLMRSRGDDGAPLLSDEQIADNVIGVLFAAQDTTASALTWIVKYLHDHPKLLEAVRAEQAAVREATGGGRQPLAWAHTKSMALTHRVILESLRMASIISFTFREAVADVEYKGFLIPKGWEGDASLQEHPPQP

SEQ ID NO: 5650 - DNA, 1448 bp, Zea mays subsp. mays
  misc_feature (1)..(1448): Ceres Seq. ID no. 12409411
  misc_feature: MA Experiment ID: 108527 Result: Up-regulated in Transcription
  misc_feature: MA Experiment 108527 PARAMETER Experiment Name: Zm_5mM_NO_P Parameter: Age (day) Value: 8
  misc_feature: MA Experiment 108527 PARAMETER Experiment Name: Zm_5mM_NO_P Parameter: Organism Value: Zea mays
  misc_feature: MA Experiment 108527 PARAMETER Experiment Name: Zm_5mM_NO_P Parameter: Plant Line Value: 35A19
  misc_feature: MA Experiment 108527 PARAMETER Experiment Name: Zm_5mM_NO_P Parameter: Timepoint (hr) Value: 6
  misc_feature: MA Experiment 108527 PARAMETER Experiment Name: Zm_5mM_NO_P Parameter: Tissue Value: Aerial
  misc_feature: MA Experiment 108527 PARAMETER Experiment Name: Zm_5mM_NO_P Parameter: Treatment Value: 5mM NO vs. No Treatment
gtgaaagggccgtgcgggaagctaaccaccgcgaaagcgcctctgggggagtcagacgaacgaagcaatccaaccgaacgaaccgacctaggtcgtcgtcggctcgtcccctccgcaggaccggttcgccgtctcgtcgcgatctcgccgcctgcccgccgcgccctattaccgccatggaggcgctgtggaagcaggcctccaggctcaaggaccaggtctctcggcagggtgtgttcaagcagtttggctacgggaattctgataatgcgtttacagatgagtcagaggttaaactgcatcagagattggaaaagctttacttatcgactcgtgctgctaaacattttcaaagggacattgttcggggcgtggagggctatatagtcacaggatctaaacaagtcgaaatagggaataaattgtctgatgacagccagaaatacggtgttggaaacacatgtacaagtggtgatactttgtccaaagctgctacatatttcggaaaggcacgctcacagatggaaaaggagcgtggcaatatgttgaaagcatttggcacacaggtggcagagccactgcgggcgatggttatgggtgcacctttagaggatgccagacatatggcccagagatatgacagaacgaggcaagaagctgaagcacaggctgtcgaagtatcaagacggcagaacagggtgagggaatctactgggaatggcgatatggtatcaaaattggaagctgccgagtacaagcttgaagaactgaagtcaaacatggtgggattagggaaggaagctattgcagcaatgtcggctgttgaggctcagcagcaacggttgaccttacagcgtctcattgcactggttgaggctgagagaacttaccatcagagagttctggagatacttgacaaattggaagaagaaatggtgtctgagcgccaaaaaaattgaagcacccccgactccagcagctgaaaattatataccaccaccagcaccaccatcttatgatgaaattaatggagcatttgcatccacttctgttaacgagtcagtccaatctgtcgatttcttccttggagaggcccttgattcatttaatgctgaaagtgagtttgagcttaccttgtcagctggtgacattgtaattgtccgaaagatctcaagcaatggttgggcagaaggtgaatgcaagggcaaagcaggatggttccctcatgcttatatcgaaaggcaggaacgtgttctagcaagcaaagttccacatatattttaggagtttctggcagtcgcattacacggttttcatttctattgttgggagctggaactgtatccatgttttcacttcctcttagtttccgcgatgtaattactggctgtcatgtgcatagattaaatttacttccctttttttagtctggaaaaggttttggatgt

SEQ ID NO: 5651 - protein, 318 aa, Zea mays subsp. mays
  peptide (1)..(318): Ceres Seq. ID no. 12409412
  misc_feature (59)..(318): Homolog of NCBI NO: 38344978 NR Description: OSJNBa0011L07.8 [Oryza sativa (japonica
  misc_feature (59)..(318): Homolog of NCBI NO: 18418491 NR Description: putative protein; protein id: At4g34660.1, by cDNA: 32357., supported by cDNA: gi_18175937, supported by
  misc_feature (59)..(318): Homolog of NCBI NO: 21928139 NR Description: AT4g18060/F15J5_30 [Arabidopsis thaliana]
  misc_feature (59)..(318): Homolog of NCBI NO: 22328762 NR Description: putative protein; protein id: At4g18060.1,
  misc_feature (59)..(315): Homolog of NCBI NO: 34902022 NR Description: unknown protein [Oryza sativa (japonica
  misc_feature (196)..(317): Homolog of NCBI NO: 37535998 NR Description: unknown protein [Oryza sativa (japonica
  misc_feature (59)..(316): Homolog of NCBI NO: 16974680 NR Description: SH3 domain-containing protein 3 [Arabidopsis
  misc_feature (59)..(318): Homolog of NCBI NO: 7487662 NR Description: hypothetical protein T4L20.240 - Arabidopsis >gi|3096935|emb|CAA18845.1| putative protein [Arabidopsis >gi|7270416|emb|CAB80183.1| putative protein [Arabidopsis
  misc_feature (59)..(318): Homolog of NCBI NO: 22093679 NR Description: putative SH3(Src homology) domain-containing
  misc_feature (59)..(318): Homolog of NCBI NO: 15221714 NR Description: unknown protein; protein id: At1g31440.1, by cDNA: gi_16974675, supported by cDNA: gi_19424042, supported
ERAVREANHRESASGGVRRTKQSNRTNRPRSSSARPLRRTGSPSRRDLAACPPRPITAMEALWKQASRLKDQVSRQGVFKQFGYGNSDNAFTDESEVKLHQRLEKLYLSTRAAKHFQRDIVRGVEGYIVTGSKQVEIGNKLSDDSQKYGVGNTCTSGDTLSKAATYFGKARSQMEKERGNMLKAFGTQVAEPLRAMVMGAPLEDARHMAQRYDRTRQEAEAQAVEVSRRQNRVRESTGNGDMVSKLEAAEYKLEELKSNMVGLGKEAIAAMSAVEAQQQRLTLQRLIALVEAERTYHQRVLEILDKLEEEMVSERQKN

SEQ ID NO: 5652 - protein, 260 aa, Zea mays subsp. mays
  peptide (1)..(260): Ceres Seq. ID no. 12409413
  misc_feature (1)..(260): Homolog of NCBI NO: 21928139 NR Description: AT4g18060/F15J5_30 [Arabidopsis thaliana]
  misc_feature (1)..(260): Homolog of NCBI NO: 22328762 NR Description: putative protein; protein id: At4g18060.1,
  misc_feature (1)..(257): Homolog of NCBI NO: 34902022 NR Description: unknown protein [Oryza sativa (japonica
  misc_feature (138)..(259): Homolog of NCBI NO: 37535998 NR Description: unknown protein [Oryza sativa (japonica
  misc_feature (1)..(258): Homolog of NCBI NO: 16974680 NR Description: SH3 domain-containing protein 3 [Arabidopsis
  misc_feature (1)..(260): Homolog of NCBI NO: 7487662 NR Description: hypothetical protein T4L20.240 - Arabidopsis >gi|3096935|emb|CAA18845.1| putative protein [Arabidopsis >gi|7270416|emb|CAB80183.1| putative protein [Arabidopsis
  misc_feature (1)..(260): Homolog of NCBI NO: 22093679 NR Description: putative SH3(Src homology) domain-containing
  misc_feature (1)..(260): Homolog of NCBI NO: 15221714 NR Description: unknown protein; protein id: At1g31440.1, by cDNA: gi_16974675, supported by cDNA: gi_19424042, supported
  misc_feature (1)..(260): Homolog of NCBI NO: 38344978 NR Description: OSJNBa0011L07.8 [Oryza sativa (japonica
  misc_feature (1)..(260): Homolog of NCBI NO: 18418491 NR Description: putative protein; protein id: At4g34660.1, by cDNA: 32357., supported by cDNA: gi_18175937, supported by
MEALWKQASRLKDQVSRQGVFKQFGYGNSDNAFTDESEVKLHQRLEKLYLSTRAAKHFQRDIVRGVEGYIVTGSKQVEIGNKLSDDSQKYGVGNTCTSGDTLSKAATYFGKARSQMEKERGNMLKAFGTQVAEPLRAMVMGAPLEDARHMAQRYDRTRQEAEAQAVEVSRRQNRVRESTGNGDMVSKLEAAEYKLEELKSNMVGLGKEAIAAMSAVEAQQQRLTLQRLIALVEAERTYHQRVLEILDKLEEEMVSERQKN

SEQ ID NO: 5653 - DNA, 1749 bp, Zea mays subsp. mays
  misc_feature (1)..(1749): Ceres Seq. ID no. 12405080
  misc_feature: MA Experiment ID: 108527 Result: Up-regulated in Transcription
  misc_feature: MA Experiment 108527 PARAMETER Experiment Name: Zm_5mM_NO_P Parameter: Age (day) Value: 8
  misc_feature: MA Experiment 108527 PARAMETER Experiment Name: Zm_5mM_NO_P Parameter: Organism Value: Zea mays
  misc_feature: MA Experiment 108527 PARAMETER Experiment Name: Zm_5mM_NO_P Parameter: Plant Line Value: 35A19
  misc_feature: MA Experiment 108527 PARAMETER Experiment Name: Zm_5mM_NO_P Parameter: Timepoint (hr) Value: 6
  misc_feature: MA Experiment 108527 PARAMETER Experiment Name: Zm_5mM_NO_P Parameter: Tissue Value: Aerial
  misc_feature: MA Experiment 108527 PARAMETER Experiment Name: Zm_5mM_NO_P Parameter: Treatment Value: 5mM NO vs. No Treatment
  misc_feature: MA Experiment ID: 108528 Result: Down-regulated in Transcription
  misc_feature: MA Experiment 108528 PARAMETER Experiment Name: Zm_Imbibed_Seeds_P Parameter: Age (day) Value: 5 vs. 2
  misc_feature: MA Experiment 108528 PARAMETER Experiment Name: Zm_Imbibed_Seeds_P Parameter: Organism Value: Zea mays
  misc_feature: MA Experiment 108528 PARAMETER Experiment Name: Zm_Imbibed_Seeds_P Parameter: Plant Line Value: 35A19
  misc_feature: MA Experiment 108528 PARAMETER Experiment Name: Zm_Imbibed_Seeds_P Parameter: Tissue Value: Aerial vs. Embryo
  misc_feature: MA Experiment ID: 108530 Result: Down-regulated in Transcription
  misc_feature: MA Experiment 108530 PARAMETER Experiment Name: Zm_Imbibed_Seeds_P Parameter: Age (day) Value: 6 vs. 2
  misc_feature: MA Experiment 108530 PARAMETER Experiment Name: Zm_Imbibed_Seeds_P Parameter: Organism Value: Zea mays
  misc_feature: MA Experiment 108530 PARAMETER Experiment Name: Zm_Imbibed_Seeds_P Parameter: Plant Line Value: 35A19
  misc_feature: MA Experiment 108530 PARAMETER Experiment Name: Zm_Imbibed_Seeds_P Parameter: Tissue Value: Aerial vs. Embryo
  misc_feature: MA Experiment ID: 108535 Result: Down-regulated in Transcription
  misc_feature: MA Experiment 108535 PARAMETER Experiment Name: Zm_Meristem_P Parameter: Age (day) Value: 8
  misc_feature: MA Experiment 108535 PARAMETER Experiment Name: Zm_Meristem_P Parameter: Organism Value: Zea mays
  misc_feature: MA Experiment 108535 PARAMETER Experiment Name: Zm_Meristem_P Parameter: Plant Line Value: 35A19
  misc_feature: MA Experiment 108535 PARAMETER Experiment Name: Zm_Meristem_P Parameter: Tissue Value: Root Meristem vs. Above Root Meristem
  misc_feature: MA Experiment ID: 108545 Result: Down-regulated in Transcription
  misc_feature: MA Experiment 108545 PARAMETER Experiment Name: Zm_Imbibed_Seeds_P Parameter: Age (day) Value: 3 vs. 2
  misc_feature: MA Experiment 108545 PARAMETER Experiment Name: Zm_Imbibed_Seeds_P Parameter: Organism Value: Zea mays
  misc_feature: MA Experiment 108545 PARAMETER Experiment Name: Zm_Imbibed_Seeds_P Parameter: Plant Line Value: 35A19
  misc_feature: MA Experiment 108545 PARAMETER Experiment Name: Zm_Imbibed_Seeds_P Parameter: Tissue Value: Aerial vs. Embryo
  misc_feature: MA Experiment ID: 108547 Result: Down-regulated in Transcription
  misc_feature: MA Experiment 108547 PARAMETER Experiment Name: Zm_Imbibed_Seeds_P Parameter: Age (day) Value: 4 vs. 2
  misc_feature: MA Experiment 108547 PARAMETER Experiment Name: Zm_Imbibed_Seeds_P Parameter: Organism Value: Zea mays
  misc_feature: MA Experiment 108547 PARAMETER Experiment Name: Zm_Imbibed_Seeds_P Parameter: Plant Line Value: 35A19
  misc_feature: MA Experiment 108547 PARAMETER Experiment Name: Zm_Imbibed_Seeds_P Parameter: Tissue Value: Aerial vs. Embryo
  misc_feature: MA Experiment ID: 108559 Result: Up-regulated in Transcription
  misc_feature: MA Experiment 108559 PARAMETER Experiment Name: Zm_5mM_NO_P Parameter: Age (day) Value: 8
  misc_feature: MA Experiment 108559 PARAMETER Experiment Name: Zm_5mM_NO_P Parameter: Organism Value: Zea mays
  misc_feature: MA Experiment 108559 PARAMETER Experiment Name: Zm_5mM_NO_P Parameter: Plant Line Value: 35A19
  misc_feature: MA Experiment 108559 PARAMETER Experiment Name: Zm_5mM_NO_P Parameter: Timepoint (hr) Value: 12
  misc_feature: MA Experiment 108559 PARAMETER Experiment Name: Zm_5mM_NO_P Parameter: Tissue Value: Aerial
  misc_feature: MA Experiment 108559 PARAMETER Experiment Name: Zm_5mM_NO_P Parameter: Treatment Value: 5mM NO vs. No Treatment
  misc_feature: MA Experiment ID: 20000626 Result: Up-regulated in Transcription
  misc_feature: MA Experiment 20000626 PARAMETER Experiment Name: Zm_Herbicide-Treatments_P Parameter: Timepoint (hr) Value: 12
  misc_feature: MA Experiment 20000626 PARAMETER Experiment Name: Zm_Herbicide-Treatments_P Parameter: Tissue Value: Aerial
  misc_feature: MA Experiment 20000626 PARAMETER Experiment Name: Zm_Herbicide-Treatments_P Parameter: Treatment Value: Roundup vs. No Treatment
  misc_feature: MA Experiment ID: 20001610 Result: Up-regulated in Transcription
  misc_feature: MA Experiment 20001610 PARAMETER Experiment Name: Zm_50ppm_KNO3_L-to-H_P Parameter: Age (day) Value: 19
  misc_feature: MA Experiment 20001610 PARAMETER Experiment Name: Zm_50ppm_KNO3_L-to-H_P Parameter: Organism Value: Zea mays
  misc_feature: MA Experiment 20001610 PARAMETER Experiment Name: Zm_50ppm_KNO3_L-to-H_P Parameter: Plant Line Value: 35A19
  misc_feature: MA Experiment 20001610 PARAMETER Experiment Name: Zm_50ppm_KNO3_L-to-H_P Parameter: Timepoint (hr) Value: 2
  misc_feature: MA Experiment 20001610 PARAMETER Experiment Name: Zm_50ppm_KNO3_L-to-H_P Parameter: Tissue Value: Roots
  misc_feature: MA Experiment 20001610 PARAMETER Experiment Name: Zm_50ppm_KNO3_L-to-H_P Parameter: Treatment Value: 50ppm KNO3 vs. 50ppm KCl
  misc_feature: MA Experiment ID: 20001612 Result: Up-regulated in Transcription
  misc_feature: MA Experiment 20001612 PARAMETER Experiment Name: Zm_50ppm_KNO3_L-to-H_P Parameter: Age (day) Value: 19
  misc_feature: MA Experiment 20001612 PARAMETER Experiment Name: Zm_50ppm_KNO3_L-to-H_P Parameter: Organism Value: Zea mays
  misc_feature: MA Experiment 20001612 PARAMETER Experiment Name: Zm_50ppm_KNO3_L-to-H_P Parameter: Plant Line Value: 35A19
  misc_feature: MA Experiment 20001612 PARAMETER Experiment Name: Zm_50ppm_KNO3_L-to-H_P Parameter: Timepoint (hr) Value: 8
  misc_feature: MA Experiment 20001612 PARAMETER Experiment Name: Zm_50ppm_KNO3_L-to-H_P Parameter: Tissue Value: Roots
  misc_feature: MA Experiment 20001612 PARAMETER Experiment Name: Zm_50ppm_KNO3_L-to-H_P Parameter: Treatment Value: 50ppm KNO3 vs. 50ppm KCl
  misc_feature: MA Experiment ID: 20001613 Result: Up-regulated in Transcription
  misc_feature: MA Experiment 20001613 PARAMETER Experiment Name: Zm_50ppm_KNO3_L-to-H_P Parameter: Age (day) Value: 20
  misc_feature: MA Experiment 20001613 PARAMETER Experiment Name: Zm_50ppm_KNO3_L-to-H_P Parameter: Organism Value: Zea mays
  misc_feature: MA Experiment 20001613 PARAMETER Experiment Name: Zm_50ppm_KNO3_L-to-H_P Parameter: Plant Line Value: 35A19
  misc_feature: MA Experiment 20001613 PARAMETER Experiment Name: Zm_50ppm_KNO3_L-to-H_P Parameter: Timepoint (hr) Value: 24
  misc_feature: MA Experiment 20001613 PARAMETER Experiment Name: Zm_50ppm_KNO3_L-to-H_P Parameter: Tissue Value: Roots
  misc_feature: MA Experiment 20001613 PARAMETER Experiment Name: Zm_50ppm_KNO3_L-to-H_P Parameter: Treatment Value: 50ppm KNO3 vs. 50ppm KCl
atctataacagccgccaccttcccccttatactcgccggaggccaaccagtactcgtgccacgactgccacccctcctcttccttgtgatctccgaatacccatctcagattccaagggccgcgccgtgtaatccccggctctccccacccaccatatatctagtatccgcgcctcaaatccctcgcgaaacgccccgccgtaagcagttgttgtctgccgtgatttgagccgggcggacggattgatcccgggacgaggtgtctcagctcttgatcttgatcctgatcctgggaggcgttcctggtttattggtgggagcgaagaagccatgataccttccgtgaggctctctcctggtcctgcagccttctcaggctccagcctacgctcaaaattaccgtcaattccatccatctccagtctcaaaccctccaaatatgtggtctcctcgctgaaaccactctacctagcaccgctagatggtccgcgcactgccgagcttaagtctcggagacagccacttgagttccgttgttctgcttctgctgctgatgacaaggagtcaaagactcaggtggtgccagttcagtcggaaggcgcacagaggttgaagatctccatctatttcgccacctggtgggcgcttaatgtgatatttaacatttacaacaagaaggttctcaatgcattcccttacccctggctcacctccacactctccctcgcctgtggctctgctatgatgcttttctcgtgggccacccgtcttgttgaggcccctaagaccgacctggacttctggaaagttcttttcccggttgctgtggcgcatacaattggccatgttgctgctacagtgagcatgtctaaggtggcagtgtcattcacacacataattaaaagcgcagaacctgcattcagtgttttggtgtcaaggttcttccttggggagacgtttccaattccagtatatctttctcttcttccaatcattggtggttgtgctctagctgctgtcacagagctgaactttaatatggttggatttatgggtgccatgatatccaaccttgcatttgttttccgcaacatcttctcgaagaggggcatgaaggggaagtccgtcagtggcatgaattactacgcttgcctgtcaattatgtccctggtcatactgactccatttgctatagctatggaaggccctcaaatgtgggctgctggttggcaaaaggctcttgcagaagttggacccaatgttgtctggtggattgctgcacagagcgtgttctaccacttatataaccaggtgtcctacatgtctctcgatcagatttctccattgacattcagcattggcaatacaatgaagcgtatatcagtgattgtttcatcaatcattatcttccacactcctgtccgcgctgtcaatgcactgggagctgccattgccatccttggcacattcctgtactctcaggcaaaggcgtgaggcgggccatgatgacgaacgtctgcagaatcagtagcaagcactaaatccaattttgcttgttccagtggcatgtaaatatcgggttaggtttccgtatgagagtttgtaataatggatgaatggctctgctgtttcgttcttgtttgttggccagactcaaatccataggccatgaactgcggtcgagtgtacctgaataatactgtaacggagaattcgccgatgctgtttctttatgggtatatatatagt

SEQ ID NO: 5654 - protein, 387 aa, Zea mays subsp. mays
  peptide (1)..(387): Ceres Seq. ID no. 12405081
  misc_feature (105)..(230): Pfam Name: Integral membrane protein DUF6 Pfam Description: Integral membrane protein DUF6
  misc_feature (1)..(387): Homolog of NCBI NO: 7489744 NR Description: glucose-6-phosphate/phosphate-translocator
  misc_feature (1)..(386): Homolog of NCBI NO: 14150753 NR Description: glucose-6-phosphate/phosphate translocator [Oryza
  misc_feature (27)..(386): Homolog of NCBI NO: 7488807 NR Description: glucose-6-phosphate/phosphate-translocator
  misc_feature (1)..(386): Homolog of NCBI NO: 18407336 NR Description: glucose-6-phosphate/phosphate-translocator putative; protein id: At1g61800.1, supported by cDNA:
  misc_feature (1)..(386): Homolog of NCBI NO: 14596173 NR Description: Similar to
  misc_feature (1)..(384): Homolog of NCBI NO: 7484980 NR Description: glucose-6-phosphate/phosphate translocator
  misc_feature (1)..(386): Homolog of NCBI NO: 18423670 NR Description: glucose-6-phosphate/phosphate translocator; id: At5g54800.1, supported by cDNA: 26107., supported by cDNA: supported by cDNA: gi_7229674 [Arabidopsis thaliana]
  misc_feature (1)..(386): Homolog of NCBI NO: 21554690 NR Description: glucose-6-phosphate/phosphate translocator
  misc_feature (72)..(386): Homolog of NCBI NO: 28564755 NR Description: putative glucose-6-phosphate/phosphate-transloca
  misc_feature (1)..(384): Homolog of NCBI NO: 9758260 NR Description: glucose-6-phosphate/phosphate translocator
MIPSVRLSPGPAAFSGSSLRSKLPSIPSISSLKPSKYVVSSLKPLYLAPLDGPRTAELKSRRQPLEFRCSASAADDKESKTQVVPVQSEGAQRLKISIYFATWWALNVIFNIYNKKVLNAFPYPWLTSTLSLACGSAMMLFSWATRLVEAPKTDLDFWKVLFPVAVAHTIGHVAATVSMSKVAVSFTHIIKSAEPAFSVLVSRFFLGETFPIPVYLSLLPIIGGCALAAVTELNFNMVGFMGAMISNLAFVFRNIFSKRGMKGKSVSGMNYYACLSIMSLVILTPFAIAMEGPQMWAAGWQKALAEVGPNVVWWIAAQSVFYHLYNQVSYMSLDQISPLTFSIGNTMKRISVIVSSIIIFHTPVRAVNALGAAIAILGTFLYSQAKA

SEQ ID NO: 5655 - protein, 250 aa, Zea mays subsp. mays
  peptide (1)..(250): Ceres Seq. ID no. 12405082
  misc_feature (1)..(93): Pfam Name: Integral membrane protein DUF6 Pfam Description: Integral membrane protein DUF6
  misc_feature (1)..(250): Homolog of NCBI NO: 7489744 NR Description: glucose-6-phosphate/phosphate-translocator
  misc_feature (1)..(249): Homolog of NCBI NO: 14150753 NR Description: glucose-6-phosphate/phosphate translocator [Oryza
  misc_feature (1)..(249): Homolog of NCBI NO: 7488807 NR Description: glucose-6-phosphate/phosphate-translocator
  misc_feature (1)..(249): Homolog of NCBI NO: 18407336 NR Description: glucose-6-phosphate/phosphate-translocator putative; protein id: At1g61800.1, supported by cDNA:
  misc_feature (1)..(249): Homolog of NCBI NO: 14596173 NR Description: Similar to
  misc_feature (1)..(247): Homolog of NCBI NO: 7484980 NR Description: glucose-6-phosphate/phosphate translocator
  misc_feature (1)..(249): Homolog of NCBI NO: 18423670 NR Description: glucose-6-phosphate/phosphate translocator; id: At5g54800.1, supported by cDNA: 26107., supported by cDNA: supported by cDNA: gi_7229674 [Arabidopsis thaliana]
  misc_feature (1)..(249): Homolog of NCBI NO: 21554690 NR Description: glucose-6-phosphate/phosphate translocator
  misc_feature (1)..(249): Homolog of NCBI NO: 28564755 NR Description: putative glucose-6-phosphate/phosphate-transloca
  misc_feature (1)..(247): Homolog of NCBI NO: 9758260 NR Description: glucose-6-phosphate/phosphate translocator
MMLFSWATRLVEAPKTDLDFWKVLFPVAVAHTIGHVAATVSMSKVAVSFTHIIKSAEPAFSVLVSRFFLGETFPIPVYLSLLPIIGGCALAAVTELNFNMVGFMGAMISNLAFVFRNIFSKRGMKGKSVSGMNYYACLSIMSLVILTPFAIAMEGPQMWAAGWQKALAEVGPNVVWWIAAQSVFYHLYNQVSYMSLDQISPLTFSIGNTMKRISVIVSSIIIFHTPVRAVNALGAAIAILGTFLYSQAKA

SEQ ID NO: 5656 - protein, 249 aa, Zea mays subsp. mays
  peptide (1)..(249): Ceres Seq. ID no. 12405083
  misc_feature (1)..(92): Pfam Name: Integral membrane protein DUF6 Pfam Description: Integral membrane protein DUF6
  misc_feature (1)..(249): Homolog of NCBI NO: 7489744 NR Description: glucose-6-phosphate/phosphate-translocator
  misc_feature (1)..(248): Homolog of NCBI NO: 14150753 NR Description: glucose-6-phosphate/phosphate translocator [Oryza
  misc_feature (1)..(248): Homolog of NCBI NO: 7488807 NR Description: glucose-6-phosphate/phosphate-translocator
  misc_feature (1)..(248): Homolog of NCBI NO: 18407336 NR Description: glucose-6-phosphate/phosphate-translocator putative; protein id: At1g61800.1, supported by cDNA:
  misc_feature (1)..(248): Homolog of NCBI NO: 14596173 NR Description: Similar to
  misc_feature (1)..(246): Homolog of NCBI NO: 7484980 NR Description: glucose-6-phosphate/phosphate translocator
  misc_feature (1)..(248): Homolog of NCBI NO: 18423670 NR Description: glucose-6-phosphate/phosphate translocator; id: At5g54800.1, supported by cDNA: 26107., supported by cDNA: supported by cDNA: gi_7229674 [Arabidopsis thaliana]
  misc_feature (1)..(248): Homolog of NCBI NO: 21554690 NR Description: glucose-6-phosphate/phosphate translocator
  misc_feature (1)..(248): Homolog of NCBI NO: 28564755 NR Description: putative glucose-6-phosphate/phosphate-transloca
  misc_feature (1)..(246): Homolog of NCBI NO: 9758260 NR Description: glucose-6-phosphate/phosphate translocator
MLFSWATRLVEAPKTDLDFWKVLFPVAVAHTIGHVAATVSMSKVAVSFTHIIKSAEPAFSVLVSRFFLGETFPIPVYLSLLPIIGGCALAAVTELNFNMVGFMGAMISNLAFVFRNIFSKRGMKGKSVSGMNYYACLSIMSLVILTPFAIAMEGPQMWAAGWQKALAEVGPNVVWWIAAQSVFYHLYNQVSYMSLDQISPLTFSIGNTMKRISVIVSSIIIFHTPVRAVNALGAAIAILGTFLYSQAKA

SEQ ID NO: 5657 - DNA, 1174 bp, Zea mays subsp. mays
  misc_feature (1)..(1174): Ceres Seq. ID no. 12365527
  misc_feature: MA Experiment ID: 108559 Result: Up-regulated in Transcription
  misc_feature: MA Experiment 108559 PARAMETER Experiment Name: Zm_5mM_NO_P Parameter: Age (day) Value: 8
  misc_feature: MA Experiment 108559 PARAMETER Experiment Name: Zm_5mM_NO_P Parameter: Organism Value: Zea mays
  misc_feature: MA Experiment 108559 PARAMETER Experiment Name: Zm_5mM_NO_P Parameter: Plant Line Value: 35A19
  misc_feature: MA Experiment 108559 PARAMETER Experiment Name: Zm_5mM_NO_P Parameter: Timepoint (hr) Value: 12
  misc_feature: MA Experiment 108559 PARAMETER Experiment Name: Zm_5mM_NO_P Parameter: Tissue Value: Aerial
  misc_feature: MA Experiment 108559 PARAMETER Experiment Name: Zm_5mM_NO_P Parameter: Treatment Value: 5mM NO vs. No Treatment
catcacaagattggctgaagttttcatcatacaaggagcgcctacttggcctttcatttggtttgctgtcaacaaggaaccatgacttgtcatacaaccttgcgtggcgtaccttaactgatccatcacgtgtctcatcaaaggccataaggaggcagttagggcataaccttctttctgcattgaagtacacatacaagattgataagagggattcacatcttaggccaacgaaaggatatgcgtttcagtcaacttctcaagttggtggtctatggaatagcaaaggattgagatatttccggcaggagttcgatgtacgtggtgctgtgcctttgggattttatagtgctgctctcaacgttggtgtaggagcgggtgtcattttaccgcttgcagggggattcatgaattcgacttcatcagtgccagagaggttttatcttggaggtaattcttctccagtgtgcagcttgggcggaccgtcatctctgctgggtttcagattaaggggagttggcccaacagaggcgcggaggcatgtccttaataactcggagagtggttcggctgaccctggaagggattacttgggaggtgatctggccgtgtctgccttcgctgacttttcttttgatctgcccctcaagatattccagagacgctggaatgccatggccacgcattccttactgctggaaaccttgcgaaactgtcggagggtgagtacaagaacttttcggcttctgaatttcggcaaacgttctggagctctgctggcgttgggattattttgcctaccaaacttttccgggtggaggtgaactattgtcgcatcctaaagcaagctgagcatgacagcgcgaagactggaatccagttcagcttttcctcgcccatgtaggaacttgccatggcagccgaagtagctgcactttcctctgtagacttgcattcttcccgttcttttcatgctgaagcaattgaagaggtttacgtgctcccttttcttgtgacgcttgttcattgacacgaggagctgctccttttttttggtgtcttcaggagatgaatttattatttgctgtttttgacctcacgagggatttgtcctcgcacaactcaaataccgatgctgtggctacacaatggtggatagaataatattttggct

SEQ ID NO: 5658 - protein, 273 aa, Zea mays subsp. mays
  peptide (1)..(273): Ceres Seq. ID no. 12365528
  misc_feature (1)..(251): Homolog of NCBI NO: 18414910 NR Description: expressed protein; protein id: At5g05520.1, by cDNA: 150381., supported by cDNA: gi_16648862, supported by gi_20259795 [Arabidopsis thaliana] >gi|10178129|dbj|BAB11541.1|
  misc_feature (1)..(251): Homolog of NCBI NO: 21553544 NR Description: unknown [Arabidopsis thaliana]
  misc_feature (1)..(251): Homolog of NCBI NO: 15228433 NR Description: unknown protein; protein id: At3g11070.1, by cDNA: gi_20466220 [Arabidopsis thaliana] unknown protein [Arabidopsis thaliana]
  misc_feature (17)..(174): Homolog of NCBI NO: 27882330 NR Description: Unknown (protein for MGC:55803) [Danio rerio]
  misc_feature (18)..(174): Homolog of NCBI NO: 30519943 NR Description: RIKEN cDNA 1110030L07 [Mus musculus] unnamed protein product [Mus musculus] unnamed protein product [Mus musculus]
  misc_feature (18)..(174): Homolog of NCBI NO: 34867488 NR Description: similar to Protein CGI-51 [Rattus norvegicus]
  misc_feature (7)..(174): Homolog of NCBI NO: 38511778 NR Description: CGI-51 protein [Silurana tropicalis]
  misc_feature (7)..(174): Homolog of NCBI NO: 7022134 NR Description: unnamed protein product [Homo sapiens]
  misc_feature (7)..(174): Homolog of NCBI NO: 14043738 NR Description: Unknown (protein for MGC:14085) [Homo sapiens]
  misc_feature (23)..(220): Homolog of NCBI NO: 40742445 NR Description: hypothetical protein AN6989.2 [Aspergillus
SQDWLKFSSYKERLLGLSFGLLSTRNHDLSYNLAWRTLTDPSRVSSKAIRRQLGHNLLSALKYTYKIDKRDSHLRPTKGYAFQSTSQVGGLWNSKGLRYFRQEFDVRGAVPLGFYSAALNVGVGAGVILPLAGGFMNSTSSVPERFYLGGNSSPVCSLGGPSSLLGFRLRGVGPTEARRHVLNNSESGSADPGRDYLGGDLAVSAFADFSFDLPLKIFQRRWNAMATHSLLLETLRNCRRVSTRTFRLLNFGKRSGALLALGLFCLPNFSGWR

SEQ ID NO: 5659 - protein, 138 aa, Zea mays subsp. mays
  peptide (1)..(138): Ceres Seq. ID no. 12365529
  misc_feature (1)..(116): Homolog of NCBI NO: 18414910 NR Description: expressed protein; protein id: At5g05520.1, by cDNA: 150381., supported by cDNA: gi_16648862, supported by gi_20259795 [Arabidopsis thaliana] >gi|10178129|dbj|BAB11541.1|
  misc_feature (1)..(116): Homolog of NCBI NO: 21553544 NR Description: unknown [Arabidopsis thaliana]
  misc_feature (1)..(116): Homolog of NCBI NO: 15228433 NR Description: unknown protein; protein id: At3g11070.1, by cDNA: gi_20466220 [Arabidopsis thaliana] unknown protein [Arabidopsis thaliana]
  misc_feature (1)..(39): Homolog of NCBI NO: 27882330 NR Description: Unknown (protein for MGC:55803) [Danio rerio]
  misc_feature (1)..(39): Homolog of NCBI NO: 30519943 NR Description: RIKEN cDNA 1110030L07 [Mus musculus] unnamed protein product [Mus musculus] unnamed protein product [Mus musculus]
  misc_feature (1)..(39): Homolog of NCBI NO: 34867488 NR Description: similar to Protein CGI-51 [Rattus norvegicus]
  misc_feature (1)..(39): Homolog of NCBI NO: 38511778 NR Description: CGI-51 protein [Silurana tropicalis]
  misc_feature (1)..(39): Homolog of NCBI NO: 7022134 NR Description: unnamed protein product [Homo sapiens]
  misc_feature (1)..(39): Homolog of NCBI NO: 14043738 NR Description: Unknown (protein for MGC:14085) [Homo sapiens]
  misc_feature (1)..(85): Homolog of NCBI NO: 40742445 NR Description: hypothetical protein AN6989.2 [Aspergillus
MNSTSSVPERFYLGGNSSPVCSLGGPSSLLGFRLRGVGPTEARRHVLNNSESGSADPGRDYLGGDLAVSAFADFSFDLPLKIFQRRWNAMATHSLLLETLRNCRRVSTRTFRLLNFGKRSGALLALGLFCLPNFSGWR

SEQ ID NO: 5660 - DNA, 1288 bp, Zea mays subsp. mays
  misc_feature (1)..(1288): Ceres Seq. ID no. 12373648
  misc_feature: MA Experiment ID: 108543 Result: Up-regulated in Transcription
  misc_feature: MA Experiment ID: 108544 Result: Up-regulated in Transcription
ccattcgtttctcccctccagcgccgaggccgagtacctcactgtggctaatggcgtcgctgaggcggcatggcttcgtcagctgctccaggagctgcacagtccgttgacatggagcacacttgtctactgtgataacgtcagtgccatgtatctctccaccaatcctgttcagcaccagcgcacaaatcatgttgagctcgacctctacttcgtccgcgagcgtgtcgccgtcggggatgtgcgagttctctatgtcccgaccacttctcagtttgtcgacatcttcaccaagggcctaactacatcgttatttgaggaggtttggtccagtcttaacatctgtcgtggctagaatttcgaccacgagagtgttagagttatttgtggctttgtattgtaatggggtgttttctatgtaatgggcttagggccaacaactctattataaatatagctcccccaaccctggttaggggttagggtttccagcccactaacagattgaactatgactagattagtcatgcgaagattttaaatatttgtggattgatatgtctacaggtccttccgtgactatggagaatccgtcttgagacatttagagaatgcaatcagcaaagacccaaatctccgtaaagccccggtgaaccatgagggcgtatgtacatattctttgctttgttctttcgaaacttgaatatagatcttgatgcataatttttcttctccgagaaagctggatttctgcttattttatggcataccatacacaggtaagggtttcaggatatggtgggtggttcttgctgaggctctctctgcatgatcctgttcttcccctaaacattgaggcacagagtaacgatgatgcgattaagctggggcttgcggttcttgctgctgtgaatgaatttccagcactggatgtgacggcactgaacaaattcgtgcatcagtgaatataagggacggacattggcatcataatgtgatcagcttcgcatggtgtcgtgttcgccccggtcgaacatgttctacatgtggcacgagtatcatacagaaatataccagtttattacttgcacaggctttttagtttggaaagacaagggagatttcagtgttgagatgattcttgtgtgtgtttataccagctatcagagtaagaatatgcgtgcgtactgttgaggctgatctttacttgagaataaggtttgagttacctgagtatttttttaaaaggatcaggaggcttgctgtgatgtgaggccacgaatttgcc

SEQ ID NO: 5661 - protein, 117 aa, Zea mays subsp. mays
  peptide (1)..(117): Ceres Seq. ID no. 12373649
  misc_feature (1)..(114): Homolog of NCBI NO: 12328472 NR Description: putative gag/pol polyprotein [Oryza sativa
  misc_feature (6)..(114): Homolog of NCBI NO: 37531648 NR Description: putative polyprotein [Oryza sativa (japonica group)] >gi|18652495|gb|AAL77129.1| Putative polyprotein [Oryza >gi|31430511|gb|AAP52413.1| putative polyprotein [Oryza sativa
  misc_feature (6)..(112): Homolog of NCBI NO: 34910174 NR Description: putative gag/pol polyprotein [Oryza sativa
  misc_feature (6)..(114): Homolog of NCBI NO: 38346582 NR Description: OSJNBa0061G20.2 [Oryza sativa (japonica
  misc_feature (6)..(117): Homolog of NCBI NO: 12039328 NR Description: putative copia-like retrotransposon polyprotein
  misc_feature (6)..(117): Homolog of NCBI NO: 37536522 NR Description: putative gag-pol polyprotein [Oryza sativa
  misc_feature (6)..(112): Homolog of NCBI NO: 37530764 NR Description: putative copia-type polyprotein [Oryza sativa
  misc_feature (6)..(117): Homolog of NCBI NO: 37530576 NR Description: putative gag-pol polyprotein [Oryza sativa
  misc_feature (6)..(112): Homolog of NCBI NO: 32487794 NR Description: OSJNBa0035I04.5 [Oryza sativa (japonica
  misc_feature (1)..(90): Homolog of NCBI NO: 34900938 NR Description: gag/pol polyprotein-like [Oryza sativa (japonica
HSFLPSSAEAEYLTVANGVAEAAWLRQLLQELHSPLTWSTLVYCDNVSAMYLSTNPVQHQRTNHVELDLYFVRERVAVGDVRVLYVPTTSQFVDIFTKGLTTSLFEEVWSSLNICRG

SEQ ID NO: 5662 - protein, 68 aa, Zea mays subsp. mays
  peptide (1)..(68): Ceres Seq. ID no. 12373650
  misc_feature (1)..(65): Homolog of NCBI NO: 12328472 NR Description: putative gag/pol polyprotein [Oryza sativa
  misc_feature (1)..(65): Homolog of NCBI NO: 37531648 NR Description: putative polyprotein [Oryza sativa (japonica group)] >gi|18652495|gb|AAL77129.1| Putative polyprotein [Oryza >gi|31430511|gb|AAP52413.1| putative polyprotein [Oryza sativa
  misc_feature (1)..(63): Homolog of NCBI NO: 34910174 NR Description: putative gag/pol polyprotein [Oryza sativa
  misc_feature (1)..(65): Homolog of NCBI NO: 38346582 NR Description: OSJNBa0061G20.2 [Oryza sativa (japonica
  misc_feature (1)..(68): Homolog of NCBI NO: 12039328 NR Description: putative copia-like retrotransposon polyprotein
  misc_feature (1)..(68): Homolog of NCBI NO: 37536522 NR Description: putative gag-pol polyprotein [Oryza sativa
  misc_feature (1)..(63): Homolog of NCBI NO: 37530764 NR Description: putative copia-type polyprotein [Oryza sativa
  misc_feature (1)..(68): Homolog of NCBI NO: 37530576 NR Description: putative gag-pol polyprotein [Oryza sativa
  misc_feature (1)..(63): Homolog of NCBI NO: 32487794 NR Description: OSJNBa0035I04.5 [Oryza sativa (japonica
  misc_feature (1)..(41): Homolog of NCBI NO: 34900938 NR Description: gag/pol polyprotein-like [Oryza sativa (japonica
MYLSTNPVQHQRTNHVELDLYFVRERVAVGDVRVLYVPTTSQFVDIFTKGLTTSLFEEVWSSLNICRG

SEQ ID NO: 5663 - protein, 67 aa, Zea mays subsp. mays
  peptide (1)..(67): Ceres Seq. ID no. 12373651
  misc_feature (7)..(67): Homolog of NCBI NO: 33146934 NR Description: putative phosphoglucomutase precursor,
  misc_feature (7)..(67): Homolog of NCBI NO: 34901238 NR Description: phosphoglucomutase-like protein [Oryza sativa
  misc_feature (7)..(66): Homolog of NCBI NO: 11358618 NR Description: phosphoglucomutase-like protein - Arabidopsis
  misc_feature (7)..(66): Homolog of NCBI NO: 18418333 NR Description: phosphoglucomutase-like protein; protein id: supported by cDNA: gi_16974561 [Arabidopsis thaliana] AT5g17530/K10A8_10 [Arabidopsis thaliana]
MAYHTQVRVSGYGGWFLLRLSLHDPVLPLNIEAQSNDDAIKLGLAVLAAVNEFPALDVTALNKFVHQ

SEQ ID NO: 5664 - DNA, 1173 bp, Zea mays subsp. mays
  misc_feature (1)..(1173): Ceres Seq. ID no. 12409399
  misc_feature: MA Experiment ID: 108527 Result: Up-regulated in Transcription
  misc_feature: MA Experiment 108527 PARAMETER Experiment Name: Zm_5mM_NO_P Parameter: Age (day) Value: 8
  misc_feature: MA Experiment 108527 PARAMETER Experiment Name: Zm_5mM_NO_P Parameter: Organism Value: Zea mays
  misc_feature: MA Experiment 108527 PARAMETER Experiment Name: Zm_5mM_NO_P Parameter: Plant Line Value: 35A19
  misc_feature: MA Experiment 108527 PARAMETER Experiment Name: Zm_5mM_NO_P Parameter: Timepoint (hr) Value: 6
  misc_feature: MA Experiment 108527 PARAMETER Experiment Name: Zm_5mM_NO_P Parameter: Tissue Value: Aerial
  misc_feature: MA Experiment 108527 PARAMETER Experiment Name: Zm_5mM_NO_P Parameter: Treatment Value: 5mM NO vs. No Treatment
  misc_feature: MA Experiment ID: 108559 Result: Up-regulated in Transcription
  misc_feature: MA Experiment 108559 PARAMETER Experiment Name: Zm_5mM_NO_P Parameter: Age (day) Value: 8
  misc_feature: MA Experiment 108559 PARAMETER Experiment Name: Zm_5mM_NO_P Parameter: Organism Value: Zea mays
  misc_feature: MA Experiment 108559 PARAMETER Experiment Name: Zm_5mM_NO_P Parameter: Plant Line Value: 35A19
  misc_feature: MA Experiment 108559 PARAMETER Experiment Name: Zm_5mM_NO_P Parameter: Timepoint (hr) Value: 12
  misc_feature: MA Experiment 108559 PARAMETER Experiment Name: Zm_5mM_NO_P Parameter: Tissue Value: Aerial
  misc_feature: MA Experiment 108559 PARAMETER Experiment Name: Zm_5mM_NO_P Parameter: Treatment Value: 5mM NO vs. No Treatment
  misc_feature: MA Experiment ID: 108689 Result: Up-regulated in Transcription
  misc_feature: MA Experiment 108689 PARAMETER Experiment Name: Zm_Drought_Roots_P Parameter: Age (day) Value: 9
  misc_feature: MA Experiment 108689 PARAMETER Experiment Name: Zm_Drought_Roots_P Parameter: Organism Value: Zea mays
  misc_feature: MA Experiment 108689 PARAMETER Experiment Name: Zm_Drought_Roots_P Parameter: Plant Line Value: 35A19
  misc_feature: MA Experiment 108689 PARAMETER Experiment Name: Zm_Drought_Roots_P Parameter: Timepoint (hr) Value: 24
  misc_feature: MA Experiment 108689 PARAMETER Experiment Name: Zm_Drought_Roots_P Parameter: Tissue Value: Roots
  misc_feature: MA Experiment 108689 PARAMETER Experiment Name: Zm_Drought_Roots_P Parameter: Treatment Value: Drought vs. No Drought
  misc_feature: MA Experiment ID: 20000477 Result: Up-regulated in Transcription
  misc_feature: MA Experiment 20000477 PARAMETER Experiment Name: Zm_5mM_SA_P Parameter: Age (day) Value: 10
  misc_feature: MA Experiment 20000477 PARAMETER Experiment Name: Zm_5mM_SA_P Parameter: Organism Value: Zea mays
  misc_feature: MA Experiment 20000477 PARAMETER Experiment Name: Zm_5mM_SA_P Parameter: Plant Line Value: 35A19
  misc_feature: MA Experiment 20000477 PARAMETER Experiment Name: Zm_5mM_SA_P Parameter: Timepoint (hr) Value: 48
  misc_feature: MA Experiment 20000477 PARAMETER Experiment Name: Zm_5mM_SA_P Parameter: Tissue Value: Aerial
  misc_feature: MA Experiment 20000477 PARAMETER Experiment Name: Zm_5mM_SA_P Parameter: Treatment Value: 5mM SA vs. No Treatment
  misc_feature: MA Experiment ID: 20000478 Result: Up-regulated in Transcription
  misc_feature: MA Experiment 20000478 PARAMETER Experiment Name: Zm_5mM_SA_P Parameter: Age (day) Value: 11
  misc_feature: MA Experiment 20000478 PARAMETER Experiment Name: Zm_5mM_SA_P Parameter: Organism Value: Zea mays
  misc_feature: MA Experiment 20000478 PARAMETER Experiment Name: Zm_5mM_SA_P Parameter: Plant Line Value: 35A19
  misc_feature: MA Experiment 20000478 PARAMETER Experiment Name: Zm_5mM_SA_P Parameter: Timepoint (hr) Value: 72
  misc_feature: MA Experiment 20000478 PARAMETER Experiment Name: Zm_5mM_SA_P Parameter: Tissue Value: Aerial
  misc_feature: MA Experiment 20000478 PARAMETER Experiment Name: Zm_5mM_SA_P Parameter: Treatment Value: 5mM SA vs. No Treatment
  misc_feature: MA Experiment ID: 20000479 Result: Up-regulated in Transcription
  misc_feature: MA Experiment 20000479 PARAMETER Experiment Name: Zm_Drought_P Parameter: Age (day) Value: 10
  misc_feature: MA Experiment 20000479 PARAMETER Experiment Name: Zm_Drought_P Parameter: Organism Value: Zea mays
  misc_feature: MA Experiment 20000479 PARAMETER Experiment Name: Zm_Drought_P Parameter: Plant Line Value: 35A19
  misc_feature: MA Experiment 20000479 PARAMETER Experiment Name: Zm_Drought_P Parameter: Timepoint (hr) Value: 48
  misc_feature: MA Experiment 20000479 PARAMETER Experiment Name: Zm_Drought_P Parameter: Tissue Value: Aerial
  misc_feature: MA Experiment 20000479 PARAMETER Experiment Name: Zm_Drought_P Parameter: Treatment Value: Drought vs. No Drought
atctggattatggcagcaccggaggggagtacatctctgttagttcttcacaactctagactctcagttatcttacggcggtccaaaacccgcaaactgcaggtccgtcgcgcggtacttatcccgtgacttgccatacgagctgtcgcccgacgacgtctacctgacgaacggcggcgctcaggcgatcgagatagtgtgctcggcgctggctcgtccgggcgccaacatcttgctcccgaggcccggctacaagctctacgaggcgcgcgccgtgttcagcgggatggaggcccggtacttcgaccttgtacccggcgaaggctgggaggtcgacaccgacggtgtccgagctctcgccgacaagaacacggttgccgtcgtcatcatcaaccccggaaacccgtgcggttgctgagactgcgcggaagctcggcgtgtttgtcgtagcggacgaggcttacgcgcacttgacgtttggagagaggaggttcgtgccgatgggcgtgtttggggccgtggctccggtcatcacgctggggtccatttcgaagaggtggctggtgcccggctggcggctcgggtggatcgctaccagtgaccctagtggcgtgtttcagagaaccaaggtagccagcagcatcaagacctaccattacatctgctctgaccctacgacgtttgttcagggagcggttccaaacctcctggagaacacaagcgaggagttcttccgaagaaacatcagaactctaaaagaaagcgcggacatgtgctgggagaagctgaagggcgtcaacgggatcgcatgcccaagcagaccgatggggtccatgttcgtaatggtgaaactggacctgtcctgcctgcaggggatcgaagacgacatggacttctgctgccggctcgccaaggaagaatcggtggttgttctgccagggcgtgttgtgggatgcgaggactggctccggatcaccttcgccatcgatccgtcctctctcgaagacggcctggacaggctcaggtccttctgctcgcgacacagcaagccggcggcacagggttctgctgcctctgtagtctagtagtttctgttagaggatctgaagcactccacgtcttggaaacaatgaagtttgggtcaatatgagaacgtaataataaagttgattc

SEQ ID NO: 5665 - protein, 194 aa, Zea mays subsp. mays
  peptide (1)..(194): Ceres Seq. ID no. 12409400
  misc_feature (1)..(178): Pfam Name: Aminotransferase class I and II Pfam Description: Aminotransferase class I and II
  misc_feature (1)..(182): Homolog of NCBI NO: 27525396 NR Description: tyrosine aminotransferase [Solenostemon
  misc_feature (1)..(183): Homolog of NCBI NO: 15239521 NR Description: tyrosine aminotransferase; protein id: [Arabidopsis thaliana] >gi|10177259|dbj|BAB10727.1| tyrosine [Arabidopsis thaliana] >gi|25054842|gb|AAN71911.1| putative
  misc_feature (1)..(183): Homolog of NCBI NO: 23397279 NR Description: putatative tyrosine aminotransferase [Arabidopsis
  misc_feature (1)..(183): Homolog of NCBI NO: 8777301 NR Description: tyrosine aminotransferase-like protein
  misc_feature (1)..(183): Homolog of NCBI NO: 11527941 NR Description: ROOTY/SUPERROOT1 [Arabidopsis thaliana]
  misc_feature (1)..(183): Homolog of NCBI NO: 11527943 NR Description: ROOTY/SUPERROOT1 [Arabidopsis thaliana]
  misc_feature (1)..(183): Homolog of NCBI NO: 15225387 NR Description: putative tyrosine aminotransferase; protein id: supported by cDNA: gi_11527938, supported by cDNA: gi_11527940,
  misc_feature (1)..(183): Homolog of NCBI NO: 15809874 NR Description: At2g20610/F23N11.7 [Arabidopsis thaliana]
  misc_feature (1)..(193): Homolog of NCBI NO: 15224631 NR Description: putative tyrosine aminotransferase; protein id: supported by cDNA: 14570. [Arabidopsis thaliana]
  misc_feature (1)..(193): Homolog of NCBI NO: 21553462 NR Description: putative tyrosine aminotransferase [Arabidopsis
MGVFGAVAPVITLGSISKRWLVPGWRLGWIATSDPSGVFQRTKVASSIKTYHYICSDPTTFVQGAVPNLLENTSEEFFRRNIRTLKESADMCWEKLKGVNGIACPSRPMGSMFVMVKLDLSCLQGIEDDMDFCCRLAKEESVVVLPGRVVGCEDWLRITFAIDPSSLEDGLDRLRSFCSRHSKPAAQGSAASVV

SEQ ID NO: 5666 - protein, 113 aa, Zea mays subsp. mays
  peptide (1)..(113): Ceres Seq. ID no. 12409401
MPKQTDGVHVRNGETGPVLPAGDRRRHGLLLPARQGRIGGCSARACCGMRGLAPDHLRHRSVLSRRRPGQAQVLLLATQQAGGTGFCCLCSLVVSVRGSEALHVLETMKFGSI

SEQ ID NO: 5667 - protein, 104 aa, Zea mays subsp. mays
  peptide (1)..(104): Ceres Seq. ID no. 12409402
  misc_feature (1)..(88): Pfam Name: Aminotransferase class I and II Pfam Description: Aminotransferase class I and II
  misc_feature (1)..(92): Homolog of NCBI NO: 27525396 NR Description: tyrosine aminotransferase [Solenostemon
  misc_feature (1)..(93): Homolog of NCBI NO: 15239521 NR Description: tyrosine aminotransferase; protein id: [Arabidopsis thaliana] >gi|10177259|dbj|BAB10727.1| tyrosine [Arabidopsis thaliana] >gi|25054842|gb|AAN71911.1| putative
  misc_feature (1)..(93): Homolog of NCBI NO: 23397279 NR Description: putatative tyrosine aminotransferase [Arabidopsis
  misc_feature (1)..(93): Homolog of NCBI NO: 8777301 NR Description: tyrosine aminotransferase-like protein
  misc_feature (1)..(93): Homolog of NCBI NO: 11527941 NR Description: ROOTY/SUPERROOT1 [Arabidopsis thaliana]
  misc_feature (1)..(93): Homolog of NCBI NO: 11527943 NR Description: ROOTY/SUPERROOT1 [Arabidopsis thaliana]
  misc_feature (1)..(93): Homolog of NCBI NO: 15225387 NR Description: putative tyrosine aminotransferase; protein id: supported by cDNA: gi_11527938, supported by cDNA: gi_11527940,
  misc_feature (1)..(93): Homolog of NCBI NO: 15809874 NR Description: At2g20610/F23N11.7 [Arabidopsis thaliana]
  misc_feature (1)..(103): Homolog of NCBI NO: 15224631 NR Description: putative tyrosine aminotransferase; protein id: supported by cDNA: 14570. [Arabidopsis thaliana]
  misc_feature (1)..(103): Homolog of NCBI NO: 21553462 NR Description: putative tyrosine aminotransferase [Arabidopsis
MCWEKLKGVNGIACPSRPMGSMFVMVKLDLSCLQGIEDDMDFCCRLAKEESVVVLPGRVVGCEDWLRITFAIDPSSLEDGLDRLRSFCSRHSKPAAQGSAASVV

SEQ ID NO: 5668 - DNA, 1343 bp, Zea mays subsp. mays
  misc_feature (1)..(1343): Ceres Seq. ID no. 12409395
  misc_feature: MA Experiment ID: 108522 Result: Down-regulated in Transcription
  misc_feature: MA Experiment 108522 PARAMETER Experiment Name: Zm_42deg_Heat_P Parameter: Age (day) Value: 8
  misc_feature: MA Experiment 108522 PARAMETER Experiment Name: Zm_42deg_Heat_P Parameter: Organism Value: Zea mays
  misc_feature: MA Experiment 108522 PARAMETER Experiment Name: Zm_42deg_Heat_P Parameter: Plant Line Value: 35A19
  misc_feature: MA Experiment 108522 PARAMETER Experiment Name: Zm_42deg_Heat_P Parameter: Temperature (deg C) Value: 42 vs. 22
  misc_feature: MA Experiment 108522 PARAMETER Experiment Name: Zm_42deg_Heat_P Parameter: Timepoint (hr) Value: 1
  misc_feature: MA Experiment 108522 PARAMETER Experiment Name: Zm_42deg_Heat_P Parameter: Tissue Value: Aerial
  misc_feature: MA Experiment ID: 108533 Result: Down-regulated in Transcription
  misc_feature: MA Experiment 108533 PARAMETER Experiment Name: Zm_4deg_Cold_P Parameter: Age (hr) Value: 8
  misc_feature: MA Experiment 108533 PARAMETER Experiment Name: Zm_4deg_Cold_P Parameter: Organism Value: Zea mays
  misc_feature: MA Experiment 108533 PARAMETER Experiment Name: Zm_4deg_Cold_P Parameter: Plant Line Value: 35A19
  misc_feature: MA Experiment 108533 PARAMETER Experiment Name: Zm_4deg_Cold_P Parameter: Temperature (deg C) Value: 4 vs. 22
  misc_feature: MA Experiment 108533 PARAMETER Experiment Name: Zm_4deg_Cold_P Parameter: Timepoint (hr) Value: 1
  misc_feature: MA Experiment 108533 PARAMETER Experiment Name: Zm_4deg_Cold_P Parameter: Tissue Value: Aerial
  misc_feature: MA Experiment ID: 108543 Result: Down-regulated in Transcription
  misc_feature: MA Experiment ID: 108599 Result: Up-regulated in Transcription
  misc_feature: MA Experiment 108599 PARAMETER Experiment Name: Zm_RT1_P Parameter: Age (day) Value: 11
  misc_feature: MA Experiment 108599 PARAMETER Experiment Name: Zm_RT1_P Parameter: Organism Value: Zea mays
  misc_feature: MA Experiment 108599 PARAMETER Experiment Name: Zm_RT1_P Parameter: Plant Line Value: rt1 mut vs. rt1 wt
  misc_feature: MA Experiment 108599 PARAMETER Experiment Name: Zm_RT1_P Parameter: Tissue Value: Roots
  misc_feature: MA Experiment ID: 108687 Result: Up-regulated in Transcription
  misc_feature: MA Experiment 108687 PARAMETER Experiment Name: Zm_Embryos-Flowers__P Parameter: Tissue Value: Embryo vs. Aerial+
  misc_feature: MA Experiment ID: 20000487 Result: Up-regulated in Transcription
  misc_feature: MA Experiment 20000487 PARAMETER Experiment Name: Zm_50mM_NH4NO3_L_to_H_P Parameter: Organism Value: Zea mays
  misc_feature: MA Experiment 20000487 PARAMETER Experiment Name: Zm_50mM_NH4NO3_L_to_H_P Parameter: Timepoint (hr) Value: 4
  misc_feature: MA Experiment 20000487 PARAMETER Experiment Name: Zm_50mM_NH4NO3_L_to_H_P Parameter: Tissue Value: Leaves
  misc_feature: MA Experiment 20000487 PARAMETER Experiment Name: Zm_50mM_NH4NO3_L_to_H_P Parameter: Treatment Value: 50mM NH4NO3 vs. 100mM Mannitol
  misc_feature: MA Experiment ID: 20000488 Result: Up-regulated in Transcription
  misc_feature: MA Experiment 20000488 PARAMETER Experiment Name: Zm_50mM_NH4NO3_L_to_H_P Parameter: Organism Value: Zea mays
  misc_feature: MA Experiment 20000488 PARAMETER Experiment Name: Zm_50mM_NH4NO3_L_to_H_P Parameter: Timepoint (hr) Value: 8
  misc_feature: MA Experiment 20000488 PARAMETER Experiment Name: Zm_50mM_NH4NO3_L_to_H_P Parameter: Tissue Value: Leaves
  misc_feature: MA Experiment 20000488 PARAMETER Experiment Name: Zm_50mM_NH4NO3_L_to_H_P Parameter: Treatment Value: 50mM NH4NO3 vs. 100mM Mannitol
  misc_feature: MA Experiment ID: 20001614 Result: Up-regulated in Transcription
  misc_feature: MA Experiment 20001614 PARAMETER Experiment Name: Zm_50ppm_KNO3_L-to-H_P Parameter: Age (day) Value: 21
  misc_feature: MA Experiment 20001614 PARAMETER Experiment Name: Zm_50ppm_KNO3_L-to-H_P Parameter: Organism Value: Zea mays
  misc_feature: MA Experiment 20001614 PARAMETER Experiment Name: Zm_50ppm_KNO3_L-to-H_P Parameter: Plant Line Value: 35A19
  misc_feature: MA Experiment 20001614 PARAMETER Experiment Name: Zm_50ppm_KNO3_L-to-H_P Parameter: Timepoint (hr) Value: 48
  misc_feature: MA Experiment 20001614 PARAMETER Experiment Name: Zm_50ppm_KNO3_L-to-H_P Parameter: Tissue Value: Roots
  misc_feature: MA Experiment 20001614 PARAMETER Experiment Name: Zm_50ppm_KNO3_L-to-H_P Parameter: Treatment Value: 50ppm KNO3 vs. 50ppm KCl
agttcccatccgccgcccgcgcacttgttccttccggcacagcacacaggacaccgtagacagattcatcgcgacgatggggctggacgtcgtggagatcgggatgggcgccgatttgagcctggatctgaggcacttcgcctccaaggccgtgcggcagagcaaggactacgcgccggcgccggcgccggacatggacgcctgcatccgccgcctcgaggaggagcggggcaagatcgagatgttcaagcgggagctgccgctctgcgcgcgcctcctcgcagacgtgatcgatgtgatgaaggaggaagcggggaaggcggtggcggaggaggacggcgccgccggggacaagagcaagtggatgagcacggcgcagctctggacgggcgattgcggccgcgaggacgcggaaccagagaagcaagacaaggagaggagctcgcctgaggccaggtctcgcgccgccggcggcgctttcttgccgctcaaggctgccgtgggctccggcgcgccggcgttcgcgccgctcggcttgagaatggacgacaaggccgccgcgcgcgccgggatgcccgacctgtgcttgctgtcgccgccggcgaccaagagcgccgccgaggagagccgacgccaggtggtggggtttgcgcaggcggcgacgagggcggccgccgccacggcgccagctgccccttcgcttagcgttggcgtccagtccccgtcgcagcaggcgaggaaggctcggcgttgctggtccacggagctgcatcgccagttcgtcgccgccttgaaccagctcggtggcccccaagttgccaccccaaagcagatcagggagctgatgaaggtggacggcctcacaaacgacgaagtgaaaagccaccttcagaaataccggctgcacaaccggagggcgccagggtccggcgtggtgagccagcccatcgtgctggtgggagggctgtggattccgcaggagcaaagcagctcgcagtccgggtctcccccacggcccgctccacttctccacctcaggcatcgcagtctcgtcggcggccaccgtcagctgcgaggaggaagacggacggtccgagagctatggctggaaatgatgcagaggctgctgctgctgctgctgctgagaggggagctgcagcctcaggaacgggaatcatcaggagggaaactgagagtagtgtagctgtctgtacacatacatagttacattacattacatacagggagtgagggagatcgggccttgagcgctcgagaccaaactgatgcttcgggtttgtacatcccaaagagatgagatgatacagttttgcggctaatcc

SEQ ID NO: 5669 - protein, 400 aa, Zea mays subsp. mays
  peptide (1)..(400): Ceres Seq. ID no. 12409396
  misc_feature (26)..(353): Homolog of NCBI NO: 33146555 NR Description: putative cytoskeletal protein-like protein [Oryza
  misc_feature (26)..(353): Homolog of NCBI NO: 34915398 NR Description: contains ESTs
  misc_feature (97)..(334): Homolog of NCBI NO: 34910306 NR Description: P0013F10.12 [Oryza sativa (japonica
  misc_feature (37)..(115): Homolog of NCBI NO: 34910306 NR Description: P0013F10.12 [Oryza sativa (japonica
  misc_feature (65)..(352): Homolog of NCBI NO: 18395562 NR Description: expressed protein; protein id: At2g03500.1, by cDNA: gi_16974543 [Arabidopsis thaliana] At2g03500/T4M8.7 [Arabidopsis thaliana]
  misc_feature (64)..(179): Homolog of NCBI NO: 18419989 NR Description: putative cytoskeletal protein; protein id:
  misc_feature (239)..(307): Homolog of NCBI NO: 18419989 NR Description: putative cytoskeletal protein; protein id:
  misc_feature (65)..(352): Homolog of NCBI NO: 25411014 NR Description: hypothetical protein At2g03500 [imported] -
  misc_feature (246)..(331): Homolog of NCBI NO: 18404660 NR Description: expressed protein; protein id: At3g25790.1, by cDNA: 157740. [Arabidopsis thaliana] gb|AAD49976.1~gene_id:K13N2.13~similar to unknown protein
  misc_feature (246)..(331): Homolog of NCBI NO: 21553699 NR Description: unknown [Arabidopsis thaliana]
VPIRRPRTCSFRHSTQDTVDRFIATMGLDVVEIGMGADLSLDLRHFASKAVRQSKDYAPAPAPDMDACIRRLEEERGKIEMFKRELPLCARLLADVIDVMKEEAGKAVAEEDGAAGDKSKWMSTAQLWTGDCGREDAEPEKQDKERSSPEARSRAAGGAFLPLKAAVGSGAPAFAPLGLRMDDKAAARAGMPDLCLLSPPATKSAAEESRRQVVGFAQAATRAAAATAPAAPSLSVGVQSPSQQARKARRCWSTELHRQFVAALNQLGGPQVATPKQIRELMKVDGLTNDEVKSHLQKYRLHNRRAPGSGVVSQPIVLVGGLWIPQEQSSSQSGSPPRPAPLLHLRHRSLVGGHRQLRGGRRTVRELWLEMMQRLLLLLLLRGELQPQERESSGGKLRVV

SEQ ID NO: 5670 - protein, 375 aa, Zea mays subsp. mays
  peptide (1)..(375): Ceres Seq. ID no. 12409397
  misc_feature (1)..(328): Homolog of NCBI NO: 34915398 NR Description: contains ESTs
  misc_feature (72)..(309): Homolog of NCBI NO: 34910306 NR Description: P0013F10.12 [Oryza sativa (japonica
  misc_feature (12)..(90): Homolog of NCBI NO: 34910306 NR Description: P0013F10.12 [Oryza sativa (japonica
  misc_feature (40)..(327): Homolog of NCBI NO: 18395562 NR Description: expressed protein; protein id: At2g03500.1, by cDNA: gi_16974543 [Arabidopsis thaliana] At2g03500/T4M8.7 [Arabidopsis thaliana]
  misc_feature (39)..(154): Homolog of NCBI NO: 18419989 NR Description: putative cytoskeletal protein; protein id:
  misc_feature (214)..(282): Homolog of NCBI NO: 18419989 NR Description: putative cytoskeletal protein; protein id:
  misc_feature (40)..(327): Homolog of NCBI NO: 25411014 NR Description: hypothetical protein At2g03500 [imported] -
  misc_feature (221)..(306): Homolog of NCBI NO: 18404660 NR Description: expressed protein; protein id: At3g25790.1, by cDNA: 157740. [Arabidopsis thaliana] gb|AAD49976.1~gene_id:K13N2.13~similar to unknown protein
  misc_feature (221)..(306): Homolog of NCBI NO: 21553699 NR Description: unknown [Arabidopsis thaliana]
  misc_feature (1)..(328): Homolog of NCBI NO: 33146555 NR Description: putative cytoskeletal protein-like protein [Oryza
MGLDVVEIGMGADLSLDLRHFASKAVRQSKDYAPAPAPDMDACIRRLEEERGKIEMFKRELPLCARLLADVIDVMKEEAGKAVAEEDGAAGDKSKWMSTAQLWTGDCGREDAEPEKQDKERSSPEARSRAAGGAFLPLKAAVGSGAPAFAPLGLRMDDKAAARAGMPDLCLLSPPATKSAAEESRRQVVGFAQAATRAAAATAPAAPSLSVGVQSPSQQARKARRCWSTELHRQFVAALNQLGGPQVATPKQIRELMKVDGLTNDEVKSHLQKYRLHNRRAPGSGVVSQPIVLVGGLWIPQEQSSSQSGSPPRPAPLLHLRHRSLVGGHRQLRGGRRTVRELWLEMMQRLLLLLLLRGELQPQERESSGGKLRVV

SEQ ID NO: 5671 - protein, 366 aa, Zea mays subsp. mays
  peptide (1)..(366): Ceres Seq. ID no. 12409398
  misc_feature (1)..(319): Homolog of NCBI NO: 33146555 NR Description: putative cytoskeletal protein-like protein [Oryza
  misc_feature (1)..(319): Homolog of NCBI NO: 34915398 NR Description: contains ESTs
  misc_feature (63)..(300): Homolog of NCBI NO: 34910306 NR Description: P0013F10.12 [Oryza sativa (japonica
  misc_feature (3)..(81): Homolog of NCBI NO: 34910306 NR Description: P0013F10.12 [Oryza sativa (japonica
  misc_feature (31)..(318): Homolog of NCBI NO: 18395562 NR Description: expressed protein; protein id: At2g03500.1, by cDNA: gi_16974543 [Arabidopsis thaliana] At2g03500/T4M8.7 [Arabidopsis thaliana]
  misc_feature (30)..(145): Homolog of NCBI NO: 18419989 NR Description: putative cytoskeletal protein; protein id:
  misc_feature (205)..(273): Homolog of NCBI NO: 18419989 NR Description: putative cytoskeletal protein; protein id:
  misc_feature (31)..(318): Homolog of NCBI NO: 25411014 NR Description: hypothetical protein At2g03500 [imported] -
  misc_feature (212)..(297): Homolog of NCBI NO: 18404660 NR Description: expressed protein; protein id: At3g25790.1, by cDNA: 157740. [Arabidopsis thaliana] gb|AAD49976.1~gene_id:K13N2.13~similar to unknown protein
  misc_feature (212)..(297): Homolog of NCBI NO: 21553699 NR Description: unknown [Arabidopsis thaliana]
MGADLSLDLRHFASKAVRQSKDYAPAPAPDMDACIRRLEEERGKIEMFKRELPLCARLLADVIDVMKEEAGKAVAEEDGAAGDKSKWMSTAQLWTGDCGREDAEPEKQDKERSSPEARSRAAGGAFLPLKAAVGSGAPAFAPLGLRMDDKAAARAGMPDLCLLSPPATKSAAEESRRQVVGFAQAATRAAAATAPAAPSLSVGVQSPSQQARKARRCWSTELHRQFVAALNQLGGPQVATPKQIRELMKVDGLTNDEVKSHLQKYRLHNRRAPGSGVVSQPIVLVGGLWIPQEQSSSQSGSPPRPAPLLHLRHRSLVGGHRQLRGGRRTVRELWLEMMQRLLLLLLLRGELQPQERESSGGKLRVV

SEQ ID NO: 5672 - DNA, 1857 bp, Zea mays subsp. mays
  misc_feature (1)..(1857): Ceres Seq. ID no. 12413145
  misc_feature: MA Experiment ID: 20000534 Result: Down-regulated in Transcription
  misc_feature: MA Experiment 20000534 PARAMETER Experiment Name: Zm_Hybrid_Pollen_P Parameter: Age (day) Value: 8
  misc_feature: MA Experiment 20000534 PARAMETER Experiment Name: Zm_Hybrid_Pollen_P Parameter: Organism Value: Zea mays
  misc_feature: MA Experiment 20000534 PARAMETER Experiment Name: Zm_Hybrid_Pollen_P Parameter: Plant Line Value: 35A19
  misc_feature: MA Experiment 20000534 PARAMETER Experiment Name: Zm_Hybrid_Pollen_P Parameter: Tissue Value: Pollen vs. Aerial
accaaattcccctaacccgtcggtctgctatcccatctgagctcacggcgatcctctttctcctcatcggcatgagcggcttcttggcggtggtcggcaaggtcggcacctttctgctgtgggtgctgttcctggtcttgcagaccgccaccaggatcgtcggcagcctccttgccagctcagctgagcagcaggatgaccaccatcaggaatcggcggcggcacggcgcaggtcgccgccagcctccccacatcccgaactttacgagccggcgtctgcgtcgctggcgcagctgtgggacccaccgccacttccgcaccttgcttttgctcccgctgcggatgagagctcttcgtcctccagcttacggcggcgtgccagtgcgccgctgccccgagcggatgaagactttgtggtgccatcgagcgcttactcgcgtccaacagtgggggtggctcatacacactctgtgtcagcaccaccactgagggcaatcgagacgcgggcggtgccatctaggctggtgacagccgggggtaagcggccaaggctggagaggaagtactccaagattgttgaccagtaccgatccttggatgaggttattgaagcattagcacaggctggtcttgagtcttctaatttgatcataggaattgatttcacaaagagtaatgaatggacaggaaagaattgcttcaatggtatcagcctgcataatatcagtgacaacccaaatccttatgaacaggcaatatccatcattgggaaaaccttatctgcttttgatgaggataatttaattccttgctttggttttggagacgcatctactcatgaccaagatgtatttgccttctatcctgatgaaagaccatgcaatggttttcaagaagctttagctcgatacagagagattgtacctcatcttcgcctttcgggtcctacatcattcgccccaataattgacatggccacaaccattgtggagcaaagtggtggccaataccatgttttagtaattattgctgacgggcaggtcacaagaagtgtagatactgaatttggtcagttaagcacccaggagcaaatgacagttgatgctattgtacaagcaagccaattcccattgtctataattcttgttggagttggagatggtccatgggatatgatgaaggaatttgatgacaatataccagctaggtcttttgacaatttccagtttgtcaacttcactgcgatcatgtcaaaaaagataagtcaaagcaaaaaggagacagagttcgccctttcagcactaatggaaattccattgcaatacaaggcaacattagagcttggaattttaggacgtcgaattggagagtcacctgagcggattccacttcctcctccttttgcaagttatagcacagtttcaagagcagaaccatctcgggcaaatagttatcgaagtgtgccttcacatccaagggaggagccagctgtaaattcaactatcacagcatcagttacatccccatcagctgccgaaagtagagttttagaaccccagatgtgcccagtttgcctttccaaaccccgggacatggcatttggttgtggccaccagacatgttcagaatgtggaccgcaagtcacagattgccccatctgtcgaaggcccattgacacgagagtaaaattctactaattatttttgggtggaactaggtttaactgaagcacatgccaggagtagaatccactaaaataaatctctatttgactgttaacgatgtagtgtgaattaatttaataaatcagacgtagagaaaaggaggatacttgttctttgcttgtatcctgttcct

SEQ ID NO: 5673 - protein, 564 aa, Zea mays subsp. mays
  peptide (1)..(564): Ceres Seq. ID no. 12413146
  misc_feature (112)..(564): Homolog of NCBI NO: 15241400 NR Description: putative protein; protein id: At5g14420.1, by cDNA: gi_20466261 [Arabidopsis thaliana]
  misc_feature (59)..(499): Homolog of NCBI NO: 15232157 NR Description: unknown protein; protein id: At3g01650.1 thaliana] >gi|6016736|gb|AAF01562.1|AC009325_32 unknown protein
  misc_feature (478)..(564): Homolog of NCBI NO: 15232157 NR Description: unknown protein; protein id: At3g01650.1 thaliana] >gi|6016736|gb|AAF01562.1|AC009325_32 unknown protein
  misc_feature (128)..(552): Homolog of NCBI NO: 20804894 NR Description: P0497A05.19 [Oryza sativa (japonica
  misc_feature (169)..(564): Homolog of NCBI NO: 18408863 NR Description: F12A21.7; protein id: At1g67800.1, supported by
  misc_feature (169)..(564): Homolog of NCBI NO: 30697566 NR Description: copine-related [Arabidopsis thaliana]
  misc_feature (153)..(494): Homolog of NCBI NO: 18481708 NR Description: hypothetical protein [Sorghum bicolor]
  misc_feature (479)..(562): Homolog of NCBI NO: 18481708 NR Description: hypothetical protein [Sorghum bicolor]
  misc_feature (185)..(482): Homolog of NCBI NO: 18412353 NR Description: expressed protein; protein id: At1g79380.1, by cDNA: gi_13937148 [Arabidopsis thaliana]
  misc_feature (495)..(564): Homolog of NCBI NO: 18412353 NR Description: expressed protein; protein id: At1g79380.1, by cDNA: gi_13937148 [Arabidopsis thaliana]
QIPLTRRSAIPSELTAILFLLIGMSGFLAVVGKVGTFLLWVLFLVLQTATRIVGSLLASSAEQQDDHHQESAAARRRSPPASPHPELYEPASASLAQLWDPPPLPHLAFAPAADESSSSSSLRRRASAPLPRADEDFVVPSSAYSRPTVGVAHTHSVSAPPLRAIETRAVPSRLVTAGGKRPRLERKYSKIVDQYRSLDEVIEALAQAGLESSNLIIGIDFTKSNEWTGKNCFNGISLHNISDNPNPYEQAISIIGKTLSAFDEDNLIPCFGFGDASTHDQDVFAFYPDERPCNGFQEALARYREIVPHLRLSGPTSFAPIIDMATTIVEQSGGQYHVLVIIADGQVTRSVDTEFGQLSTQEQMTVDAIVQASQFPLSIILVGVGDGPWDMMKEFDDNIPARSFDNFQFVNFTAIMSKKISQSKKETEFALSALMEIPLQYKATLELGILGRRIGESPERIPLPPPFASYSTVSRAEPSRANSYRSVPSHPREEPAVNSTITASVTSPSAAESRVLEPQMCPVCLSKPRDMAFGCGHQTCSECGPQVTDCPICRRPIDTRVKFY

SEQ ID NO: 5674 - protein, 541 aa, Zea mays subsp. mays
  peptide (1)..(541): Ceres Seq. ID no. 12413147
  misc_feature (89)..(541): Homolog of NCBI NO: 15241400 NR Description: putative protein; protein id: At5g14420.1, by cDNA: gi_20466261 [Arabidopsis thaliana]
  misc_feature (36)..(476): Homolog of NCBI NO: 15232157 NR Description: unknown protein; protein id: At3g01650.1 thaliana] >gi|6016736|gb|AAF01562.1|AC009325_32 unknown protein
  misc_feature (455)..(541): Homolog of NCBI NO: 15232157 NR Description: unknown protein; protein id: At3g01650.1 thaliana] >gi|6016736|gb|AAF01562.1|AC009325_32 unknown protein
  misc_feature (105)..(529): Homolog of NCBI NO: 20804894 NR Description: P0497A05.19 [Oryza sativa (japonica
  misc_feature (146)..(541): Homolog of NCBI NO: 18408863 NR Description: F12A21.7; protein id: At1g67800.1, supported by
  misc_feature (146)..(541): Homolog of NCBI NO: 30697566 NR Description: copine-related [Arabidopsis thaliana]
  misc_feature (130)..(471): Homolog of NCBI NO: 18481708 NR Description: hypothetical protein [Sorghum bicolor]
  misc_feature (456)..(539): Homolog of NCBI NO: 18481708 NR Description: hypothetical protein [Sorghum bicolor]
  misc_feature (162)..(459): Homolog of NCBI NO: 18412353 NR Description: expressed protein; protein id: At1g79380.1, by cDNA: gi_13937148 [Arabidopsis thaliana]
  misc_feature (472)..(541): Homolog of NCBI NO: 18412353 NR Description: expressed protein; protein id: At1g79380.1, by cDNA: gi_13937148 [Arabidopsis thaliana]
MSGFLAVVGKVGTFLLWVLFLVLQTATRIVGSLLASSAEQQDDHHQESAAARRRSPPASPHPELYEPASASLAQLWDPPPLPHLAFAPAADESSSSSSLRRRASAPLPRADEDFVVPSSAYSRPTVGVAHTHSVSAPPLRAIETRAVPSRLVTAGGKRPRLERKYSKIVDQYRSLDEVIEALAQAGLESSNLIIGIDFTKSNEWTGKNCFNGISLHNISDNPNPYEQAISIIGKTLSAFDEDNLIPCFGFGDASTHDQDVFAFYPDERPCNGFQEALARYREIVPHLRLSGPTSFAPIIDMATTIVEQSGGQYHVLVIIADGQVTRSVDTEFGQLSTQEQMTVDAIVQASQFPLSIILVGVGDGPWDMMKEFDDNIPARSFDNFQFVNFTAIMSKKISQSKKETEFALSALMEIPLQYKATLELGILGRRIGESPERIPLPPPFASYSTVSRAEPSRANSYRSVPSHPREEPAVNSTITASVTSPSAAESRVLEPQMCPVCLSKPRDMAFGCGHQTCSECGPQVTDCPICRRPIDTRVKFY

SEQ ID NO: 5675 - DNA, 1867 bp, Zea mays subsp. mays
  misc_feature (1)..(1867): Ceres Seq. ID no. 12376488
  misc_feature: MA Experiment ID: 108522 Result: Up-regulated in Transcription
  misc_feature: MA Experiment 108522 PARAMETER Experiment Name: Zm_42deg_Heat_P Parameter: Age (day) Value: 8
  misc_feature: MA Experiment 108522 PARAMETER Experiment Name: Zm_42deg_Heat_P Parameter: Organism Value: Zea mays
  misc_feature: MA Experiment 108522 PARAMETER Experiment Name: Zm_42deg_Heat_P Parameter: Plant Line Value: 35A19
  misc_feature: MA Experiment 108522 PARAMETER Experiment Name: Zm_42deg_Heat_P Parameter: Temperature (deg C) Value: 42 vs. 22
  misc_feature: MA Experiment 108522 PARAMETER Experiment Name: Zm_42deg_Heat_P Parameter: Timepoint (hr) Value: 1
  misc_feature: MA Experiment 108522 PARAMETER Experiment Name: Zm_42deg_Heat_P Parameter: Tissue Value: Aerial
  misc_feature: MA Experiment ID: 108527 Result: Up-regulated in Transcription
  misc_feature: MA Experiment 108527 PARAMETER Experiment Name: Zm_5mM_NO_P Parameter: Age (day) Value: 8
  misc_feature: MA Experiment 108527 PARAMETER Experiment Name: Zm_5mM_NO_P Parameter: Organism Value: Zea mays
  misc_feature: MA Experiment 108527 PARAMETER Experiment Name: Zm_5mM_NO_P Parameter: Plant Line Value: 35A19
  misc_feature: MA Experiment 108527 PARAMETER Experiment Name: Zm_5mM_NO_P Parameter: Timepoint (hr) Value: 6
  misc_feature: MA Experiment 108527 PARAMETER Experiment Name: Zm_5mM_NO_P Parameter: Tissue Value: Aerial
  misc_feature: MA Experiment 108527 PARAMETER Experiment Name: Zm_5mM_NO_P Parameter: Treatment Value: 5mM NO vs. No Treatment
  misc_feature: MA Experiment ID: 108559 Result: Up-regulated in Transcription
  misc_feature: MA Experiment 108559 PARAMETER Experiment Name: Zm_5mM_NO_P Parameter: Age (day) Value: 8
  misc_feature: MA Experiment 108559 PARAMETER Experiment Name: Zm_5mM_NO_P Parameter: Organism Value: Zea mays
  misc_feature: MA Experiment 108559 PARAMETER Experiment Name: Zm_5mM_NO_P Parameter: Plant Line Value: 35A19
  misc_feature: MA Experiment 108559 PARAMETER Experiment Name: Zm_5mM_NO_P Parameter: Timepoint (hr) Value: 12
  misc_feature: MA Experiment 108559 PARAMETER Experiment Name: Zm_5mM_NO_P Parameter: Tissue Value: Aerial
  misc_feature: MA Experiment 108559 PARAMETER Experiment Name: Zm_5mM_NO_P Parameter: Treatment Value: 5mM NO vs. No Treatment
  misc_feature: MA Experiment ID: 20000534 Result: Down-regulated in Transcription
  misc_feature: MA Experiment 20000534 PARAMETER Experiment Name: Zm_Hybrid_Pollen_P Parameter: Age (day) Value: 8
  misc_feature: MA Experiment 20000534 PARAMETER Experiment Name: Zm_Hybrid_Pollen_P Parameter: Organism Value: Zea mays
  misc_feature: MA Experiment 20000534 PARAMETER Experiment Name: Zm_Hybrid_Pollen_P Parameter: Plant Line Value: 35A19
  misc_feature: MA Experiment 20000534 PARAMETER Experiment Name: Zm_Hybrid_Pollen_P Parameter: Tissue Value: Pollen vs. Aerial
ccctttcttctttggcttggcatctccacccttcctgagttccttccttcctcgcctggcgttcccaccccttgccacctcgcccgcttccggctcctcccccctcgcccgtcctgactctggtcgcggcggagccgtcagatctgggccacgggtgccagcccagccggcgggcggcgggacggagggctgcgggatgaagtcgtcgttgaggagccggcaggagccgcggcgggtcagcaacggcgtcatcatcggcgccatgctgctatccctctgcgtcctcagcatcgtcaaggccagatactgcgccacccccttcggcaaggccgaggaccagctccaggagcagatgaactccagcatccggatggagccggaggagtcgtcgccggccaggacgcccggagaggaggaggaggaggaggacgacggagagaatggggcgtcggccaccaccaccacggcgcccgcggtgacgaaaacgccggcggccgtcgcggccggcggcaacaggggcaagggcaagccgacgtgctacatgacgagcaagcgctcggagcggtgcgacgcgtccggtgacatccgtgtggacgggaaccgctccaccatctacgtcagcgggatagaccgggagtggaagaccaagccgtatgcgcgctaccacgacccggtcgccatggcccacgtccgcgagtacaccctcaagccgctcccggaggcggcgccggcgccggcgtgcacccggaaccactccgtcccgggttttctcttctccaacggcggcttctccggcaacctgtaccacgactacacggacgtgttggtgccgctgttcatcagcacgcaccagttccggggccgggtgcagttcctgctgagcgggatgaagccgtggtgggtggccaagttcacgcccttcttccggcagctgacccggtacgacgtcatcgacgtggacaacgaccaggaggtgcactgcttcccccggatcgtggtcggcgccaccttccacaaggacatgggcgtggacccgcggcggtcgccgggccacgtctccgtggtggacttcaagcgcgcgctgcgccgcgccttcggcctgccgcgcgaggccgccacgcgcggcggcgccacggggcgcggcaagccccgnntgctgatcatctcgcgccggggctcccggcggttcctgaacgagcgggagatggcgcgcgccgcggcgggagccgggttcgaggtgcgcgtggcggagcccgaccagcacacggacacggccgcgttcgcggcgctggtgaactcggcggacgtgatggtgggcgtgcacggcgccgggctgaccaacatggtgttcctgccccgcggcgccgtgctcgtccaggttgtgccgttcggcgggctggagtggctcacgggcgtcactttcaaggaccccgccgcggacatggaggtgagctacatgggctacgacgtgacgctggaggagagctcgctgatcgaccagtaccccaggaaccaccaggtgctcaccgacccctacgccgtgcacaagcagggctgggacgcgctcaaggcggcgtacctggacaagcagaacatccggatggatctcgacaggttcagggccacgctgagggaggccatgagccggttgccgccggctccgtgaccggccgccgtgccccggcccggaggtagataggttggtgtatctatcgtccccgttgtcatgctctcaacaagttgacttaatcttcttcttcttctccgtcccccctttttatttttattatgtcactagcaagattcttttggtccattgttttgttgtgttgtttactgctgctacataaggaatcaatctcatggg

SEQ ID NO: 5676 - protein, 554 aa, Zea mays subsp. mays
  peptide (1)..(554): Ceres Seq. ID no. 12376489
  misc_feature (67)..(551): Homolog of NCBI NO: 37535628 NR Description: unknown protein [Oryza sativa (japonica
  misc_feature (155)..(550): Homolog of NCBI NO: 34895350 NR Description: P0494A10.29 [Oryza sativa (japonica
  misc_feature (136)..(552): Homolog of NCBI NO: 34896984 NR Description: unknown protein [Oryza sativa]
  misc_feature (77)..(553): Homolog of NCBI NO: 34895346 NR Description: P0494A10.27 [Oryza sativa (japonica
  misc_feature (176)..(550): Homolog of NCBI NO: 15229594 NR Description: hypothetical protein; protein id: At3g18180.1 thaliana] >gi|9294074|dbj|BAB02031.1|
  misc_feature (176)..(550): Homolog of NCBI NO: 9294073 NR Description: emb|CAB68144.1~gene_id:MRC8.17~similar to unknown
  misc_feature (176)..(550): Homolog of NCBI NO: 30684813 NR Description: expressed protein [Arabidopsis thaliana]
  misc_feature (133)..(550): Homolog of NCBI NO: 34895342 NR Description: P0494A10.25 [Oryza sativa (japonica
  misc_feature (18)..(550): Homolog of NCBI NO: 34895340 NR Description: P0494A10.24 [Oryza sativa (japonica
  misc_feature (111)..(550): Homolog of NCBI NO: 34895336 NR Description: P0494A10.22 [Oryza sativa (japonica
  misc_feature (384)..(384): Xaa is any aa, unknown or other
  misc_feature (385)..(385): Xaa is any aa, unknown or other
PFFFGLASPPFLSSFLPRLAFPPLATSPASGSSPLARPDSGRGGAVRSGPRVPAQPAGGGTEGCGMKSSLRSRQEPRRVSNGVIIGAMLLSLCVLSIVKARYCATPFGKAEDQLQEQMNSSIRMEPEESSPARTPGEEEEEEDDGENGASATTTTAPAVTKTPAAVAAGGNRGKGKPTCYMTSKRSERCDASGDIRVDGNRSTIYVSGIDREWKTKPYARYHDPVAMAHVREYTLKPLPEAAPAPACTRNHSVPGFLFSNGGFSGNLYHDYTDVLVPLFISTHQFRGRVQFLLSGMKPWWVAKFTPFFRQLTRYDVIDVDNDQEVHCFPRIVVGATFHKDMGVDPRRSPGHVSVVDFKRALRRAFGLPREAATRGGATGRGKPXXLIISRRGSRRFLNEREMARAAAGAGFEVRVAEPDQHTDTAAFAALVNSADVMVGVHGAGLTNMVFLPRGAVLVQVVPFGGLEWLTGVTFKDPAADMEVSYMGYDVTLEESSLIDQYPRNHQVLTDPYAVHKQGWDALKAAYLDKQNIRMDLDRFRATLREAMSRLPPAP

SEQ ID NO: 5677 - protein, 489 aa, Zea mays subsp. mays
  peptide (1)..(489): Ceres Seq. ID no. 12376490
  misc_feature (2)..(486): Homolog of NCBI NO: 37535628 NR Description: unknown protein [Oryza sativa (japonica
  misc_feature (90)..(485): Homolog of NCBI NO: 34895350 NR Description: P0494A10.29 [Oryza sativa (japonica
  misc_feature (71)..(487): Homolog of NCBI NO: 34896984 NR Description: unknown protein [Oryza sativa]
  misc_feature (12)..(488): Homolog of NCBI NO: 34895346 NR Description: P0494A10.27 [Oryza sativa (japonica
  misc_feature (111)..(485): Homolog of NCBI NO: 15229594 NR Description: hypothetical protein; protein id: At3g18180.1 thaliana] >gi|9294074|dbj|BAB02031.1|
  misc_feature (111)..(485): Homolog of NCBI NO: 9294073 NR Description: emb|CAB68144.1~gene_id:MRC8.17~similar to unknown
  misc_feature (111)..(485): Homolog of NCBI NO: 30684813 NR Description: expressed protein [Arabidopsis thaliana]
  misc_feature (68)..(485): Homolog of NCBI NO: 34895342 NR Description: P0494A10.25 [Oryza sativa (japonica
  misc_feature (1)..(485): Homolog of NCBI NO: 34895340 NR Description: P0494A10.24 [Oryza sativa (japonica
  misc_feature (46)..(485): Homolog of NCBI NO: 34895336 NR Description: P0494A10.22 [Oryza sativa (japonica
  misc_feature (319)..(319): Xaa is any aa, unknown or other
  misc_feature (320)..(320): Xaa is any aa, unknown or other
MKSSLRSRQEPRRVSNGVIIGAMLLSLCVLSIVKARYCATPFGKAEDQLQEQMNSSIRMEPEESSPARTPGEEEEEEDDGENGASATTTTAPAVTKTPAAVAAGGNRGKGKPTCYMTSKRSERCDASGDIRVDGNRSTIYVSGIDREWKTKPYARYHDPVAMAHVREYTLKPLPEAAPAPACTRNHSVPGFLFSNGGFSGNLYHDYTDVLVPLFISTHQFRGRVQFLLSGMKPWWVAKFTPFFRQLTRYDVIDVDNDQEVHCFPRIVVGATFHKDMGVDPRRSPGHVSVVDFKRALRRAFGLPREAATRGGATGRGKPXXLIISRRGSRRFLNEREMARAAAGAGFEVRVAEPDQHTDTAAFAALVNSADVMVGVHGAGLTNMVFLPRGAVLVQVVPFGGLEWLTGVTFKDPAADMEVSYMGYDVTLEESSLIDQYPRNHQVLTDPYAVHKQGWDALKAAYLDKQNIRMDLDRFRATLREAMSRLPPAP

SEQ ID NO: 5678 - protein, 467 aa, Zea mays subsp. mays
  peptide (1)..(467): Ceres Seq. ID no. 12376491
  misc_feature (1)..(464): Homolog of NCBI NO: 37535628 NR Description: unknown protein [Oryza sativa (japonica
  misc_feature (68)..(463): Homolog of NCBI NO: 34895350 NR Description: P0494A10.29 [Oryza sativa (japonica
  misc_feature (49)..(465): Homolog of NCBI NO: 34896984 NR Description: unknown protein [Oryza sativa]
  misc_feature (1)..(466): Homolog of NCBI NO: 34895346 NR Description: P0494A10.27 [Oryza sativa (japonica
  misc_feature (89)..(463): Homolog of NCBI NO: 15229594 NR Description: hypothetical protein; protein id: At3g18180.1 thaliana] >gi|9294074|dbj|BAB02031.1|
  misc_feature (89)..(463): Homolog of NCBI NO: 9294073 NR Description: emb|CAB68144.1~gene_id:MRC8.17~similar to unknown
  misc_feature (89)..(463): Homolog of NCBI NO: 30684813 NR Description: expressed protein [Arabidopsis thaliana]
  misc_feature (46)..(463): Homolog of NCBI NO: 34895342 NR Description: P0494A10.25 [Oryza sativa (japonica
  misc_feature (1)..(463): Homolog of NCBI NO: 34895340 NR Description: P0494A10.24 [Oryza sativa (japonica
  misc_feature (24)..(463): Homolog of NCBI NO: 34895336 NR Description: P0494A10.22 [Oryza sativa (japonica
  misc_feature (297)..(297): Xaa is any aa, unknown or other
  misc_feature (298)..(298): Xaa is any aa, unknown or other
MLLSLCVLSIVKARYCATPFGKAEDQLQEQMNSSIRMEPEESSPARTPGEEEEEEDDGENGASATTTTAPAVTKTPAAVAAGGNRGKGKPTCYMTSKRSERCDASGDIRVDGNRSTIYVSGIDREWKTKPYARYHDPVAMAHVREYTLKPLPEAAPAPACTRNHSVPGFLFSNGGFSGNLYHDYTDVLVPLFISTHQFRGRVQFLLSGMKPWWVAKFTPFFRQLTRYDVIDVDNDQEVHCFPRIVVGATFHKDMGVDPRRSPGHVSVVDFKRALRRAFGLPREAATRGGATGRGKPXXLIISRRGSRRFLNEREMARAAAGAGFEVRVAEPDQHTDTAAFAALVNSADVMVGVHGAGLTNMVFLPRGAVLVQVVPFGGLEWLTGVTFKDPAADMEVSYMGYDVTLEESSLIDQYPRNHQVLTDPYAVHKQGWDALKAAYLDKQNIRMDLDRFRATLREAMSRLPPAP

SEQ ID NO: 5679 - DNA, 1315 bp, Zea mays subsp. mays
  misc_feature (1)..(1315): Ceres Seq. ID no. 12409386
  misc_feature: MA Experiment ID: 108528 Result: Down-regulated in Transcription
  misc_feature: MA Experiment 108528 PARAMETER Experiment Name: Zm_Imbibed_Seeds_P Parameter: Age (day) Value: 5 vs. 2
  misc_feature: MA Experiment 108528 PARAMETER Experiment Name: Zm_Imbibed_Seeds_P Parameter: Organism Value: Zea mays
  misc_feature: MA Experiment 108528 PARAMETER Experiment Name: Zm_Imbibed_Seeds_P Parameter: Plant Line Value: 35A19
  misc_feature: MA Experiment 108528 PARAMETER Experiment Name: Zm_Imbibed_Seeds_P Parameter: Tissue Value: Aerial vs. Embryo
  misc_feature: MA Experiment ID: 108556 Result: Up-regulated in Transcription
  misc_feature: MA Experiment 108556 PARAMETER Experiment Name: Zm_Drought_P Parameter: Age (day) Value: 9
  misc_feature: MA Experiment 108556 PARAMETER Experiment Name: Zm_Drought_P Parameter: Organism Value: Zea mays
  misc_feature: MA Experiment 108556 PARAMETER Experiment Name: Zm_Drought_P Parameter: Plant Line Value: 35A19
  misc_feature: MA Experiment 108556 PARAMETER Experiment Name: Zm_Drought_P Parameter: Timepoint (hr) Value: 24
  misc_feature: MA Experiment 108556 PARAMETER Experiment Name: Zm_Drought_P Parameter: Tissue Value: Aerial
  misc_feature: MA Experiment 108556 PARAMETER Experiment Name: Zm_Drought_P Parameter: Treatment Value: Drought vs. No Drought
  misc_feature: MA Experiment ID: 20000478 Result: Up-regulated in Transcription
  misc_feature: MA Experiment 20000478 PARAMETER Experiment Name: Zm_5mM_SA_P Parameter: Age (day) Value: 11
  misc_feature: MA Experiment 20000478 PARAMETER Experiment Name: Zm_5mM_SA_P Parameter: Organism Value: Zea mays
  misc_feature: MA Experiment 20000478 PARAMETER Experiment Name: Zm_5mM_SA_P Parameter: Plant Line Value: 35A19
  misc_feature: MA Experiment 20000478 PARAMETER Experiment Name: Zm_5mM_SA_P Parameter: Timepoint (hr) Value: 72
  misc_feature: MA Experiment 20000478 PARAMETER Experiment Name: Zm_5mM_SA_P Parameter: Tissue Value: Aerial
  misc_feature: MA Experiment 20000478 PARAMETER Experiment Name: Zm_5mM_SA_P Parameter: Treatment Value: 5mM SA vs. No Treatment
  misc_feature: MA Experiment ID: 20000479 Result: Up-regulated in Transcription
  misc_feature: MA Experiment 20000479 PARAMETER Experiment Name: Zm_Drought_P Parameter: Age (day) Value: 10
  misc_feature: MA Experiment 20000479 PARAMETER Experiment Name: Zm_Drought_P Parameter: Organism Value: Zea mays
  misc_feature: MA Experiment 20000479 PARAMETER Experiment Name: Zm_Drought_P Parameter: Plant Line Value: 35A19
  misc_feature: MA Experiment 20000479 PARAMETER Experiment Name: Zm_Drought_P Parameter: Timepoint (hr) Value: 48
  misc_feature: MA Experiment 20000479 PARAMETER Experiment Name: Zm_Drought_P Parameter: Tissue Value: Aerial
  misc_feature: MA Experiment 20000479 PARAMETER Experiment Name: Zm_Drought_P Parameter: Treatment Value: Drought vs. No Drought
  misc_feature: MA Experiment ID: 20000480 Result: Up-regulated in Transcription
  misc_feature: MA Experiment 20000480 PARAMETER Experiment Name: Zm_Drought_P Parameter: Age (day) Value: 11
  misc_feature: MA Experiment 20000480 PARAMETER Experiment Name: Zm_Drought_P Parameter: Organism Value: Zea mays
  misc_feature: MA Experiment 20000480 PARAMETER Experiment Name: Zm_Drought_P Parameter: Plant Line Value: 35A19
  misc_feature: MA Experiment 20000480 PARAMETER Experiment Name: Zm_Drought_P Parameter: Timepoint (hr) Value: 72
  misc_feature: MA Experiment 20000480 PARAMETER Experiment Name: Zm_Drought_P Parameter: Tissue Value: Aerial
  misc_feature: MA Experiment 20000480 PARAMETER Experiment Name: Zm_Drought_P Parameter: Treatment Value: Drought vs. No Drought
aatctgacatctcatcttgatccatccagctttgcctcgatcgccggccggtagccatgtcccccacggaagaagccgctggtggtggtctcgacgactatgaccgcttgagcgagctgaaggcgttcgacgacagcaaggccggcgtcaagggcctcgtggacgctggcgtcacgaccatccctgccatcttccgcggccatctccttcaggaagggccgaaggtatcgtcctctagcagtagcagcagtactagtcttagcattatcccggtcatcgacctctcggcggcggacgcagtcgcacgggaggaggtggtcgcccagttgaaggctgcagccgagacggtggggttcttccagctggtgaaccacggcgttcccagcgagctcctgtccgagatgctggcgtcggtgaggcggttcaacgaggagccccacgaggtgaagcggccctactacacgcgggacgcacgtcgcaaggtgcggttcaactccaacttcgatctgttccagtcgccggcggccaactggcgcgacacgctcttctgcgaggcagcgccggagccgccgcgggcggaggagctgccggtcgccgtcaggcacgtgatgctggagtacggcggcgcggtgcgggaggtggcggcgcgcgtgctggggctgctctcggaggccctggggctgagccccgggcacctcgcagggatggggtgcgcggagggcctcagcctggtgtgcaagtgtgcaactactacccgccgtgcccggaaccggacctcaccctgggctgcagcaggcactcggaccccagcttcctgaccgtgctgctgcaggactcgcatgcgcagggcggcctgcaggcgctcctcgcatccaggtggctggacgtgcctccggtggccggcgcgctcctggtgaacgtcggagaccttctccagctggtcagcaacgggcggttcaagagcgtggagcaccgggtggtggctaaccggagcagggacacggcgagagtgtcagtggcgtgcttctgcaacgcggacatcgcgagatccacgaggctgtatggacccatcgcggagctcatcgccgcggacgacagcgacggcgcgggaagggcgctgtacaggaacgtgacggtcccggagttcctagcgcactacgacaagaaaggcctcgacggtcgcccggcgctccaccgcttccagctgcttcaataattttacatcacatcagtcctgactctggtgatatcatgtcagtatgtcactgtgggctactccggtactctaataaagttatggatggatcagatcaat

SEQ ID NO: 5680 - protein, 253 aa, Zea mays subsp. mays
  peptide (1)..(253): Ceres Seq. ID no. 12409387
  misc_feature (16)..(225): Homolog of NCBI NO: 40253423 NR Description: putative 2-oxoglutarate-dependent oxygenase
  misc_feature (16)..(225): Homolog of NCBI NO: 40253431 NR Description: putative 2-oxoglutarate-dependent oxygenase
  misc_feature (16)..(228): Homolog of NCBI NO: 40253419 NR Description: putative 2-oxoglutarate-dependent oxygenase
  misc_feature (16)..(225): Homolog of NCBI NO: 40253427 NR Description: putative 2-oxoglutarate-dependent oxygenase
  misc_feature (1)..(228): Homolog of NCBI NO: 29123084 NR Description: 2-oxoglutarate-dependent oxygenase [Zea mays]
  misc_feature (14)..(226): Homolog of NCBI NO: 5031283 NR Description: unknown [Prunus armeniaca]
  misc_feature (16)..(226): Homolog of NCBI NO: 30679748 NR Description: 2-oxoglutarate-dependent dioxygenase, putative thaliana] >gi|30102640|gb|AAP21238.1| At1g06620 [Arabidopsis
  misc_feature (15)..(226): Homolog of NCBI NO: 13878119 NR Description: putative oxidoreductase [Arabidopsis thaliana]
  misc_feature (15)..(226): Homolog of NCBI NO: 15221545 NR Description: oxidoreductase, putative; protein id: supported by cDNA: gi_13878118 [Arabidopsis thaliana]
  misc_feature (15)..(226): Homolog of NCBI NO: 15224576 NR Description: putative dioxygenase; protein id: At2g30840.1
MSPTEEAAGGGLDDYDRLSELKAFDDSKAGVKGLVDAGVTTIPAIFRGHLLQEGPKVSSSSSSSSTSLSIIPVIDLSAADAVAREEVVAQLKAAAETVGFFQLVNHGVPSELLSEMLASVRRFNEEPHEVKRPYYTRDARRKVRFNSNFDLFQSPAANWRDTLFCEAAPEPPRAEELPVAVRHVMLEYGGAVREVAARVLGLLSEALGLSPGHLAGMGCAEGLSLVCKCATTTRRARNRTSPWAAAGTRTPAS

SEQ ID NO: 5681 - protein, 138 aa, Zea mays subsp. mays
  peptide (1)..(138): Ceres Seq. ID no. 12409388
  misc_feature (1)..(110): Homolog of NCBI NO: 40253423 NR Description: putative 2-oxoglutarate-dependent oxygenase
  misc_feature (1)..(110): Homolog of NCBI NO: 40253431 NR Description: putative 2-oxoglutarate-dependent oxygenase
  misc_feature (1)..(113): Homolog of NCBI NO: 40253419 NR Description: putative 2-oxoglutarate-dependent oxygenase
  misc_feature (1)..(110): Homolog of NCBI NO: 40253427 NR Description: putative 2-oxoglutarate-dependent oxygenase
  misc_feature (1)..(113): Homolog of NCBI NO: 29123084 NR Description: 2-oxoglutarate-dependent oxygenase [Zea mays]
  misc_feature (1)..(111): Homolog of NCBI NO: 5031283 NR Description: unknown [Prunus armeniaca]
  misc_feature (1)..(111): Homolog of NCBI NO: 30679748 NR Description: 2-oxoglutarate-dependent dioxygenase, putative thaliana] >gi|30102640|gb|AAP21238.1| At1g06620 [Arabidopsis
  misc_feature (1)..(111): Homolog of NCBI NO: 13878119 NR Description: putative oxidoreductase [Arabidopsis thaliana]
  misc_feature (1)..(111): Homolog of NCBI NO: 15221545 NR Description: oxidoreductase, putative; protein id: supported by cDNA: gi_13878118 [Arabidopsis thaliana]
  misc_feature (1)..(111): Homolog of NCBI NO: 15224576 NR Description: putative dioxygenase; protein id: At2g30840.1
MLASVRRFNEEPHEVKRPYYTRDARRKVRFNSNFDLFQSPAANWRDTLFCEAAPEPPRAEELPVAVRHVMLEYGGAVREVAARVLGLLSEALGLSPGHLAGMGCAEGLSLVCKCATTTRRARNRTSPWAAAGTRTPAS

SEQ ID NO: 5682 - DNA, 1898 bp, Zea mays subsp. mays
  misc_feature (1)..(1898): Ceres Seq. ID no. 12405599
  misc_feature: MA Experiment ID: 108504 Result: Up-regulated in Transcription
  misc_feature: MA Experiment 108504 PARAMETER Experiment Name: Zm_Drought_P Parameter: Age (day) Value: 8
  misc_feature: MA Experiment 108504 PARAMETER Experiment Name: Zm_Drought_P Parameter: Organism Value: Zea mays
  misc_feature: MA Experiment 108504 PARAMETER Experiment Name: Zm_Drought_P Parameter: Plant Line Value: 35A19
  misc_feature: MA Experiment 108504 PARAMETER Experiment Name: Zm_Drought_P Parameter: Timepoint (hr) Value: 12
  misc_feature: MA Experiment 108504 PARAMETER Experiment Name: Zm_Drought_P Parameter: Tissue Value: Aerial
  misc_feature: MA Experiment 108504 PARAMETER Experiment Name: Zm_Drought_P Parameter: Treatment Value: Drought vs. No Drought
  misc_feature: MA Experiment ID: 108527 Result: Up-regulated in Transcription
  misc_feature: MA Experiment 108527 PARAMETER Experiment Name: Zm_5mM_NO_P Parameter: Age (day) Value: 8
  misc_feature: MA Experiment 108527 PARAMETER Experiment Name: Zm_5mM_NO_P Parameter: Organism Value: Zea mays
  misc_feature: MA Experiment 108527 PARAMETER Experiment Name: Zm_5mM_NO_P Parameter: Plant Line Value: 35A19
  misc_feature: MA Experiment 108527 PARAMETER Experiment Name: Zm_5mM_NO_P Parameter: Timepoint (hr) Value: 6
  misc_feature: MA Experiment 108527 PARAMETER Experiment Name: Zm_5mM_NO_P Parameter: Tissue Value: Aerial
  misc_feature: MA Experiment 108527 PARAMETER Experiment Name: Zm_5mM_NO_P Parameter: Treatment Value: 5mM NO vs. No Treatment
  misc_feature: MA Experiment ID: 108540 Result: Up-regulated in Transcription
  misc_feature: MA Experiment 108540 PARAMETER Experiment Name: Zm_20percent_PEG_P Parameter: Age (day) Value: 8
  misc_feature: MA Experiment 108540 PARAMETER Experiment Name: Zm_20percent_PEG_P Parameter: Organism Value: Zea mays
  misc_feature: MA Experiment 108540 PARAMETER Experiment Name: Zm_20percent_PEG_P Parameter: Plant Line Value: 35A19
  misc_feature: MA Experiment 108540 PARAMETER Experiment Name: Zm_20percent_PEG_P Parameter: Timepoint (hr) Value: 6
  misc_feature: MA Experiment 108540 PARAMETER Experiment Name: Zm_20percent_PEG_P Parameter: Tissue Value: Aerial
  misc_feature: MA Experiment 108540 PARAMETER Experiment Name: Zm_20percent_PEG_P Parameter: Treatment Value: 20percent PEG vs. No Treatment
  misc_feature: MA Experiment ID: 108543 Result: Up-regulated in Transcription
  misc_feature: MA Experiment ID: 108547 Result: Down-regulated in Transcription
  misc_feature: MA Experiment 108547 PARAMETER Experiment Name: Zm_Imbibed_Seeds_P Parameter: Age (day) Value: 4 vs. 2
  misc_feature: MA Experiment 108547 PARAMETER Experiment Name: Zm_Imbibed_Seeds_P Parameter: Organism Value: Zea mays
  misc_feature: MA Experiment 108547 PARAMETER Experiment Name: Zm_Imbibed_Seeds_P Parameter: Plant Line Value: 35A19
  misc_feature: MA Experiment 108547 PARAMETER Experiment Name: Zm_Imbibed_Seeds_P Parameter: Tissue Value: Aerial vs. Embryo
  misc_feature: MA Experiment ID: 108556 Result: Up-regulated in Transcription
  misc_feature: MA Experiment 108556 PARAMETER Experiment Name: Zm_Drought_P Parameter: Age (day) Value: 9
  misc_feature: MA Experiment 108556 PARAMETER Experiment Name: Zm_Drought_P Parameter: Organism Value: Zea mays
  misc_feature: MA Experiment 108556 PARAMETER Experiment Name: Zm_Drought_P Parameter: Plant Line Value: 35A19
  misc_feature: MA Experiment 108556 PARAMETER Experiment Name: Zm_Drought_P Parameter: Timepoint (hr) Value: 24
  misc_feature: MA Experiment 108556 PARAMETER Experiment Name: Zm_Drought_P Parameter: Tissue Value: Aerial
  misc_feature: MA Experiment 108556 PARAMETER Experiment Name: Zm_Drought_P Parameter: Treatment Value: Drought vs. No Drought
  misc_feature: MA Experiment ID: 108559 Result: Up-regulated in Transcription
  misc_feature: MA Experiment 108559 PARAMETER Experiment Name: Zm_5mM_NO_P Parameter: Age (day) Value: 8
  misc_feature: MA Experiment 108559 PARAMETER Experiment Name: Zm_5mM_NO_P Parameter: Organism Value: Zea mays
  misc_feature: MA Experiment 108559 PARAMETER Experiment Name: Zm_5mM_NO_P Parameter: Plant Line Value: 35A19
  misc_feature: MA Experiment 108559 PARAMETER Experiment Name: Zm_5mM_NO_P Parameter: Timepoint (hr) Value: 12
  misc_feature: MA Experiment 108559 PARAMETER Experiment Name: Zm_5mM_NO_P Parameter: Tissue Value: Aerial
  misc_feature: MA Experiment 108559 PARAMETER Experiment Name: Zm_5mM_NO_P Parameter: Treatment Value: 5mM NO vs. No Treatment
  misc_feature: MA Experiment ID: 108597 Result: Up-regulated in Transcription
  misc_feature: MA Experiment 108597 PARAMETER Experiment Name: Zm_100uM_ABA_P Parameter: Age (day) Value: 9
  misc_feature: MA Experiment 108597 PARAMETER Experiment Name: Zm_100uM_ABA_P Parameter: Organism Value: Zea mays
  misc_feature: MA Experiment 108597 PARAMETER Experiment Name: Zm_100uM_ABA_P Parameter: Plant Line Value: 35A19
  misc_feature: MA Experiment 108597 PARAMETER Experiment Name: Zm_100uM_ABA_P Parameter: Timepoint (hr) Value: 24
  misc_feature: MA Experiment 108597 PARAMETER Experiment Name: Zm_100uM_ABA_P Parameter: Tissue Value: Aerial
  misc_feature: MA Experiment 108597 PARAMETER Experiment Name: Zm_100uM_ABA_P Parameter: Treatment Value: 100uM ABA vs. No Treatment
  misc_feature: MA Experiment ID: 108689 Result: Up-regulated in Transcription
  misc_feature: MA Experiment 108689 PARAMETER Experiment Name: Zm_Drought_Roots_P Parameter: Age (day) Value: 9
  misc_feature: MA Experiment 108689 PARAMETER Experiment Name: Zm_Drought_Roots_P Parameter: Organism Value: Zea mays
  misc_feature: MA Experiment 108689 PARAMETER Experiment Name: Zm_Drought_Roots_P Parameter: Plant Line Value: 35A19
  misc_feature: MA Experiment 108689 PARAMETER Experiment Name: Zm_Drought_Roots_P Parameter: Timepoint (hr) Value: 24
  misc_feature: MA Experiment 108689 PARAMETER Experiment Name: Zm_Drought_Roots_P Parameter: Tissue Value: Roots
  misc_feature: MA Experiment 108689 PARAMETER Experiment Name: Zm_Drought_Roots_P Parameter: Treatment Value: Drought vs. No Drought
  misc_feature: MA Experiment ID: 20000477 Result: Up-regulated in Transcription
  misc_feature: MA Experiment 20000477 PARAMETER Experiment Name: Zm_5mM_SA_P Parameter: Age (day) Value: 10
  misc_feature: MA Experiment 20000477 PARAMETER Experiment Name: Zm_5mM_SA_P Parameter: Organism Value: Zea mays
  misc_feature: MA Experiment 20000477 PARAMETER Experiment Name: Zm_5mM_SA_P Parameter: Plant Line Value: 35A19
  misc_feature: MA Experiment 20000477 PARAMETER Experiment Name: Zm_5mM_SA_P Parameter: Timepoint (hr) Value: 48
  misc_feature: MA Experiment 20000477 PARAMETER Experiment Name: Zm_5mM_SA_P Parameter: Tissue Value: Aerial
  misc_feature: MA Experiment 20000477 PARAMETER Experiment Name: Zm_5mM_SA_P Parameter: Treatment Value: 5mM SA vs. No Treatment
  misc_feature: MA Experiment ID: 20000478 Result: Up-regulated in Transcription
  misc_feature: MA Experiment 20000478 PARAMETER Experiment Name: Zm_5mM_SA_P Parameter: Age (day) Value: 11
  misc_feature: MA Experiment 20000478 PARAMETER Experiment Name: Zm_5mM_SA_P Parameter: Organism Value: Zea mays
  misc_feature: MA Experiment 20000478 PARAMETER Experiment Name: Zm_5mM_SA_P Parameter: Plant Line Value: 35A19
  misc_feature: MA Experiment 20000478 PARAMETER Experiment Name: Zm_5mM_SA_P Parameter: Timepoint (hr) Value: 72
  misc_feature: MA Experiment 20000478 PARAMETER Experiment Name: Zm_5mM_SA_P Parameter: Tissue Value: Aerial
  misc_feature: MA Experiment 20000478 PARAMETER Experiment Name: Zm_5mM_SA_P Parameter: Treatment Value: 5mM SA vs. No Treatment
  misc_feature: MA Experiment ID: 20000479 Result: Up-regulated in Transcription
  misc_feature: MA Experiment 20000479 PARAMETER Experiment Name: Zm_Drought_P Parameter: Age (day) Value: 10
  misc_feature: MA Experiment 20000479 PARAMETER Experiment Name: Zm_Drought_P Parameter: Organism Value: Zea mays
  misc_feature: MA Experiment 20000479 PARAMETER Experiment Name: Zm_Drought_P Parameter: Plant Line Value: 35A19
  misc_feature: MA Experiment 20000479 PARAMETER Experiment Name: Zm_Drought_P Parameter: Timepoint (hr) Value: 48
  misc_feature: MA Experiment 20000479 PARAMETER Experiment Name: Zm_Drought_P Parameter: Tissue Value: Aerial
  misc_feature: MA Experiment 20000479 PARAMETER Experiment Name: Zm_Drought_P Parameter: Treatment Value: Drought vs. No Drought
  misc_feature: MA Experiment ID: 20000480 Result: Up-regulated in Transcription
  misc_feature: MA Experiment 20000480 PARAMETER Experiment Name: Zm_Drought_P Parameter: Age (day) Value: 11
  misc_feature: MA Experiment 20000480 PARAMETER Experiment Name: Zm_Drought_P Parameter: Organism Value: Zea mays
  misc_feature: MA Experiment 20000480 PARAMETER Experiment Name: Zm_Drought_P Parameter: Plant Line Value: 35A19
  misc_feature: MA Experiment 20000480 PARAMETER Experiment Name: Zm_Drought_P Parameter: Timepoint (hr) Value: 72
  misc_feature: MA Experiment 20000480 PARAMETER Experiment Name: Zm_Drought_P Parameter: Tissue Value: Aerial
  misc_feature: MA Experiment 20000480 PARAMETER Experiment Name: Zm_Drought_P Parameter: Treatment Value: Drought vs. No Drought
gaggcgatcgcatcggagactcggagccggcaaaaccctaaggggaaggtttctgcaaggaggagggagatgcagggcgccagccacatgctcctggaggagcccttccgcctcgcctccgtcctctcccccgccaagcctaaagtattcccatcactcaccaagatagttgggacgctcgggcccaattcacactcggttgagattattcaggaatgcctcactgctggaatgtcagttgcacgatttgatttctcatggatggatgctgcgtatcaccaggagacccttgataatttgaggaaagcggcacagaatgtgaagaagttgtgccctgtaatgttggatactcttggtccagaaattcaggttcacaattccactggtgagccaattgagttgaaagctgggaatcatgttatcataactccagatatttctaaagctctctctgctgagatcctaccaattaagtttggtgatctggcaaaagctgtgaagaagggtgatactctttttatgggccaatatctcttcacaggaagtgaaacaacatctgtctggctagaagttgtggaaacttctggggaaaatgtaaattgtctagtgaagaatgcagctacacttgccggccccatattcactctgcatgcttcacaagttcacatcaatttgcccactttgagtgaatatgataaacatgtcatttcaacttggggttcatgtaacagtgttgacattatatcactttcccatacccgctctgctgaagatgtcagggagctcagggcctttttacaagcacacgcccttcctgacacacaaatatacgcgaagattgaaaattctgagggtttggataattttgatgacattctcaacgcggcagatggtatcattatttctcgaggagacctgggtattgaccttcctccagaaaacgttttcatgttccaaaagacagctattcataaatgcaatctggagggtaaacctgtgatcatcactagagttgtggacagcatgattgacaatctacgccctacccgtgcagaggcaactgatgttgcaaatgctgtcctagatggcactgatggcattttgcttggtgcggagacacttcgagggctttatcctgttgatgcagtgagtactgtggggagaatatgtgcagaagctgagactgtgtataatcagccgcttcaattcaagaaagtaatgtggcatgtaggtgacccaatgccccacgaggaatctgtggcatcagcagcggttggttctgcaatcaaagtaaaagctgctgccattgttgtgttcacattctcagggagagctgcgaggttagttgccaagtataggccaacaatgccaattttagcagttatcttcccacgtcaaggatccgatccatcaaagtggcgttcttatggcacaacacaggcaagacaatgtttcgcagtgagaggcgtgtaccctttgatggggagtactgatgaggccgaaactggtgggctaacaaaggaagagtatgggataaaacttgcgatgagctatggtcggtcggtcggcatagtgaagcctttcgacagggtgataatctttgaaaagattggtgattcttctgttgtcaagatcattgagtgtgaaggttaggcattagatgattgatacctacaaggctacaacccatgctgtagtttcatgtatcgcatgggagattacctccagttccatctcacttatttaaccaacaagtagagtacagcaagagcacaagatatcttgttagggaattttgccctcttttcagattgtcttttgatttgacgcaataaattatgatgtcacagatttatactggaattatgatttgattatgcaaatataggattgttggc

SEQ ID NO: 5683 - protein, 550 aa, Zea mays subsp. mays
  peptide (1)..(550): Ceres Seq. ID no. 12405600
  misc_feature (418)..(547): Pfam Name: Pyruvate kinase, alpha/beta domain Pfam Description: Pyruvate kinase, alpha/beta domain
  misc_feature (27)..(549): Homolog of NCBI NO: 18404169 NR Description: putative pyruvate kinase; protein id: supported by cDNA: 120685., supported by cDNA: gi_17978969 thaliana] >gi|17978970|gb|AAL47446.1| At2g36580/F1O11.21
  misc_feature (27)..(549): Homolog of NCBI NO: 18409740 NR Description: pyruvate kinase - like protein; protein id: supported by cDNA: 12298., supported by cDNA: gi_14194098 thaliana] >gi|14194099|gb|AAK56244.1|AF367255_1
  misc_feature (27)..(549): Homolog of NCBI NO: 21537122 NR Description: putative pyruvate kinase [Arabidopsis thaliana]
  misc_feature (27)..(549): Homolog of NCBI NO: 23308151 NR Description: At2g36580/F1O11.21 [Arabidopsis thaliana]
  misc_feature (38)..(549): Homolog of NCBI NO: 11260409 NR Description: pyruvate kinase-like protein - Arabidopsis
  misc_feature (61)..(549): Homolog of NCBI NO: 20562907 NR Description: pyruvate kinase-like [Deschampsia antarctica]
  misc_feature (78)..(549): Homolog of NCBI NO: 25287747 NR Description: probable pyruvate kinase [imported] - Arabidopsis
  misc_feature (54)..(545): Homolog of NCBI NO: 322787 NR Description: pyruvate kinase (EC 2.7.1.40), cytosolic - potato
EAIASETRSRQNPKGKVSARRREMQGASHMLLEEPFRLASVLSPAKPKVFPSLTKIVGTLGPNSHSVEIIQECLTAGMSVARFDFSWMDAAYHQETLDNLRKAAQNVKKLCPVMLDTLGPEIQVHNSTGEPIELKAGNHVIITPDISKALSAEILPIKFGDLAKAVKKGDTLFMGQYLFTGSETTSVWLEVVETSGENVNCLVKNAATLAGPIFTLHASQVHINLPTLSEYDKHVISTWGSCNSVDIISLSHTRSAEDVRELRAFLQAHALPDTQIYAKIENSEGLDNFDDILNAADGIIISRGDLGIDLPPENVFMFQKTAIHKCNLEGKPVIITRVVDSMIDNLRPTRAEATDVANAVLDGTDGILLGAETLRGLYPVDAVSTVGRICAEAETVYNQPLQFKKVMWHVGDPMPHEESVASAAVGSAIKVKAAAIVVFTFSGRAARLVAKYRPTMPILAVIFPRQGSDPSKWRSYGTTQARQCFAVRGVYPLMGSTDEAETGGLTKEEYGIKLAMSYGRSVGIVKPFDRVIIFEKIGDSSVVKIIECEG

SEQ ID NO: 5684 - protein, 527 aa, Zea mays subsp. mays
  peptide (1)..(527): Ceres Seq. ID no. 12405601
  misc_feature (395)..(524): Pfam Name: Pyruvate kinase, alpha/beta domain Pfam Description: Pyruvate kinase, alpha/beta domain
  misc_feature (4)..(526): Homolog of NCBI NO: 18404169 NR Description: putative pyruvate kinase; protein id: supported by cDNA: 120685., supported by cDNA: gi_17978969 thaliana] >gi|17978970|gb|AAL47446.1| At2g36580/F1O11.21
  misc_feature (4)..(526): Homolog of NCBI NO: 18409740 NR Description: pyruvate kinase - like protein; protein id: supported by cDNA: 12298., supported by cDNA: gi_14194098 thaliana] >gi|14194099|gb|AAK56244.1|AF367255_1
  misc_feature (4)..(526): Homolog of NCBI NO: 21537122 NR Description: putative pyruvate kinase [Arabidopsis thaliana]
  misc_feature (4)..(526): Homolog of NCBI NO: 23308151 NR Description: At2g36580/F1O11.21 [Arabidopsis thaliana]
  misc_feature (15)..(526): Homolog of NCBI NO: 11260409 NR Description: pyruvate kinase-like protein - Arabidopsis
  misc_feature (38)..(526): Homolog of NCBI NO: 20562907 NR Description: pyruvate kinase-like [Deschampsia antarctica]
  misc_feature (55)..(526): Homolog of NCBI NO: 25287747 NR Description: probable pyruvate kinase [imported] - Arabidopsis
  misc_feature (31)..(522): Homolog of NCBI NO: 322787 NR Description: pyruvate kinase (EC 2.7.1.40), cytosolic - potato
MQGASHMLLEEPFRLASVLSPAKPKVFPSLTKIVGTLGPNSHSVEIIQECLTAGMSVARFDFSWMDAAYHQETLDNLRKAAQNVKKLCPVMLDTLGPEIQVHNSTGEPIELKAGNHVIITPDISKALSAEILPIKFGDLAKAVKKGDTLFMGQYLFTGSETTSVWLEVVETSGENVNCLVKNAATLAGPIFTLHASQVHINLPTLSEYDKHVISTWGSCNSVDIISLSHTRSAEDVRELRAFLQAHALPDTQIYAKIENSEGLDNFDDILNAADGIIISRGDLGIDLPPENVFMFQKTAIHKCNLEGKPVIITRVVDSMIDNLRPTRAEATDVANAVLDGTDGILLGAETLRGLYPVDAVSTVGRICAEAETVYNQPLQFKKVMWHVGDPMPHEESVASAAVGSAIKVKAAAIVVFTFSGRAARLVAKYRPTMPILAVIFPRQGSDPSKWRSYGTTQARQCFAVRGVYPLMGSTDEAETGGLTKEEYGIKLAMSYGRSVGIVKPFDRVIIFEKIGDSSVVKIIECEG

SEQ ID NO: 5685 - protein, 521 aa, Zea mays subsp. mays
  peptide (1)..(521): Ceres Seq. ID no. 12405602
  misc_feature (389)..(518): Pfam Name: Pyruvate kinase, alpha/beta domain Pfam Description: Pyruvate kinase, alpha/beta domain
  misc_feature (1)..(520): Homolog of NCBI NO: 18404169 NR Description: putative pyruvate kinase; protein id: supported by cDNA: 120685., supported by cDNA: gi_17978969 thaliana] >gi|17978970|gb|AAL47446.1| At2g36580/F1O11.21
  misc_feature (1)..(520): Homolog of NCBI NO: 18409740 NR Description: pyruvate kinase - like protein; protein id: supported by cDNA: 12298., supported by cDNA: gi_14194098 thaliana] >gi|14194099|gb|AAK56244.1|AF367255_1
  misc_feature (1)..(520): Homolog of NCBI NO: 21537122 NR Description: putative pyruvate kinase [Arabidopsis thaliana]
  misc_feature (1)..(520): Homolog of NCBI NO: 23308151 NR Description: At2g36580/F1O11.21 [Arabidopsis thaliana]
  misc_feature (9)..(520): Homolog of NCBI NO: 11260409 NR Description: pyruvate kinase-like protein - Arabidopsis
  misc_feature (32)..(520): Homolog of NCBI NO: 20562907 NR Description: pyruvate kinase-like [Deschampsia antarctica]
  misc_feature (49)..(520): Homolog of NCBI NO: 25287747 NR Description: probable pyruvate kinase [imported] - Arabidopsis
  misc_feature (25)..(516): Homolog of NCBI NO: 322787 NR Description: pyruvate kinase (EC 2.7.1.40), cytosolic - potato
MLLEEPFRLASVLSPAKPKVFPSLTKIVGTLGPNSHSVEIIQECLTAGMSVARFDFSWMDAAYHQETLDNLRKAAQNVKKLCPVMLDTLGPEIQVHNSTGEPIELKAGNHVIITPDISKALSAEILPIKFGDLAKAVKKGDTLFMGQYLFTGSETTSVWLEVVETSGENVNCLVKNAATLAGPIFTLHASQVHINLPTLSEYDKHVISTWGSCNSVDIISLSHTRSAEDVRELRAFLQAHALPDTQIYAKIENSEGLDNFDDILNAADGIIISRGDLGIDLPPENVFMFQKTAIHKCNLEGKPVIITRVVDSMIDNLRPTRAEATDVANAVLDGTDGILLGAETLRGLYPVDAVSTVGRICAEAETVYNQPLQFKKVMWHVGDPMPHEESVASAAVGSAIKVKAAAIVVFTFSGRAARLVAKYRPTMPILAVIFPRQGSDPSKWRSYGTTQARQCFAVRGVYPLMGSTDEAETGGLTKEEYGIKLAMSYGRSVGIVKPFDRVIIFEKIGDSSVVKIIECEG

SEQ ID NO: 5686 - DNA, 1589 bp, Zea mays subsp. mays
  misc_feature (1)..(1589): Ceres Seq. ID no. 12352373
  misc_feature: MA Experiment ID: 108544 Result: Down-regulated in Transcription
  misc_feature: MA Experiment ID: 108687 Result: Down-regulated in Transcription
  misc_feature: MA Experiment 108687 PARAMETER Experiment Name: Zm_Embryos-Flowers__P Parameter: Tissue Value: Embryo vs. Aerial+
  misc_feature: MA Experiment ID: 20000477 Result: Down-regulated in Transcription
  misc_feature: MA Experiment 20000477 PARAMETER Experiment Name: Zm_5mM_SA_P Parameter: Age (day) Value: 10
  misc_feature: MA Experiment 20000477 PARAMETER Experiment Name: Zm_5mM_SA_P Parameter: Organism Value: Zea mays
  misc_feature: MA Experiment 20000477 PARAMETER Experiment Name: Zm_5mM_SA_P Parameter: Plant Line Value: 35A19
  misc_feature: MA Experiment 20000477 PARAMETER Experiment Name: Zm_5mM_SA_P Parameter: Timepoint (hr) Value: 48
  misc_feature: MA Experiment 20000477 PARAMETER Experiment Name: Zm_5mM_SA_P Parameter: Tissue Value: Aerial
  misc_feature: MA Experiment 20000477 PARAMETER Experiment Name: Zm_5mM_SA_P Parameter: Treatment Value: 5mM SA vs. No Treatment
  misc_feature: MA Experiment ID: 20000487 Result: Down-regulated in Transcription
  misc_feature: MA Experiment 20000487 PARAMETER Experiment Name: Zm_50mM_NH4NO3_L_to_H_P Parameter: Organism Value: Zea mays
  misc_feature: MA Experiment 20000487 PARAMETER Experiment Name: Zm_50mM_NH4NO3_L_to_H_P Parameter: Timepoint (hr) Value: 4
  misc_feature: MA Experiment 20000487 PARAMETER Experiment Name: Zm_50mM_NH4NO3_L_to_H_P Parameter: Tissue Value: Leaves
  misc_feature: MA Experiment 20000487 PARAMETER Experiment Name: Zm_50mM_NH4NO3_L_to_H_P Parameter: Treatment Value: 50mM NH4NO3 vs. 100mM Mannitol
  misc_feature: MA Experiment ID: 20000488 Result: Down-regulated in Transcription
  misc_feature: MA Experiment 20000488 PARAMETER Experiment Name: Zm_50mM_NH4NO3_L_to_H_P Parameter: Organism Value: Zea mays
  misc_feature: MA Experiment 20000488 PARAMETER Experiment Name: Zm_50mM_NH4NO3_L_to_H_P Parameter: Timepoint (hr) Value: 8
  misc_feature: MA Experiment 20000488 PARAMETER Experiment Name: Zm_50mM_NH4NO3_L_to_H_P Parameter: Tissue Value: Leaves
  misc_feature: MA Experiment 20000488 PARAMETER Experiment Name: Zm_50mM_NH4NO3_L_to_H_P Parameter: Treatment Value: 50mM NH4NO3 vs. 100mM Mannitol
tttttttcgaaaaccggttttccccactccacaccaccaccaccaccattgacgacttgactacaaagcccagatccattcctcggggtcgggcggccgccaatcccgccgcataccgctggccgagtcctcgtcggcgccggacggggtgaagtgaaggccgactgggagaattttgtggatcttatctggtctccatcatggaacaagacggcacgacgaacctggctgtcactgaggctgtgcgctcggtgcagctgctcaagatcgacggctactgcgccaccgctaccatgaaatcatcggagttcatcaaattccgatggcacatcgatggccacgagtgggaggtccgtttctatcctgattactggtacttcttcgaggacgaggactgcttcagcacttatggcgacgacgatcactccgagtgggtaggtctgaagctcatccttgtcagtgaaccccagagggacgacgacaaggtgagggtgaacctgagctgccggcttgtatgccccagccccaccagccagcggcggcatctcggtacctgctggtccgaagagaagagggtgtcccatgtgtttgccagcaactcgaaatgctcgcctgaacttctcctcatcctgaagcacgagctaccatcgtcaggttatctcgtggacgattcactgaccgtggaatgcacggtcaccgtgctacgcgacttggacgccgccacggataaggcgctgtcgtccctgccagtgccgccaccctcggacctacaccagcacctcggcgacctcctgcagagcgaggacggagcggacgtcacgttccgtgtctccggggagtccttcgccgcccacagggccatactcgccgcaaggtcccctgtttttaaggccgagttcttcggaggcatggaggaacgcagctccgcttctgtggaggtcaaaggcatggaggctgctgtgttcaggtccatgcttcgcttcatctataccgacacggctccagagctcgacggtgcccaggaccaggagcctgaggcggcggtggccatggctcagcacctactggtagctgctgacaggtatgggctgaacagactgaagctcatgtgcgaatgcaagctctctggcggcatcgacatcggcacagcggccgcgacgttggctctcgccgagcagcacaactgctcgctgctcaaagccaagtgccttgagttcgtcaccaggtcgcctgagactctcgatgctatcctggcgactgacggctacgagcatctggtggcaagctgcccctcggtgctggctgaactgctgagggctgcgcgtggaaggaagatctgagctggacgatgatttcatattatggtttgcctaagatgtgtgcgaactaaaaaccatgcatgatgaactagtagtgcttgcagttgatttcctgcccctcctttcagtttgacctgcgcttgtcatgcatgtattgtatgcacatacatgagacgggcagctagcattttctgtggttcgatctcgtctcggctttgtgcctgccatttgggggcttaattgtaccggttgccgtttctcgttcttcgc

SEQ ID NO: 5687 - protein, 379 aa, Zea mays subsp. mays
  peptide (1)..(379): Ceres Seq. ID no. 12352374
  misc_feature (194)..(312): Pfam Name: BTB/POZ domain Pfam Description: BTB/POZ domain
  misc_feature (133)..(371): Homolog of NCBI NO: 37534476 NR Description: hypothetical protein [Oryza sativa (japonica group)] >gi|31432165|gb|AAP53827.1| hypothetical protein [Oryza
  misc_feature (67)..(371): Homolog of NCBI NO: 37534474 NR Description: hypothetical protein [Oryza sativa (japonica group)] >gi|31432164|gb|AAP53826.1| hypothetical protein [Oryza
  misc_feature (147)..(371): Homolog of NCBI NO: 4680338 NR Description: hypothetical protein [Oryza sativa subsp. indica]
  misc_feature (147)..(371): Homolog of NCBI NO: 4680501 NR Description: hypothetical protein [Oryza sativa]
  misc_feature (148)..(379): Homolog of NCBI NO: 37534478 NR Description: hypothetical protein [Oryza sativa (japonica group)] >gi|31432166|gb|AAP53828.1| hypothetical protein [Oryza
  misc_feature (20)..(371): Homolog of NCBI NO: 37534534 NR Description: putative speckle-type protein [Oryza sativa
  misc_feature (120)..(370): Homolog of NCBI NO: 38636858 NR Description: zinc finger POZ domain protein-like [Oryza sativa
  misc_feature (11)..(371): Homolog of NCBI NO: 37534542 NR Description: putative speckle-type protein [Oryza sativa
  misc_feature (152)..(371): Homolog of NCBI NO: 37534482 NR Description: hypothetical protein [Oryza sativa (japonica group)] >gi|31432168|gb|AAP53830.1| hypothetical protein [Oryza
  misc_feature (168)..(371): Homolog of NCBI NO: 37534508 NR Description: putative speckle-type protein [Oryza sativa
MEQDGTTNLAVTEAVRSVQLLKIDGYCATATMKSSEFIKFRWHIDGHEWEVRFYPDYWYFFEDEDCFSTYGDDDHSEWVGLKLILVSEPQRDDDKVRVNLSCRLVCPSPTSQRRHLGTCWSEEKRVSHVFASNSKCSPELLLILKHELPSSGYLVDDSLTVECTVTVLRDLDAATDKALSSLPVPPPSDLHQHLGDLLQSEDGADVTFRVSGESFAAHRAILAARSPVFKAEFFGGMEERSSASVEVKGMEAAVFRSMLRFIYTDTAPELDGAQDQEPEAAVAMAQHLLVAADRYGLNRLKLMCECKLSGGIDIGTAAATLALAEQHNCSLLKAKCLEFVTRSPETLDAILATDGYEHLVASCPSVLAELLRAARGRKI

SEQ ID NO: 5688 - protein, 348 aa, Zea mays subsp. mays
  peptide (1)..(348): Ceres Seq. ID no. 12352375
  misc_feature (163)..(281): Pfam Name: BTB/POZ domain Pfam Description: BTB/POZ domain
  misc_feature (102)..(340): Homolog of NCBI NO: 37534476 NR Description: hypothetical protein [Oryza sativa (japonica group)] >gi|31432165|gb|AAP53827.1| hypothetical protein [Oryza
  misc_feature (36)..(340): Homolog of NCBI NO: 37534474 NR Description: hypothetical protein [Oryza sativa (japonica group)] >gi|31432164|gb|AAP53826.1| hypothetical protein [Oryza
  misc_feature (116)..(340): Homolog of NCBI NO: 4680338 NR Description: hypothetical protein [Oryza sativa subsp. indica]
  misc_feature (116)..(340): Homolog of NCBI NO: 4680501 NR Description: hypothetical protein [Oryza sativa]
  misc_feature (117)..(348): Homolog of NCBI NO: 37534478 NR Description: hypothetical protein [Oryza sativa (japonica group)] >gi|31432166|gb|AAP53828.1| hypothetical protein [Oryza
  misc_feature (1)..(340): Homolog of NCBI NO: 37534534 NR Description: putative speckle-type protein [Oryza sativa
  misc_feature (89)..(339): Homolog of NCBI NO: 38636858 NR Description: zinc finger POZ domain protein-like [Oryza sativa
  misc_feature (1)..(340): Homolog of NCBI NO: 37534542 NR Description: putative speckle-type protein [Oryza sativa
  misc_feature (121)..(340): Homolog of NCBI NO: 37534482 NR Description: hypothetical protein [Oryza sativa (japonica group)] >gi|31432168|gb|AAP53830.1| hypothetical protein [Oryza
  misc_feature (137)..(340): Homolog of NCBI NO: 37534508 NR Description: putative speckle-type protein [Oryza sativa
MKSSEFIKFRWHIDGHEWEVRFYPDYWYFFEDEDCFSTYGDDDHSEWVGLKLILVSEPQRDDDKVRVNLSCRLVCPSPTSQRRHLGTCWSEEKRVSHVFASNSKCSPELLLILKHELPSSGYLVDDSLTVECTVTVLRDLDAATDKALSSLPVPPPSDLHQHLGDLLQSEDGADVTFRVSGESFAAHRAILAARSPVFKAEFFGGMEERSSASVEVKGMEAAVFRSMLRFIYTDTAPELDGAQDQEPEAAVAMAQHLLVAADRYGLNRLKLMCECKLSGGIDIGTAAATLALAEQHNCSLLKAKCLEFVTRSPETLDAILATDGYEHLVASCPSVLAELLRAARGRKI

SEQ ID NO: 5689 - DNA, 1591 bp, Zea mays subsp. mays
  misc_feature (1)..(1591): Ceres Seq. ID no. 12409382
  misc_feature: MA Experiment ID: 108522 Result: Up-regulated in Transcription
  misc_feature: MA Experiment 108522 PARAMETER Experiment Name: Zm_42deg_Heat_P Parameter: Age (day) Value: 8
  misc_feature: MA Experiment 108522 PARAMETER Experiment Name: Zm_42deg_Heat_P Parameter: Organism Value: Zea mays
  misc_feature: MA Experiment 108522 PARAMETER Experiment Name: Zm_42deg_Heat_P Parameter: Plant Line Value: 35A19
  misc_feature: MA Experiment 108522 PARAMETER Experiment Name: Zm_42deg_Heat_P Parameter: Temperature (deg C) Value: 42 vs. 22
  misc_feature: MA Experiment 108522 PARAMETER Experiment Name: Zm_42deg_Heat_P Parameter: Timepoint (hr) Value: 1
  misc_feature: MA Experiment 108522 PARAMETER Experiment Name: Zm_42deg_Heat_P Parameter: Tissue Value: Aerial
  misc_feature: MA Experiment ID: 108523 Result: Up-regulated in Transcription
  misc_feature: MA Experiment 108523 PARAMETER Experiment Name: Zm_42deg_Heat_P Parameter: Age (day) Value: 8
  misc_feature: MA Experiment 108523 PARAMETER Experiment Name: Zm_42deg_Heat_P Parameter: Organism Value: Zea mays
  misc_feature: MA Experiment 108523 PARAMETER Experiment Name: Zm_42deg_Heat_P Parameter: Plant Line Value: 35A19
  misc_feature: MA Experiment 108523 PARAMETER Experiment Name: Zm_42deg_Heat_P Parameter: Temperature (deg C) Value: 42 vs. 22
  misc_feature: MA Experiment 108523 PARAMETER Experiment Name: Zm_42deg_Heat_P Parameter: Timepoint (hr) Value: 6
  misc_feature: MA Experiment 108523 PARAMETER Experiment Name: Zm_42deg_Heat_P Parameter: Tissue Value: Aerial
  misc_feature: MA Experiment ID: 108527 Result: Up-regulated in Transcription
  misc_feature: MA Experiment 108527 PARAMETER Experiment Name: Zm_5mM_NO_P Parameter: Age (day) Value: 8
  misc_feature: MA Experiment 108527 PARAMETER Experiment Name: Zm_5mM_NO_P Parameter: Organism Value: Zea mays
  misc_feature: MA Experiment 108527 PARAMETER Experiment Name: Zm_5mM_NO_P Parameter: Plant Line Value: 35A19
  misc_feature: MA Experiment 108527 PARAMETER Experiment Name: Zm_5mM_NO_P Parameter: Timepoint (hr) Value: 6
  misc_feature: MA Experiment 108527 PARAMETER Experiment Name: Zm_5mM_NO_P Parameter: Tissue Value: Aerial
  misc_feature: MA Experiment 108527 PARAMETER Experiment Name: Zm_5mM_NO_P Parameter: Treatment Value: 5mM NO vs. No Treatment
  misc_feature: MA Experiment ID: 108556 Result: Up-regulated in Transcription
  misc_feature: MA Experiment 108556 PARAMETER Experiment Name: Zm_Drought_P Parameter: Age (day) Value: 9
  misc_feature: MA Experiment 108556 PARAMETER Experiment Name: Zm_Drought_P Parameter: Organism Value: Zea mays
  misc_feature: MA Experiment 108556 PARAMETER Experiment Name: Zm_Drought_P Parameter: Plant Line Value: 35A19
  misc_feature: MA Experiment 108556 PARAMETER Experiment Name: Zm_Drought_P Parameter: Timepoint (hr) Value: 24
  misc_feature: MA Experiment 108556 PARAMETER Experiment Name: Zm_Drought_P Parameter: Tissue Value: Aerial
  misc_feature: MA Experiment 108556 PARAMETER Experiment Name: Zm_Drought_P Parameter: Treatment Value: Drought vs. No Drought
aaccgcaggttcgggagtactccggaacccgccgccgcatccacacgacgccacgactgacgacggagagccccggtctccttccacggctccaccgccaccaccccgcataaaagtagggaagagagccttgcagcgagaaccgtatcgatctattctcgtctgaagcaattcgcccctgtcgtgagcagaaccctacagctcgtattcgcctcatctcgcagcagcagcagaagaacaagggtatggcgaaggatgggggtcccgactggaacggcctgctcaagtggagcctcgcccacggcgacggcaccaacccgccgcgtgctctcagcgaggaagacagaaaatggttcatggatgctatgcaagccaacacggtagatgttgtgaagaggatgaaggagatcactcaggtgatgaaaactccagaagatgtcttgcagtctcagggcgtgacccctgagaacatcgaagatatgttggatgagctacaggagcatgttgaatccattgacatggcaaatgatctacattctattggtgggctggatcctctacttggttacttgaaaaattcaaatgctggcatccgagcaaaggcagcagaagttgttagtacaattgtgcagaataatcccaagagtcagcaacttgtcatggaatccaatgggctagagccactgttgacgaacttcaaatcagatccaagtacaaatgcacgcacaaaagctttaggagccatatcttctctaattcgtcataaccagcctggagtttccgcatttcgattgggaaatggctatgctggattgaaggatgctgttggttccgatgatgccagactccaaaggaaagctctcaatctcatacaatacttgctgcacaactacaaggcagacaggagtgttgccacagagcttggtcttccgaagctgatgatgcaccttgtgtccagcgatgattccttagtgcgtgaagctgctctaggcggcctccttgagttggcgcgggacaagacatctggtaacgcgctacctgaccaagaaaagctgaaagacatgctcaagcagccgaatagaagggatcagcgcaatggacactgacgatctccacgctgctcgcgaggagcggcagctggtggattcactctggaaggagtgctacaacgaaccttcgtctctcagggagaagggcctcgtcgtgcttccgggagaggatgctccccaacagccgccaccagacgttgcagggaagatgtttgagccaccgcttcgtgcgtgggcggctgcaagacctgctcaggaagatgactctgactctggcagcggaaagaaggatccgccattgctgcttaagttttgacggccttcttatgccgatactagttcttaggctccaccatgggtgttgaaagctgaaagatcagatctgatggatgcctgaccttcttcgaacctcagttgtggttcttgtaatttgcaccgcatttctgttctgagtatgttttatgagaagactgggaagatgacagacagatactgtatcacgtgatgctcgtaaattaacactacatgcgaattctcttgct

SEQ ID NO: 5690 - protein, 286 aa, Zea mays subsp. mays
  peptide (1)..(286): Ceres Seq. ID no. 12409383
  misc_feature (131)..(172): Pfam Name: Armadillo/beta-catenin-like repeat Pfam Description: Armadillo/beta-catenin-like repeat
  misc_feature (1)..(275): Homolog of NCBI NO: 34897412 NR Description: putative Hsp70 binding protein [Oryza sativa
  misc_feature (1)..(276): Homolog of NCBI NO: 21553998 NR Description: unknown [Arabidopsis thaliana]
  misc_feature (1)..(276): Homolog of NCBI NO: 18398480 NR Description: expressed protein; protein id: At3g09350.1, by cDNA: 19154. [Arabidopsis thaliana] unknown protein [Arabidopsis thaliana]
  misc_feature (31)..(276): Homolog of NCBI NO: 6478927 NR Description: hypothetical protein [Arabidopsis thaliana]
  misc_feature (1)..(30): Homolog of NCBI NO: 6478927 NR Description: hypothetical protein [Arabidopsis thaliana]
  misc_feature (4)..(280): Homolog of NCBI NO: 15232329 NR Description: putative protein; protein id: At3g53800.1, by cDNA: 37834. [Arabidopsis thaliana] >gi|11292176|pir||T45920
  misc_feature (4)..(280): Homolog of NCBI NO: 26449490 NR Description: unknown protein [Arabidopsis thaliana]
  misc_feature (1)..(275): Homolog of NCBI NO: 15241689 NR Description: putative protein; protein id: At5g02150.1
  misc_feature (11)..(276): Homolog of NCBI NO: 29436427 NR Description: Similar to RIKEN cDNA 1500019G21 gene [Danio
  misc_feature (11)..(276): Homolog of NCBI NO: 12667701 NR Description: Hsp70 binding protein [Danio rerio]
MAKDGGPDWNGLLKWSLAHGDGTNPPRALSEEDRKWFMDAMQANTVDVVKRMKEITQVMKTPEDVLQSQGVTPENIEDMLDELQEHVESIDMANDLHSIGGLDPLLGYLKNSNAGIRAKAAEVVSTIVQNNPKSQQLVMESNGLEPLLTNFKSDPSTNARTKALGAISSLIRHNQPGVSAFRLGNGYAGLKDAVGSDDARLQRKALNLIQYLLHNYKADRSVATELGLPKLMMHLVSSDDSLVREAALGGLLELARDKTSGNALPDQEKLKDMLKQPNRRDQRNGH

SEQ ID NO: 5691 - protein, 249 aa, Zea mays subsp. mays
  peptide (1)..(249): Ceres Seq. ID no. 12409384
  misc_feature (94)..(135): Pfam Name: Armadillo/beta-catenin-like repeat Pfam Description: Armadillo/beta-catenin-like repeat
  misc_feature (1)..(238): Homolog of NCBI NO: 34897412 NR Description: putative Hsp70 binding protein [Oryza sativa
  misc_feature (1)..(239): Homolog of NCBI NO: 21553998 NR Description: unknown [Arabidopsis thaliana]
  misc_feature (1)..(239): Homolog of NCBI NO: 18398480 NR Description: expressed protein; protein id: At3g09350.1, by cDNA: 19154. [Arabidopsis thaliana] unknown protein [Arabidopsis thaliana]
  misc_feature (1)..(239): Homolog of NCBI NO: 6478927 NR Description: hypothetical protein [Arabidopsis thaliana]
  misc_feature (1)..(243): Homolog of NCBI NO: 15232329 NR Description: putative protein; protein id: At3g53800.1, by cDNA: 37834. [Arabidopsis thaliana] >gi|11292176|pir||T45920
  misc_feature (1)..(243): Homolog of NCBI NO: 26449490 NR Description: unknown protein [Arabidopsis thaliana]
  misc_feature (1)..(238): Homolog of NCBI NO: 15241689 NR Description: putative protein; protein id: At5g02150.1
  misc_feature (1)..(239): Homolog of NCBI NO: 29436427 NR Description: Similar to RIKEN cDNA 1500019G21 gene [Danio
  misc_feature (1)..(239): Homolog of NCBI NO: 12667701 NR Description: Hsp70 binding protein [Danio rerio]
  misc_feature (1)..(224): Homolog of NCBI NO: 13195602 NR Description: RIKEN cDNA 1500019G21 [Mus musculus] Hsp70 binding protein [Mus musculus] >gi|15928564|gb|AAH14758.1| cDNA 1500019G21 gene [Mus musculus] >gi|26353486|dbj|BAC40373.1|
MDAMQANTVDVVKRMKEITQVMKTPEDVLQSQGVTPENIEDMLDELQEHVESIDMANDLHSIGGLDPLLGYLKNSNAGIRAKAAEVVSTIVQNNPKSQQLVMESNGLEPLLTNFKSDPSTNARTKALGAISSLIRHNQPGVSAFRLGNGYAGLKDAVGSDDARLQRKALNLIQYLLHNYKADRSVATELGLPKLMMHLVSSDDSLVREAALGGLLELARDKTSGNALPDQEKLKDMLKQPNRRDQRNGH

SEQ ID NO: 5692 - protein, 246 aa, Zea mays subsp. mays
  peptide (1)..(246): Ceres Seq. ID no. 12409385
  misc_feature (91)..(132): Pfam Name: Armadillo/beta-catenin-like repeat Pfam Description: Armadillo/beta-catenin-like repeat
  misc_feature (1)..(235): Homolog of NCBI NO: 34897412 NR Description: putative Hsp70 binding protein [Oryza sativa
  misc_feature (1)..(236): Homolog of NCBI NO: 21553998 NR Description: unknown [Arabidopsis thaliana]
  misc_feature (1)..(236): Homolog of NCBI NO: 18398480 NR Description: expressed protein; protein id: At3g09350.1, by cDNA: 19154. [Arabidopsis thaliana] unknown protein [Arabidopsis thaliana]
  misc_feature (1)..(236): Homolog of NCBI NO: 6478927 NR Description: hypothetical protein [Arabidopsis thaliana]
  misc_feature (1)..(240): Homolog of NCBI NO: 15232329 NR Description: putative protein; protein id: At3g53800.1, by cDNA: 37834. [Arabidopsis thaliana] >gi|11292176|pir||T45920
  misc_feature (1)..(240): Homolog of NCBI NO: 26449490 NR Description: unknown protein [Arabidopsis thaliana]
  misc_feature (1)..(235): Homolog of NCBI NO: 15241689 NR Description: putative protein; protein id: At5g02150.1
  misc_feature (1)..(236): Homolog of NCBI NO: 29436427 NR Description: Similar to RIKEN cDNA 1500019G21 gene [Danio
  misc_feature (1)..(236): Homolog of NCBI NO: 12667701 NR Description: Hsp70 binding protein [Danio rerio]
  misc_feature (1)..(221): Homolog of NCBI NO: 13195602 NR Description: RIKEN cDNA 1500019G21 [Mus musculus] Hsp70 binding protein [Mus musculus] >gi|15928564|gb|AAH14758.1| cDNA 1500019G21 gene [Mus musculus] >gi|26353486|dbj|BAC40373.1|
MQANTVDVVKRMKEITQVMKTPEDVLQSQGVTPENIEDMLDELQEHVESIDMANDLHSIGGLDPLLGYLKNSNAGIRAKAAEVVSTIVQNNPKSQQLVMESNGLEPLLTNFKSDPSTNARTKALGAISSLIRHNQPGVSAFRLGNGYAGLKDAVGSDDARLQRKALNLIQYLLHNYKADRSVATELGLPKLMMHLVSSDDSLVREAALGGLLELARDKTSGNALPDQEKLKDMLKQPNRRDQRNGH

SEQ ID NO: 5693 - DNA, 1489 bp, Zea mays subsp. mays
  misc_feature (1)..(1489): Ceres Seq. ID no. 12407941
  misc_feature: MA Experiment ID: 108504 Result: Up-regulated in Transcription
  misc_feature: MA Experiment 108504 PARAMETER Experiment Name: Zm_Drought_P Parameter: Age (day) Value: 8
  misc_feature: MA Experiment 108504 PARAMETER Experiment Name: Zm_Drought_P Parameter: Organism Value: Zea mays
  misc_feature: MA Experiment 108504 PARAMETER Experiment Name: Zm_Drought_P Parameter: Plant Line Value: 35A19
  misc_feature: MA Experiment 108504 PARAMETER Experiment Name: Zm_Drought_P Parameter: Timepoint (hr) Value: 12
  misc_feature: MA Experiment 108504 PARAMETER Experiment Name: Zm_Drought_P Parameter: Tissue Value: Aerial
  misc_feature: MA Experiment 108504 PARAMETER Experiment Name: Zm_Drought_P Parameter: Treatment Value: Drought vs. No Drought
  misc_feature: MA Experiment ID: 108522 Result: Down-regulated in Transcription
  misc_feature: MA Experiment 108522 PARAMETER Experiment Name: Zm_42deg_Heat_P Parameter: Age (day) Value: 8
  misc_feature: MA Experiment 108522 PARAMETER Experiment Name: Zm_42deg_Heat_P Parameter: Organism Value: Zea mays
  misc_feature: MA Experiment 108522 PARAMETER Experiment Name: Zm_42deg_Heat_P Parameter: Plant Line Value: 35A19
  misc_feature: MA Experiment 108522 PARAMETER Experiment Name: Zm_42deg_Heat_P Parameter: Temperature (deg C) Value: 42 vs. 22
  misc_feature: MA Experiment 108522 PARAMETER Experiment Name: Zm_42deg_Heat_P Parameter: Timepoint (hr) Value: 1
  misc_feature: MA Experiment 108522 PARAMETER Experiment Name: Zm_42deg_Heat_P Parameter: Tissue Value: Aerial
  misc_feature: MA Experiment ID: 108523 Result: Down-regulated in Transcription
  misc_feature: MA Experiment 108523 PARAMETER Experiment Name: Zm_42deg_Heat_P Parameter: Age (day) Value: 8
  misc_feature: MA Experiment 108523 PARAMETER Experiment Name: Zm_42deg_Heat_P Parameter: Organism Value: Zea mays
  misc_feature: MA Experiment 108523 PARAMETER Experiment Name: Zm_42deg_Heat_P Parameter: Plant Line Value: 35A19
  misc_feature: MA Experiment 108523 PARAMETER Experiment Name: Zm_42deg_Heat_P Parameter: Temperature (deg C) Value: 42 vs. 22
  misc_feature: MA Experiment 108523 PARAMETER Experiment Name: Zm_42deg_Heat_P Parameter: Timepoint (hr) Value: 6
  misc_feature: MA Experiment 108523 PARAMETER Experiment Name: Zm_42deg_Heat_P Parameter: Tissue Value: Aerial
  misc_feature: MA Experiment ID: 108528 Result: Up-regulated in Transcription
  misc_feature: MA Experiment 108528 PARAMETER Experiment Name: Zm_Imbibed_Seeds_P Parameter: Age (day) Value: 5 vs. 2
  misc_feature: MA Experiment 108528 PARAMETER Experiment Name: Zm_Imbibed_Seeds_P Parameter: Organism Value: Zea mays
  misc_feature: MA Experiment 108528 PARAMETER Experiment Name: Zm_Imbibed_Seeds_P Parameter: Plant Line Value: 35A19
  misc_feature: MA Experiment 108528 PARAMETER Experiment Name: Zm_Imbibed_Seeds_P Parameter: Tissue Value: Aerial vs. Embryo
  misc_feature: MA Experiment ID: 108530 Result: Up-regulated in Transcription
  misc_feature: MA Experiment 108530 PARAMETER Experiment Name: Zm_Imbibed_Seeds_P Parameter: Age (day) Value: 6 vs. 2
  misc_feature: MA Experiment 108530 PARAMETER Experiment Name: Zm_Imbibed_Seeds_P Parameter: Organism Value: Zea mays
  misc_feature: MA Experiment 108530 PARAMETER Experiment Name: Zm_Imbibed_Seeds_P Parameter: Plant Line Value: 35A19
  misc_feature: MA Experiment 108530 PARAMETER Experiment Name: Zm_Imbibed_Seeds_P Parameter: Tissue Value: Aerial vs. Embryo
  misc_feature: MA Experiment ID: 108534 Result: Down-regulated in Transcription
  misc_feature: MA Experiment 108534 PARAMETER Experiment Name: Zm_4deg_Cold_P Parameter: Age (hr) Value: 8
  misc_feature: MA Experiment 108534 PARAMETER Experiment Name: Zm_4deg_Cold_P Parameter: Organism Value: Zea mays
  misc_feature: MA Experiment 108534 PARAMETER Experiment Name: Zm_4deg_Cold_P Parameter: Plant Line Value: 35A19
  misc_feature: MA Experiment 108534 PARAMETER Experiment Name: Zm_4deg_Cold_P Parameter: Temperature (deg C) Value: 4 vs. 22
  misc_feature: MA Experiment 108534 PARAMETER Experiment Name: Zm_4deg_Cold_P Parameter: Timepoint (hr) Value: 6
  misc_feature: MA Experiment 108534 PARAMETER Experiment Name: Zm_4deg_Cold_P Parameter: Tissue Value: Aerial
  misc_feature: MA Experiment ID: 108539 Result: Up-regulated in Transcription
  misc_feature: MA Experiment 108539 PARAMETER Experiment Name: Zm_20percent_PEG_P Parameter: Age (day) Value: 8
  misc_feature: MA Experiment 108539 PARAMETER Experiment Name: Zm_20percent_PEG_P Parameter: Organism Value: Zea mays
  misc_feature: MA Experiment 108539 PARAMETER Experiment Name: Zm_20percent_PEG_P Parameter: Plant Line Value: 35A19
  misc_feature: MA Experiment 108539 PARAMETER Experiment Name: Zm_20percent_PEG_P Parameter: Timepoint (hr) Value: 1
  misc_feature: MA Experiment 108539 PARAMETER Experiment Name: Zm_20percent_PEG_P Parameter: Tissue Value: Aerial
  misc_feature: MA Experiment 108539 PARAMETER Experiment Name: Zm_20percent_PEG_P Parameter: Treatment Value: 20percent PEG vs. No Treatment
  misc_feature: MA Experiment ID: 108542 Result: Up-regulated in Transcription
  misc_feature: MA Experiment 108542 PARAMETER Experiment Name: Zm_150mM_NaCl_P Parameter: Age (day) Value: 8
  misc_feature: MA Experiment 108542 PARAMETER Experiment Name: Zm_150mM_NaCl_P Parameter: Organism Value: Zea mays
  misc_feature: MA Experiment 108542 PARAMETER Experiment Name: Zm_150mM_NaCl_P Parameter: Plant Line Value: 35A19
  misc_feature: MA Experiment 108542 PARAMETER Experiment Name: Zm_150mM_NaCl_P Parameter: Timepoint (hr) Value: 6
  misc_feature: MA Experiment 108542 PARAMETER Experiment Name: Zm_150mM_NaCl_P Parameter: Tissue Value: Aerial
  misc_feature: MA Experiment 108542 PARAMETER Experiment Name: Zm_150mM_NaCl_P Parameter: Treatment Value: 150mM NaCl vs. No Treatment
  misc_feature: MA Experiment ID: 108544 Result: Up-regulated in Transcription
  misc_feature: MA Experiment ID: 108556 Result: Up-regulated in Transcription
  misc_feature: MA Experiment 108556 PARAMETER Experiment Name: Zm_Drought_P Parameter: Age (day) Value: 9
  misc_feature: MA Experiment 108556 PARAMETER Experiment Name: Zm_Drought_P Parameter: Organism Value: Zea mays
  misc_feature: MA Experiment 108556 PARAMETER Experiment Name: Zm_Drought_P Parameter: Plant Line Value: 35A19
  misc_feature: MA Experiment 108556 PARAMETER Experiment Name: Zm_Drought_P Parameter: Timepoint (hr) Value: 24
  misc_feature: MA Experiment 108556 PARAMETER Experiment Name: Zm_Drought_P Parameter: Tissue Value: Aerial
  misc_feature: MA Experiment 108556 PARAMETER Experiment Name: Zm_Drought_P Parameter: Treatment Value: Drought vs. No Drought
  misc_feature: MA Experiment ID: 20000477 Result: Up-regulated in Transcription
  misc_feature: MA Experiment 20000477 PARAMETER Experiment Name: Zm_5mM_SA_P Parameter: Age (day) Value: 10
  misc_feature: MA Experiment 20000477 PARAMETER Experiment Name: Zm_5mM_SA_P Parameter: Organism Value: Zea mays
  misc_feature: MA Experiment 20000477 PARAMETER Experiment Name: Zm_5mM_SA_P Parameter: Plant Line Value: 35A19
  misc_feature: MA Experiment 20000477 PARAMETER Experiment Name: Zm_5mM_SA_P Parameter: Timepoint (hr) Value: 48
  misc_feature: MA Experiment 20000477 PARAMETER Experiment Name: Zm_5mM_SA_P Parameter: Tissue Value: Aerial
  misc_feature: MA Experiment 20000477 PARAMETER Experiment Name: Zm_5mM_SA_P Parameter: Treatment Value: 5mM SA vs. No Treatment
  misc_feature: MA Experiment ID: 20000478 Result: Up-regulated in Transcription
  misc_feature: MA Experiment 20000478 PARAMETER Experiment Name: Zm_5mM_SA_P Parameter: Age (day) Value: 11
  misc_feature: MA Experiment 20000478 PARAMETER Experiment Name: Zm_5mM_SA_P Parameter: Organism Value: Zea mays
  misc_feature: MA Experiment 20000478 PARAMETER Experiment Name: Zm_5mM_SA_P Parameter: Plant Line Value: 35A19
  misc_feature: MA Experiment 20000478 PARAMETER Experiment Name: Zm_5mM_SA_P Parameter: Timepoint (hr) Value: 72
  misc_feature: MA Experiment 20000478 PARAMETER Experiment Name: Zm_5mM_SA_P Parameter: Tissue Value: Aerial
  misc_feature: MA Experiment 20000478 PARAMETER Experiment Name: Zm_5mM_SA_P Parameter: Treatment Value: 5mM SA vs. No Treatment
  misc_feature: MA Experiment ID: 20000480 Result: Up-regulated in Transcription
  misc_feature: MA Experiment 20000480 PARAMETER Experiment Name: Zm_Drought_P Parameter: Age (day) Value: 11
  misc_feature: MA Experiment 20000480 PARAMETER Experiment Name: Zm_Drought_P Parameter: Organism Value: Zea mays
  misc_feature: MA Experiment 20000480 PARAMETER Experiment Name: Zm_Drought_P Parameter: Plant Line Value: 35A19
  misc_feature: MA Experiment 20000480 PARAMETER Experiment Name: Zm_Drought_P Parameter: Timepoint (hr) Value: 72
  misc_feature: MA Experiment 20000480 PARAMETER Experiment Name: Zm_Drought_P Parameter: Tissue Value: Aerial
  misc_feature: MA Experiment 20000480 PARAMETER Experiment Name: Zm_Drought_P Parameter: Treatment Value: Drought vs. No Drought
  misc_feature: MA Experiment ID: 20000535 Result: Down-regulated in Transcription
  misc_feature: MA Experiment 20000535 PARAMETER Experiment Name: Zm_Hybrid_Seed_Dev_P Parameter: DAP Value: 30 vs. 12
  misc_feature: MA Experiment 20000535 PARAMETER Experiment Name: Zm_Hybrid_Seed_Dev_P Parameter: Organism Value: Zea mays
  misc_feature: MA Experiment 20000535 PARAMETER Experiment Name: Zm_Hybrid_Seed_Dev_P Parameter: Plant Line Value: 35A19
  misc_feature: MA Experiment 20000535 PARAMETER Experiment Name: Zm_Hybrid_Seed_Dev_P Parameter: Tissue Value: Embryo vs. Unfert Floret
  misc_feature: MA Experiment ID: 20001608 Result: Down-regulated in Transcription
  misc_feature: MA Experiment 20001608 PARAMETER Experiment Name: Zm_50ppm_KNO3_L-to-H_P Parameter: Age (day) Value: 21
  misc_feature: MA Experiment 20001608 PARAMETER Experiment Name: Zm_50ppm_KNO3_L-to-H_P Parameter: Organism Value: Zea mays
  misc_feature: MA Experiment 20001608 PARAMETER Experiment Name: Zm_50ppm_KNO3_L-to-H_P Parameter: Plant Line Value: 35A19
  misc_feature: MA Experiment 20001608 PARAMETER Experiment Name: Zm_50ppm_KNO3_L-to-H_P Parameter: Timepoint (hr) Value: 48
  misc_feature: MA Experiment 20001608 PARAMETER Experiment Name: Zm_50ppm_KNO3_L-to-H_P Parameter: Tissue Value: Shoots
  misc_feature: MA Experiment 20001608 PARAMETER Experiment Name: Zm_50ppm_KNO3_L-to-H_P Parameter: Treatment Value: 50ppm KNO3 vs. 50ppm KCl
  misc_feature: MA Experiment ID: 20001610 Result: Down-regulated in Transcription
  misc_feature: MA Experiment 20001610 PARAMETER Experiment Name: Zm_50ppm_KNO3_L-to-H_P Parameter: Age (day) Value: 19
  misc_feature: MA Experiment 20001610 PARAMETER Experiment Name: Zm_50ppm_KNO3_L-to-H_P Parameter: Organism Value: Zea mays
  misc_feature: MA Experiment 20001610 PARAMETER Experiment Name: Zm_50ppm_KNO3_L-to-H_P Parameter: Plant Line Value: 35A19
  misc_feature: MA Experiment 20001610 PARAMETER Experiment Name: Zm_50ppm_KNO3_L-to-H_P Parameter: Timepoint (hr) Value: 2
  misc_feature: MA Experiment 20001610 PARAMETER Experiment Name: Zm_50ppm_KNO3_L-to-H_P Parameter: Tissue Value: Roots
  misc_feature: MA Experiment 20001610 PARAMETER Experiment Name: Zm_50ppm_KNO3_L-to-H_P Parameter: Treatment Value: 50ppm KNO3 vs. 50ppm KCl
gaaaaatggcacaagcacacagctcatcagttcttcttcgtcgtcttggctagctgcctagctagctagctagttcctcactcctctccgagaaccccctttttcatctctctctctcgcctagctcctttcgcgatgttatcttctctgctggcctcacaactcgagagagactcgtgaaaagaatccagatatataaagagatcgagggcagctagcttaattattagcatgtcgatgagcttcttgagcatggtggaggcggagctgccgccgggggttccggttccacccgagggacgacgagctcatctgcgactacctcgcgcccaagctcggcgccaagcccggcttctccggctgccgcccgcccatggtcgacgtcgacctcaacaaggtcgagccatgggacctccccgtggcggcgtcggtggggccgcgggagtggtacttcttcagcctcaaggaccgcaagtacgcgacggggcagcggacgaaccgggccacggtgtccgggtactggaaggcgacggggaaggaccgacccgtggtggcggcgcggcgaggcgcgctggtggggatgcgcaagacgctcgtgttctaccaggggagggcgcccaagggcaggaagacggagtgggtgatgcacgagtacaggatggagccagctgctcctcttcttgatcaccaaccctcctcatccaactccaaggatgaagattgggtgctgtgcagagtcatctgcaagaagaaactggcagcaggaggccgcgcaggagggggaagctcaaggagcctggtcgccagcaacggcggccgcgagaccgcgccagccaccccgccgccgccgccgctgccacctcgcatggacacggacgccaccctagcacagctccaggccgccatgcacgccaccgccggcgcgctcgagcaggtgccctgcttctccagcttcaataacaacactactgccagctctagagctgctgccgcagcagcagcagcagcgcagccatgctacctgcccagcatggccacaggcggcagccacggcacgacgagctactacctggaccacgcgatgctgccgcctgagctaggtggctgcttcgatcctctccacggcgacaagagctgctcaaggcggtgctgggccagctcggcggcgacgcggtggcgccgggcctgcacctgcagcacgagatggccgccggcgctgtcgtcgcttcgtccgcttggatgaatcacttctaggggacattagttcagcgaacctaagtatgtgattggttgcgtatattatgggaaatacatacatacatatatacataattgtgtggtgaaacatttgtgtgtgaggcaaggagtagagcatctgagcatgcgtcattttttctgttgctgccgatcgatttggacgagaaggccatgaggcaaggagtaaactctgtaatataatggctgctcaagtgtgtgtacattcagatgc

SEQ ID NO: 5694 - protein, 289 aa, Zea mays subsp. mays
  peptide (1)..(289): Ceres Seq. ID no. 12407942
  misc_feature (1)..(97): Pfam Name: No apical meristem (NAM) protein Pfam Description: No apical meristem (NAM) protein
  misc_feature (1)..(234): Homolog of NCBI NO: 15222818 NR Description: NAC1; protein id: At1g56010.1, supported by cDNA: supported by cDNA: gi_6649235 [Arabidopsis thaliana] NAC1 [Arabidopsis thaliana] >gi|8778319|gb|AAF79328.1|AC002304_21
  misc_feature (1)..(127): Homolog of NCBI NO: 15148912 NR Description: NAC domain protein NAC1 [Phaseolus vulgaris]
  misc_feature (17)..(166): Homolog of NCBI NO: 38344327 NR Description: OSJNBa0058K23.9 [Oryza sativa (japonica
  misc_feature (1)..(15): Homolog of NCBI NO: 38344327 NR Description: OSJNBa0058K23.9 [Oryza sativa (japonica
  misc_feature (17)..(162): Homolog of NCBI NO: 5679845 NR Description: l1332.9 [Oryza sativa (indica cultivar-group)]
  misc_feature (1)..(15): Homolog of NCBI NO: 5679845 NR Description: l1332.9 [Oryza sativa (indica cultivar-group)]
  misc_feature (17)..(162): Homolog of NCBI NO: 5852096 NR Description: zwh19.1 [Oryza sativa (indica cultivar-group)]
  misc_feature (1)..(15): Homolog of NCBI NO: 5852096 NR Description: zwh19.1 [Oryza sativa (indica cultivar-group)]
  misc_feature (1)..(192): Homolog of NCBI NO: 38636961 NR Description: putative NAC domain protein NAC1 [Oryza sativa
  misc_feature (1)..(130): Homolog of NCBI NO: 15795128 NR Description: NAM (no apical meristem) protein-like
MVDVDLNKVEPWDLPVAASVGPREWYFFSLKDRKYATGQRTNRATVSGYWKATGKDRPVVAARRGALVGMRKTLVFYQGRAPKGRKTEWVMHEYRMEPAAPLLDHQPSSSNSKDEDWVLCRVICKKKLAAGGRAGGGSSRSLVASNGGRETAPATPPPPPLPPRMDTDATLAQLQAAMHATAGALEQVPCFSSFNNNTTASSRAAAAAAAAAQPCYLPSMATGGSHGTTSYYLDHAMLPPELGGCFDPLHGDKSCSRRCWASSAATRWRRACTCSTRWPPALSSLRPLG

SEQ ID NO: 5695 - protein, 220 aa, Zea mays subsp. mays
  peptide (1)..(220): Ceres Seq. ID no. 12407943
  misc_feature (1)..(165): Homolog of NCBI NO: 15222818 NR Description: NAC1; protein id: At1g56010.1, supported by cDNA: supported by cDNA: gi_6649235 [Arabidopsis thaliana] NAC1 [Arabidopsis thaliana] >gi|8778319|gb|AAF79328.1|AC002304_21
  misc_feature (1)..(58): Homolog of NCBI NO: 15148912 NR Description: NAC domain protein NAC1 [Phaseolus vulgaris]
  misc_feature (1)..(97): Homolog of NCBI NO: 38344327 NR Description: OSJNBa0058K23.9 [Oryza sativa (japonica
  misc_feature (1)..(93): Homolog of NCBI NO: 5679845 NR Description: l1332.9 [Oryza sativa (indica cultivar-group)]
  misc_feature (1)..(93): Homolog of NCBI NO: 5852096 NR Description: zwh19.1 [Oryza sativa (indica cultivar-group)]
  misc_feature (1)..(123): Homolog of NCBI NO: 38636961 NR Description: putative NAC domain protein NAC1 [Oryza sativa
  misc_feature (1)..(61): Homolog of NCBI NO: 15795128 NR Description: NAM (no apical meristem) protein-like
  misc_feature (1)..(179): Homolog of NCBI NO: 15238882 NR Description: CUC2 (dbj|BAA19529.1); protein id: At5g53950.1 thaliana] >gi|1944132|dbj|BAA19529.1| CUC2 [Arabidopsis thaliana]
  misc_feature (1)..(126): Homolog of NCBI NO: 1279640 NR Description: NAM [Petunia x hybrida]
  misc_feature (1)..(124): Homolog of NCBI NO: 27529810 NR Description: OsNAC2 protein [Oryza sativa]
MRKTLVFYQGRAPKGRKTEWVMHEYRMEPAAPLLDHQPSSSNSKDEDWVLCRVICKKKLAAGGRAGGGSSRSLVASNGGRETAPATPPPPPLPPRMDTDATLAQLQAAMHATAGALEQVPCFSSFNNNTTASSRAAAAAAAAAQPCYLPSMATGGSHGTTSYYLDHAMLPPELGGCFDPLHGDKSCSRRCWASSAATRWRRACTCSTRWPPALSSLRPLG

SEQ ID NO: 5696 - protein, 199 aa, Zea mays subsp. mays
  peptide (1)..(199): Ceres Seq. ID no. 12407944
  misc_feature (1)..(144): Homolog of NCBI NO: 15222818 NR Description: NAC1; protein id: At1g56010.1, supported by cDNA: supported by cDNA: gi_6649235 [Arabidopsis thaliana] NAC1 [Arabidopsis thaliana] >gi|8778319|gb|AAF79328.1|AC002304_21
  misc_feature (1)..(37): Homolog of NCBI NO: 15148912 NR Description: NAC domain protein NAC1 [Phaseolus vulgaris]
  misc_feature (1)..(76): Homolog of NCBI NO: 38344327 NR Description: OSJNBa0058K23.9 [Oryza sativa (japonica
  misc_feature (1)..(72): Homolog of NCBI NO: 5679845 NR Description: l1332.9 [Oryza sativa (indica cultivar-group)]
  misc_feature (1)..(72): Homolog of NCBI NO: 5852096 NR Description: zwh19.1 [Oryza sativa (indica cultivar-group)]
  misc_feature (1)..(102): Homolog of NCBI NO: 38636961 NR Description: putative NAC domain protein NAC1 [Oryza sativa
  misc_feature (1)..(40): Homolog of NCBI NO: 15795128 NR Description: NAM (no apical meristem) protein-like
  misc_feature (1)..(158): Homolog of NCBI NO: 15238882 NR Description: CUC2 (dbj|BAA19529.1); protein id: At5g53950.1 thaliana] >gi|1944132|dbj|BAA19529.1| CUC2 [Arabidopsis thaliana]
  misc_feature (1)..(105): Homolog of NCBI NO: 1279640 NR Description: NAM [Petunia x hybrida]
  misc_feature (1)..(103): Homolog of NCBI NO: 27529810 NR Description: OsNAC2 protein [Oryza sativa]
MHEYRMEPAAPLLDHQPSSSNSKDEDWVLCRVICKKKLAAGGRAGGGSSRSLVASNGGRETAPATPPPPPLPPRMDTDATLAQLQAAMHATAGALEQVPCFSSFNNNTTASSRAAAAAAAAAQPCYLPSMATGGSHGTTSYYLDHAMLPPELGGCFDPLHGDKSCSRRCWASSAATRWRRACTCSTRWPPALSSLRPLG

SEQ ID NO: 5697 - DNA, 1238 bp, Zea mays subsp. mays
  misc_feature (1)..(1238): Ceres Seq. ID no. 12387069
  misc_feature: MA Experiment ID: 108529 Result: Up-regulated in Transcription
  misc_feature: MA Experiment 108529 PARAMETER Experiment Name: Zm_Imbibed_Seeds_P Parameter: Age (day) Value: 5 vs. 2
  misc_feature: MA Experiment 108529 PARAMETER Experiment Name: Zm_Imbibed_Seeds_P Parameter: Organism Value: Zea mays
  misc_feature: MA Experiment 108529 PARAMETER Experiment Name: Zm_Imbibed_Seeds_P Parameter: Plant Line Value: 35A19
  misc_feature: MA Experiment 108529 PARAMETER Experiment Name: Zm_Imbibed_Seeds_P Parameter: Tissue Value: Roots vs. Embryo
  misc_feature: MA Experiment ID: 108530 Result: Up-regulated in Transcription
  misc_feature: MA Experiment 108530 PARAMETER Experiment Name: Zm_Imbibed_Seeds_P Parameter: Age (day) Value: 6 vs. 2
  misc_feature: MA Experiment 108530 PARAMETER Experiment Name: Zm_Imbibed_Seeds_P Parameter: Organism Value: Zea mays
  misc_feature: MA Experiment 108530 PARAMETER Experiment Name: Zm_Imbibed_Seeds_P Parameter: Plant Line Value: 35A19
  misc_feature: MA Experiment 108530 PARAMETER Experiment Name: Zm_Imbibed_Seeds_P Parameter: Tissue Value: Aerial vs. Embryo
  misc_feature: MA Experiment ID: 108535 Result: Down-regulated in Transcription
  misc_feature: MA Experiment 108535 PARAMETER Experiment Name: Zm_Meristem_P Parameter: Age (day) Value: 8
  misc_feature: MA Experiment 108535 PARAMETER Experiment Name: Zm_Meristem_P Parameter: Organism Value: Zea mays
  misc_feature: MA Experiment 108535 PARAMETER Experiment Name: Zm_Meristem_P Parameter: Plant Line Value: 35A19
  misc_feature: MA Experiment 108535 PARAMETER Experiment Name: Zm_Meristem_P Parameter: Tissue Value: Root Meristem vs. Above Root Meristem
  misc_feature: MA Experiment ID: 108546 Result: Up-regulated in Transcription
  misc_feature: MA Experiment 108546 PARAMETER Experiment Name: Zm_Imbibed_Seeds_P Parameter: Age (day) Value: 3 vs. 2
  misc_feature: MA Experiment 108546 PARAMETER Experiment Name: Zm_Imbibed_Seeds_P Parameter: Organism Value: Zea mays
  misc_feature: MA Experiment 108546 PARAMETER Experiment Name: Zm_Imbibed_Seeds_P Parameter: Plant Line Value: 35A19
  misc_feature: MA Experiment 108546 PARAMETER Experiment Name: Zm_Imbibed_Seeds_P Parameter: Tissue Value: Roots vs. Embryo
  misc_feature: MA Experiment ID: 20000492 Result: Down-regulated in Transcription
  misc_feature: MA Experiment 20000492 PARAMETER Experiment Name: Zm_Hybrid_Seed_Dev_P Parameter: DAP Value: 12
  misc_feature: MA Experiment 20000492 PARAMETER Experiment Name: Zm_Hybrid_Seed_Dev_P Parameter: Organism Value: Zea mays
  misc_feature: MA Experiment 20000492 PARAMETER Experiment Name: Zm_Hybrid_Seed_Dev_P Parameter: Plant Line Value: 35A19
  misc_feature: MA Experiment 20000492 PARAMETER Experiment Name: Zm_Hybrid_Seed_Dev_P Parameter: Tissue Value: Fert Kernel vs. Unfert Floret
  misc_feature: MA Experiment ID: 20000535 Result: Down-regulated in Transcription
  misc_feature: MA Experiment 20000535 PARAMETER Experiment Name: Zm_Hybrid_Seed_Dev_P Parameter: DAP Value: 30 vs. 12
  misc_feature: MA Experiment 20000535 PARAMETER Experiment Name: Zm_Hybrid_Seed_Dev_P Parameter: Organism Value: Zea mays
  misc_feature: MA Experiment 20000535 PARAMETER Experiment Name: Zm_Hybrid_Seed_Dev_P Parameter: Plant Line Value: 35A19
  misc_feature: MA Experiment 20000535 PARAMETER Experiment Name: Zm_Hybrid_Seed_Dev_P Parameter: Tissue Value: Embryo vs. Unfert Floret
attccctcgctcgcggccttgtacagcatactgtccttgcggcgctgctggctccgccgggtgttgggtcaacgttctcccgtccccccgagcgcagtctcgcgtggttctcccgtcccccgaggcccgagcgtagtctctctcttttgccgtggttctccagtcctccctcatccgctctctttctttctctcgtggcgagtggtaacgacgtcaggtgctcaggtcttgttcaggcccttcgccggcgacgagcacacagcaaatggatacaggagctcaagctatgttcatcatcagtcttgtgctctggtgtactacaagctttgccttggatgatgctgctgctacaaggattccaattgtgggcacattacctctgtcaatgaaagaaaatccgcaattatgccaactttgtgaggagtttgcatcagaggccctcttctatttaaatgaaaatgagacccagactgaaatcattgatacactacaccaagcttgttcaaagtttggctcttttaagctggagtgcacgaggttggtggattattatgtccctcttttcttcacaaaaattgcttcattaagccctgaagaattttgtgcatcagcaagtttttgtggggaggtaacattcattcgtcttccaagacatgaagatacttgcaccctttgccatgaggttgtcgatgaggttgttactaatcttgaagatccaggcatggagcttaagataattgagatacttctgaaaggatgcaataatgcagaggattatgtacaaaagtgcaagaggttgataatccaaaatgcacctatcataatggagaatattaagaagttcctcgagaagagagatttttgcaattctatccatgtctgtggaagtaaatccgttcgcgctggatcacaagtcctcagaagcctttcttcagcctgaagccctgaacttgcacggattgttatgatcatgcaacagatattagtgtaaaaacaagtccaggcgccgctatgtgagtcccgtgtgacatcgactgtacagatttggctgtgtacatgttaaaggaaaacacaactgaggcacaaacctcttctgtttacgggtcatgagcagggtgtgtatttgaactgtatatcattataccttggattggatgtcatgttgctctatatttatacgtaaccgagttttgtaactttggagaagtaatgtatatgatgccaaagcttgatcttcc

SEQ ID NO: 5698 - protein, 224 aa, Zea mays subsp. mays
  peptide (1)..(224): Ceres Seq. ID no. 12387070
  misc_feature (46)..(83): Pfam Name: Saposin-like type B, region 1 Pfam Description: Saposin-like type B, region 1
  misc_feature (44)..(223): Homolog of NCBI NO: 34896130 NR Description: P0701D05.19 [Oryza sativa (japonica >gi|13486662|dbj|BAB39899.1| hypothetical protein~similar to
  misc_feature (39)..(211): Homolog of NCBI NO: 15231028 NR Description: putative protein; protein id: At3g51730.1, by cDNA: 93651. [Arabidopsis thaliana] >gi|11358088|pir||T46069
  misc_feature (50)..(207): Homolog of NCBI NO: 6942199 NR Description: putative protein [Vitis riparia]
  misc_feature (40)..(224): Homolog of NCBI NO: 15241065 NR Description: putative protein; protein id: At5g01800.1, by cDNA: gi_15912284, supported by cDNA: gi_19548000 [Arabidopsis
  misc_feature (42)..(212): Homolog of NCBI NO: 7511780 NR Description: P109 protein - silkworm
MDTGAQAMFIISLVLWCTTSFALDDAAATRIPIVGTLPLSMKENPQLCQLCEEFASEALFYLNENETQTEIIDTLHQACSKFGSFKLECTRLVDYYVPLFFTKIASLSPEEFCASASFCGEVTFIRLPRHEDTCTLCHEVVDEVVTNLEDPGMELKIIEILLKGCNNAEDYVQKCKRLIIQNAPIIMENIKKFLEKRDFCNSIHVCGSKSVRAGSQVLRSLSSA

SEQ ID NO: 5699 - protein, 217 aa, Zea mays subsp. mays
  peptide (1)..(217): Ceres Seq. ID no. 12387071
  misc_feature (39)..(76): Pfam Name: Saposin-like type B, region 1 Pfam Description: Saposin-like type B, region 1
  misc_feature (37)..(216): Homolog of NCBI NO: 34896130 NR Description: P0701D05.19 [Oryza sativa (japonica >gi|13486662|dbj|BAB39899.1| hypothetical protein~similar to
  misc_feature (32)..(204): Homolog of NCBI NO: 15231028 NR Description: putative protein; protein id: At3g51730.1, by cDNA: 93651. [Arabidopsis thaliana] >gi|11358088|pir||T46069
  misc_feature (43)..(200): Homolog of NCBI NO: 6942199 NR Description: putative protein [Vitis riparia]
  misc_feature (33)..(217): Homolog of NCBI NO: 15241065 NR Description: putative protein; protein id: At5g01800.1, by cDNA: gi_15912284, supported by cDNA: gi_19548000 [Arabidopsis
  misc_feature (35)..(205): Homolog of NCBI NO: 7511780 NR Description: P109 protein - silkworm
MFIISLVLWCTTSFALDDAAATRIPIVGTLPLSMKENPQLCQLCEEFASEALFYLNENETQTEIIDTLHQACSKFGSFKLECTRLVDYYVPLFFTKIASLSPEEFCASASFCGEVTFIRLPRHEDTCTLCHEVVDEVVTNLEDPGMELKIIEILLKGCNNAEDYVQKCKRLIIQNAPIIMENIKKFLEKRDFCNSIHVCGSKSVRAGSQVLRSLSSA

SEQ ID NO: 5700 - protein, 184 aa, Zea mays subsp. mays
  peptide (1)..(184): Ceres Seq. ID no. 12387072
  misc_feature (6)..(43): Pfam Name: Saposin-like type B, region 1 Pfam Description: Saposin-like type B, region 1
  misc_feature (4)..(183): Homolog of NCBI NO: 34896130 NR Description: P0701D05.19 [Oryza sativa (japonica >gi|13486662|dbj|BAB39899.1| hypothetical protein~similar to
  misc_feature (1)..(171): Homolog of NCBI NO: 15231028 NR Description: putative protein; protein id: At3g51730.1, by cDNA: 93651. [Arabidopsis thaliana] >gi|11358088|pir||T46069
  misc_feature (10)..(167): Homolog of NCBI NO: 6942199 NR Description: putative protein [Vitis riparia]
  misc_feature (1)..(184): Homolog of NCBI NO: 15241065 NR Description: putative protein; protein id: At5g01800.1, by cDNA: gi_15912284, supported by cDNA: gi_19548000 [Arabidopsis
  misc_feature (2)..(172): Homolog of NCBI NO: 7511780 NR Description: P109 protein - silkworm
MKENPQLCQLCEEFASEALFYLNENETQTEIIDTLHQACSKFGSFKLECTRLVDYYVPLFFTKIASLSPEEFCASASFCGEVTFIRLPRHEDTCTLCHEVVDEVVTNLEDPGMELKIIEILLKGCNNAEDYVQKCKRLIIQNAPIIMENIKKFLEKRDFCNSIHVCGSKSVRAGSQVLRSLSSA

SEQ ID NO: 5701 - DNA, 1337 bp, Zea mays subsp. mays
  misc_feature (1)..(1337): Ceres Seq. ID no. 12409361
  misc_feature: MA Experiment ID: 108522 Result: Up-regulated in Transcription
  misc_feature: MA Experiment 108522 PARAMETER Experiment Name: Zm_42deg_Heat_P Parameter: Age (day) Value: 8
  misc_feature: MA Experiment 108522 PARAMETER Experiment Name: Zm_42deg_Heat_P Parameter: Organism Value: Zea mays
  misc_feature: MA Experiment 108522 PARAMETER Experiment Name: Zm_42deg_Heat_P Parameter: Plant Line Value: 35A19
  misc_feature: MA Experiment 108522 PARAMETER Experiment Name: Zm_42deg_Heat_P Parameter: Temperature (deg C) Value: 42 vs. 22
  misc_feature: MA Experiment 108522 PARAMETER Experiment Name: Zm_42deg_Heat_P Parameter: Timepoint (hr) Value: 1
  misc_feature: MA Experiment 108522 PARAMETER Experiment Name: Zm_42deg_Heat_P Parameter: Tissue Value: Aerial
  misc_feature: MA Experiment ID: 108523 Result: Up-regulated in Transcription
  misc_feature: MA Experiment 108523 PARAMETER Experiment Name: Zm_42deg_Heat_P Parameter: Age (day) Value: 8
  misc_feature: MA Experiment 108523 PARAMETER Experiment Name: Zm_42deg_Heat_P Parameter: Organism Value: Zea mays
  misc_feature: MA Experiment 108523 PARAMETER Experiment Name: Zm_42deg_Heat_P Parameter: Plant Line Value: 35A19
  misc_feature: MA Experiment 108523 PARAMETER Experiment Name: Zm_42deg_Heat_P Parameter: Temperature (deg C) Value: 42 vs. 22
  misc_feature: MA Experiment 108523 PARAMETER Experiment Name: Zm_42deg_Heat_P Parameter: Timepoint (hr) Value: 6
  misc_feature: MA Experiment 108523 PARAMETER Experiment Name: Zm_42deg_Heat_P Parameter: Tissue Value: Aerial
  misc_feature: MA Experiment ID: 108526 Result: Up-regulated in Transcription
  misc_feature: MA Experiment 108526 PARAMETER Experiment Name: Zm_5mM_NO_P Parameter: Age (day) Value: 8
  misc_feature: MA Experiment 108526 PARAMETER Experiment Name: Zm_5mM_NO_P Parameter: Organism Value: Zea mays
  misc_feature: MA Experiment 108526 PARAMETER Experiment Name: Zm_5mM_NO_P Parameter: Plant Line Value: 35A19
  misc_feature: MA Experiment 108526 PARAMETER Experiment Name: Zm_5mM_NO_P Parameter: Timepoint (hr) Value: 1
  misc_feature: MA Experiment 108526 PARAMETER Experiment Name: Zm_5mM_NO_P Parameter: Tissue Value: Aerial
  misc_feature: MA Experiment 108526 PARAMETER Experiment Name: Zm_5mM_NO_P Parameter: Treatment Value: 5mM NO vs. No Treatment
  misc_feature: MA Experiment ID: 108527 Result: Up-regulated in Transcription
  misc_feature: MA Experiment 108527 PARAMETER Experiment Name: Zm_5mM_NO_P Parameter: Age (day) Value: 8
  misc_feature: MA Experiment 108527 PARAMETER Experiment Name: Zm_5mM_NO_P Parameter: Organism Value: Zea mays
  misc_feature: MA Experiment 108527 PARAMETER Experiment Name: Zm_5mM_NO_P Parameter: Plant Line Value: 35A19
  misc_feature: MA Experiment 108527 PARAMETER Experiment Name: Zm_5mM_NO_P Parameter: Timepoint (hr) Value: 6
  misc_feature: MA Experiment 108527 PARAMETER Experiment Name: Zm_5mM_NO_P Parameter: Tissue Value: Aerial
  misc_feature: MA Experiment 108527 PARAMETER Experiment Name: Zm_5mM_NO_P Parameter: Treatment Value: 5mM NO vs. No Treatment
  misc_feature: MA Experiment ID: 108529 Result: Up-regulated in Transcription
  misc_feature: MA Experiment 108529 PARAMETER Experiment Name: Zm_Imbibed_Seeds_P Parameter: Age (day) Value: 5 vs. 2
  misc_feature: MA Experiment 108529 PARAMETER Experiment Name: Zm_Imbibed_Seeds_P Parameter: Organism Value: Zea mays
  misc_feature: MA Experiment 108529 PARAMETER Experiment Name: Zm_Imbibed_Seeds_P Parameter: Plant Line Value: 35A19
  misc_feature: MA Experiment 108529 PARAMETER Experiment Name: Zm_Imbibed_Seeds_P Parameter: Tissue Value: Roots vs. Embryo
  misc_feature: MA Experiment ID: 108542 Result: Up-regulated in Transcription
  misc_feature: MA Experiment 108542 PARAMETER Experiment Name: Zm_150mM_NaCl_P Parameter: Age (day) Value: 8
  misc_feature: MA Experiment 108542 PARAMETER Experiment Name: Zm_150mM_NaCl_P Parameter: Organism Value: Zea mays
  misc_feature: MA Experiment 108542 PARAMETER Experiment Name: Zm_150mM_NaCl_P Parameter: Plant Line Value: 35A19
  misc_feature: MA Experiment 108542 PARAMETER Experiment Name: Zm_150mM_NaCl_P Parameter: Timepoint (hr) Value: 6
  misc_feature: MA Experiment 108542 PARAMETER Experiment Name: Zm_150mM_NaCl_P Parameter: Tissue Value: Aerial
  misc_feature: MA Experiment 108542 PARAMETER Experiment Name: Zm_150mM_NaCl_P Parameter: Treatment Value: 150mM NaCl vs. No Treatment
  misc_feature: MA Experiment ID: 108543 Result: Down-regulated in Transcription
  misc_feature: MA Experiment ID: 108559 Result: Up-regulated in Transcription
  misc_feature: MA Experiment 108559 PARAMETER Experiment Name: Zm_5mM_NO_P Parameter: Age (day) Value: 8
  misc_feature: MA Experiment 108559 PARAMETER Experiment Name: Zm_5mM_NO_P Parameter: Organism Value: Zea mays
  misc_feature: MA Experiment 108559 PARAMETER Experiment Name: Zm_5mM_NO_P Parameter: Plant Line Value: 35A19
  misc_feature: MA Experiment 108559 PARAMETER Experiment Name: Zm_5mM_NO_P Parameter: Timepoint (hr) Value: 12
  misc_feature: MA Experiment 108559 PARAMETER Experiment Name: Zm_5mM_NO_P Parameter: Tissue Value: Aerial
  misc_feature: MA Experiment 108559 PARAMETER Experiment Name: Zm_5mM_NO_P Parameter: Treatment Value: 5mM NO vs. No Treatment
  misc_feature: MA Experiment ID: 108688 Result: Down-regulated in Transcription
  misc_feature: MA Experiment 108688 PARAMETER Experiment Name: Zm_Embryos-Flowers__P Parameter: Tissue Value: Immature Flowers vs. Aerial+
  misc_feature: MA Experiment ID: 108689 Result: Down-regulated in Transcription
  misc_feature: MA Experiment 108689 PARAMETER Experiment Name: Zm_Drought_Roots_P Parameter: Age (day) Value: 9
  misc_feature: MA Experiment 108689 PARAMETER Experiment Name: Zm_Drought_Roots_P Parameter: Organism Value: Zea mays
  misc_feature: MA Experiment 108689 PARAMETER Experiment Name: Zm_Drought_Roots_P Parameter: Plant Line Value: 35A19
  misc_feature: MA Experiment 108689 PARAMETER Experiment Name: Zm_Drought_Roots_P Parameter: Timepoint (hr) Value: 24
  misc_feature: MA Experiment 108689 PARAMETER Experiment Name: Zm_Drought_Roots_P Parameter: Tissue Value: Roots
  misc_feature: MA Experiment 108689 PARAMETER Experiment Name: Zm_Drought_Roots_P Parameter: Treatment Value: Drought vs. No Drought
aactgataaaaggaccatggtactcgcaaagcgataggaagccaccgaaggagagaattggatagcagagagtttgcgtgtggaagcagagatggggtccggcatgagccgcggccggcggcgcggtttcggcgcaggggcgtcgggagggatgctgccactgctggcgcttcaggttctgatcgagtacggccgcgcgggcgcctctcggccgcccgtgacggcggcgttgctcgccggcaacgcgctcatctatctccgtcccggggcgctcgacgggatcctgccctctgtcacacgcgtctccttcaatccgcggctcatcgtcgagaatggcgacttggtgcgcttcttcttgtcaccattctaccacttgagcgaaagccacctgttctacaatatgacatcgctcctatggaagggtattcagcttgaaacatccatgggtagtgtcgagttcgcttccatggttgctgcattgcttgggctgtcacagggcatcgcgctgctcttgtccaaaggcctactcttgcttggtgattatactgcgtactacgaccaatacgcggttgggttctctggtgttctgtttgccatgaaggttgtgctgaacgcctggtcagaagattttgtctatctgcatgggatggtcattccggcgaaatacgctgcctgggctgagttgatcctcatccaggtcttcattcctggcacatcttttcttggccatctcagtggaatacttgctggattggtttacctttggctgaagcgggcgttgaatgggccagatcccctcactcttctggtgtcaagcattaccaaagtcgtgacctggccagtaagatttgcgcagaatcttctatggtctgcccatccacagggacgctttagaggccggggcagggttgggcgccggcaatcagcaagagatactcctcgaggtctatggagatgcccagcctgcacctatgacaactcagtttccacagatatctgtgagatgtgcagcactgcacgagaggaccatgatttttcgctgaggcagtatcatcaggctggaggtactggagaactcacagttgatgagatacgccgaaggaggctgcaaagattcggtagatgatgtaaatccattgttatcagcacactttgtgcggcgctgaacgaagctctatatgagtatgtatgatagctccattcctctgctacatagcgtaggcatatttggttcttctcgtgatggagaatgctttacattattgaattgtttctcatttttgaaggagacagttactgatgtaattttaggtacttcaaagccatagaagtatagt

SEQ ID NO: 5702 - protein, 344 aa, Zea mays subsp. mays
  peptide (1)..(344): Ceres Seq. ID no. 12409362
  misc_feature (284)..(312): Pfam Name: Zn-finger in Ran binding protein and others Pfam Description: Zn-finger in Ran binding protein and others
  misc_feature (1)..(344): Homolog of NCBI NO: 34902516 NR Description: P0581F09.16 [Oryza sativa (japonica >gi|13486724|dbj|BAB39959.1| hypothetical protein~similar to thaliana chromosome 3, MKP6.17 [Oryza sativa (japonica sativa
  misc_feature (13)..(342): Homolog of NCBI NO: 9294149 NR Description: gene_id:MKP6.17~unknown protein [Arabidopsis
  misc_feature (13)..(342): Homolog of NCBI NO: 30684602 NR Description: expressed protein [Arabidopsis thaliana] unknown protein [Arabidopsis thaliana]
  misc_feature (35)..(193): Homolog of NCBI NO: 18419592 NR Description: unknown [Narcissus pseudonarcissus]
  misc_feature (16)..(223): Homolog of NCBI NO: 33300639 NR Description: hypothetical protein DKFZp547E052 [Homo sapiens]
  misc_feature (5)..(223): Homolog of NCBI NO: 16041108 NR Description: hypothetical protein [Macaca fascicularis]
  misc_feature (16)..(223): Homolog of NCBI NO: 26325686 NR Description: unnamed protein product [Mus musculus] unnamed protein product [Mus musculus]
  misc_feature (16)..(223): Homolog of NCBI NO: 34876979 NR Description: hypothetical protein XP_237331 [Rattus norvegicus]
  misc_feature (41)..(260): Homolog of NCBI NO: 11357444 NR Description: hypothetical protein F14P22.50 - Arabidopsis >gi|6735363|emb|CAB68184.1| putative protein [Arabidopsis
  misc_feature (41)..(223): Homolog of NCBI NO: 18410961 NR Description: putative protein; protein id: At3g58460.1, by cDNA: 35896. [Arabidopsis thaliana] putative protein [Arabidopsis thaliana]
MGSGMSRGRRRGFGAGASGGMLPLLALQVLIEYGRAGASRPPVTAALLAGNALIYLRPGALDGILPSVTRVSFNPRLIVENGDLVRFFLSPFYHLSESHLFYNMTSLLWKGIQLETSMGSVEFASMVAALLGLSQGIALLLSKGLLLLGDYTAYYDQYAVGFSGVLFAMKVVLNAWSEDFVYLHGMVIPAKYAAWAELILIQVFIPGTSFLGHLSGILAGLVYLWLKRALNGPDPLTLLVSSITKVVTWPVRFAQNLLWSAHPQGRFRGRGRVGRRQSARDTPRGLWRCPACTYDNSVSTDICEMCSTAREDHDFSLRQYHQAGGTGELTVDEIRRRRLQRFGR

SEQ ID NO: 5703 - protein, 340 aa, Zea mays subsp. mays
  peptide (1)..(340): Ceres Seq. ID no. 12409363
  misc_feature (280)..(308): Pfam Name: Zn-finger in Ran binding protein and others Pfam Description: Zn-finger in Ran binding protein and others
  misc_feature (1)..(340): Homolog of NCBI NO: 34902516 NR Description: P0581F09.16 [Oryza sativa (japonica >gi|13486724|dbj|BAB39959.1| hypothetical protein~similar to thaliana chromosome 3, MKP6.17 [Oryza sativa (japonica sativa
  misc_feature (9)..(338): Homolog of NCBI NO: 9294149 NR Description: gene_id:MKP6.17~unknown protein [Arabidopsis
  misc_feature (9)..(338): Homolog of NCBI NO: 30684602 NR Description: expressed protein [Arabidopsis thaliana] unknown protein [Arabidopsis thaliana]
  misc_feature (31)..(189): Homolog of NCBI NO: 18419592 NR Description: unknown [Narcissus pseudonarcissus]
  misc_feature (12)..(219): Homolog of NCBI NO: 33300639 NR Description: hypothetical protein DKFZp547E052 [Homo sapiens]
  misc_feature (1)..(219): Homolog of NCBI NO: 16041108 NR Description: hypothetical protein [Macaca fascicularis]
  misc_feature (12)..(219): Homolog of NCBI NO: 26325686 NR Description: unnamed protein product [Mus musculus] unnamed protein product [Mus musculus]
  misc_feature (12)..(219): Homolog of NCBI NO: 34876979 NR Description: hypothetical protein XP_237331 [Rattus norvegicus]
  misc_feature (37)..(256): Homolog of NCBI NO: 11357444 NR Description: hypothetical protein F14P22.50 - Arabidopsis >gi|6735363|emb|CAB68184.1| putative protein [Arabidopsis
  misc_feature (37)..(219): Homolog of NCBI NO: 18410961 NR Description: putative protein; protein id: At3g58460.1, by cDNA: 35896. [Arabidopsis thaliana] putative protein [Arabidopsis thaliana]
MSRGRRRGFGAGASGGMLPLLALQVLIEYGRAGASRPPVTAALLAGNALIYLRPGALDGILPSVTRVSFNPRLIVENGDLVRFFLSPFYHLSESHLFYNMTSLLWKGIQLETSMGSVEFASMVAALLGLSQGIALLLSKGLLLLGDYTAYYDQYAVGFSGVLFAMKVVLNAWSEDFVYLHGMVIPAKYAAWAELILIQVFIPGTSFLGHLSGILAGLVYLWLKRALNGPDPLTLLVSSITKVVTWPVRFAQNLLWSAHPQGRFRGRGRVGRRQSARDTPRGLWRCPACTYDNSVSTDICEMCSTAREDHDFSLRQYHQAGGTGELTVDEIRRRRLQRFGR

SEQ ID NO: 5704 - protein, 324 aa, Zea mays subsp. mays
  peptide (1)..(324): Ceres Seq. ID no. 12409364
  misc_feature (264)..(292): Pfam Name: Zn-finger in Ran binding protein and others Pfam Description: Zn-finger in Ran binding protein and others
  misc_feature (1)..(324): Homolog of NCBI NO: 34902516 NR Description: P0581F09.16 [Oryza sativa (japonica >gi|13486724|dbj|BAB39959.1| hypothetical protein~similar to thaliana chromosome 3, MKP6.17 [Oryza sativa (japonica sativa
  misc_feature (1)..(322): Homolog of NCBI NO: 9294149 NR Description: gene_id:MKP6.17~unknown protein [Arabidopsis
  misc_feature (1)..(322): Homolog of NCBI NO: 30684602 NR Description: expressed protein [Arabidopsis thaliana] unknown protein [Arabidopsis thaliana]
  misc_feature (15)..(173): Homolog of NCBI NO: 18419592 NR Description: unknown [Narcissus pseudonarcissus]
  misc_feature (1)..(203): Homolog of NCBI NO: 33300639 NR Description: hypothetical protein DKFZp547E052 [Homo sapiens]
  misc_feature (1)..(203): Homolog of NCBI NO: 16041108 NR Description: hypothetical protein [Macaca fascicularis]
  misc_feature (1)..(203): Homolog of NCBI NO: 26325686 NR Description: unnamed protein product [Mus musculus] unnamed protein product [Mus musculus]
  misc_feature (1)..(203): Homolog of NCBI NO: 34876979 NR Description: hypothetical protein XP_237331 [Rattus norvegicus]
  misc_feature (21)..(240): Homolog of NCBI NO: 11357444 NR Description: hypothetical protein F14P22.50 - Arabidopsis >gi|6735363|emb|CAB68184.1| putative protein [Arabidopsis
  misc_feature (21)..(203): Homolog of NCBI NO: 18410961 NR Description: putative protein; protein id: At3g58460.1, by cDNA: 35896. [Arabidopsis thaliana] putative protein [Arabidopsis thaliana]
MLPLLALQVLIEYGRAGASRPPVTAALLAGNALIYLRPGALDGILPSVTRVSFNPRLIVENGDLVRFFLSPFYHLSESHLFYNMTSLLWKGIQLETSMGSVEFASMVAALLGLSQGIALLLSKGLLLLGDYTAYYDQYAVGFSGVLFAMKVVLNAWSEDFVYLHGMVIPAKYAAWAELILIQVFIPGTSFLGHLSGILAGLVYLWLKRALNGPDPLTLLVSSITKVVTWPVRFAQNLLWSAHPQGRFRGRGRVGRRQSARDTPRGLWRCPACTYDNSVSTDICEMCSTAREDHDFSLRQYHQAGGTGELTVDEIRRRRLQRFGR

SEQ ID NO: 5705 - DNA, 770 bp, Zea mays subsp. mays
  misc_feature (1)..(770): Ceres Seq. ID no. 12343798
  misc_feature: MA Experiment ID: 108529 Result: Down-regulated in Transcription
  misc_feature: MA Experiment 108529 PARAMETER Experiment Name: Zm_Imbibed_Seeds_P Parameter: Age (day) Value: 5 vs. 2
  misc_feature: MA Experiment 108529 PARAMETER Experiment Name: Zm_Imbibed_Seeds_P Parameter: Organism Value: Zea mays
  misc_feature: MA Experiment 108529 PARAMETER Experiment Name: Zm_Imbibed_Seeds_P Parameter: Plant Line Value: 35A19
  misc_feature: MA Experiment 108529 PARAMETER Experiment Name: Zm_Imbibed_Seeds_P Parameter: Tissue Value: Roots vs. Embryo
  misc_feature: MA Experiment ID: 108543 Result: Up-regulated in Transcription
  misc_feature: MA Experiment ID: 108545 Result: Up-regulated in Transcription
  misc_feature: MA Experiment 108545 PARAMETER Experiment Name: Zm_Imbibed_Seeds_P Parameter: Age (day) Value: 3 vs. 2
  misc_feature: MA Experiment 108545 PARAMETER Experiment Name: Zm_Imbibed_Seeds_P Parameter: Organism Value: Zea mays
  misc_feature: MA Experiment 108545 PARAMETER Experiment Name: Zm_Imbibed_Seeds_P Parameter: Plant Line Value: 35A19
  misc_feature: MA Experiment 108545 PARAMETER Experiment Name: Zm_Imbibed_Seeds_P Parameter: Tissue Value: Aerial vs. Embryo
  misc_feature: MA Experiment ID: 108546 Result: Down-regulated in Transcription
  misc_feature: MA Experiment 108546 PARAMETER Experiment Name: Zm_Imbibed_Seeds_P Parameter: Age (day) Value: 3 vs. 2
  misc_feature: MA Experiment 108546 PARAMETER Experiment Name: Zm_Imbibed_Seeds_P Parameter: Organism Value: Zea mays
  misc_feature: MA Experiment 108546 PARAMETER Experiment Name: Zm_Imbibed_Seeds_P Parameter: Plant Line Value: 35A19
  misc_feature: MA Experiment 108546 PARAMETER Experiment Name: Zm_Imbibed_Seeds_P Parameter: Tissue Value: Roots vs. Embryo
  misc_feature: MA Experiment ID: 108597 Result: Down-regulated in Transcription
  misc_feature: MA Experiment 108597 PARAMETER Experiment Name: Zm_100uM_ABA_P Parameter: Age (day) Value: 9
  misc_feature: MA Experiment 108597 PARAMETER Experiment Name: Zm_100uM_ABA_P Parameter: Organism Value: Zea mays
  misc_feature: MA Experiment 108597 PARAMETER Experiment Name: Zm_100uM_ABA_P Parameter: Plant Line Value: 35A19
  misc_feature: MA Experiment 108597 PARAMETER Experiment Name: Zm_100uM_ABA_P Parameter: Timepoint (hr) Value: 24
  misc_feature: MA Experiment 108597 PARAMETER Experiment Name: Zm_100uM_ABA_P Parameter: Tissue Value: Aerial
  misc_feature: MA Experiment 108597 PARAMETER Experiment Name: Zm_100uM_ABA_P Parameter: Treatment Value: 100uM ABA vs. No Treatment
  misc_feature: MA Experiment ID: 20000477 Result: Down-regulated in Transcription
  misc_feature: MA Experiment 20000477 PARAMETER Experiment Name: Zm_5mM_SA_P Parameter: Age (day) Value: 10
  misc_feature: MA Experiment 20000477 PARAMETER Experiment Name: Zm_5mM_SA_P Parameter: Organism Value: Zea mays
  misc_feature: MA Experiment 20000477 PARAMETER Experiment Name: Zm_5mM_SA_P Parameter: Plant Line Value: 35A19
  misc_feature: MA Experiment 20000477 PARAMETER Experiment Name: Zm_5mM_SA_P Parameter: Timepoint (hr) Value: 48
  misc_feature: MA Experiment 20000477 PARAMETER Experiment Name: Zm_5mM_SA_P Parameter: Tissue Value: Aerial
  misc_feature: MA Experiment 20000477 PARAMETER Experiment Name: Zm_5mM_SA_P Parameter: Treatment Value: 5mM SA vs. No Treatment
  misc_feature: MA Experiment ID: 20000478 Result: Down-regulated in Transcription
  misc_feature: MA Experiment 20000478 PARAMETER Experiment Name: Zm_5mM_SA_P Parameter: Age (day) Value: 11
  misc_feature: MA Experiment 20000478 PARAMETER Experiment Name: Zm_5mM_SA_P Parameter: Organism Value: Zea mays
  misc_feature: MA Experiment 20000478 PARAMETER Experiment Name: Zm_5mM_SA_P Parameter: Plant Line Value: 35A19
  misc_feature: MA Experiment 20000478 PARAMETER Experiment Name: Zm_5mM_SA_P Parameter: Timepoint (hr) Value: 72
  misc_feature: MA Experiment 20000478 PARAMETER Experiment Name: Zm_5mM_SA_P Parameter: Tissue Value: Aerial
  misc_feature: MA Experiment 20000478 PARAMETER Experiment Name: Zm_5mM_SA_P Parameter: Treatment Value: 5mM SA vs. No Treatment
  misc_feature: MA Experiment ID: 20000487 Result: Down-regulated in Transcription
  misc_feature: MA Experiment 20000487 PARAMETER Experiment Name: Zm_50mM_NH4NO3_L_to_H_P Parameter: Organism Value: Zea mays
  misc_feature: MA Experiment 20000487 PARAMETER Experiment Name: Zm_50mM_NH4NO3_L_to_H_P Parameter: Timepoint (hr) Value: 4
  misc_feature: MA Experiment 20000487 PARAMETER Experiment Name: Zm_50mM_NH4NO3_L_to_H_P Parameter: Tissue Value: Leaves
  misc_feature: MA Experiment 20000487 PARAMETER Experiment Name: Zm_50mM_NH4NO3_L_to_H_P Parameter: Treatment Value: 50mM NH4NO3 vs. 100mM Mannitol
  misc_feature: MA Experiment ID: 20000492 Result: Up-regulated in Transcription
  misc_feature: MA Experiment 20000492 PARAMETER Experiment Name: Zm_Hybrid_Seed_Dev_P Parameter: DAP Value: 12
  misc_feature: MA Experiment 20000492 PARAMETER Experiment Name: Zm_Hybrid_Seed_Dev_P Parameter: Organism Value: Zea mays
  misc_feature: MA Experiment 20000492 PARAMETER Experiment Name: Zm_Hybrid_Seed_Dev_P Parameter: Plant Line Value: 35A19
  misc_feature: MA Experiment 20000492 PARAMETER Experiment Name: Zm_Hybrid_Seed_Dev_P Parameter: Tissue Value: Fert Kernel vs. Unfert Floret
  misc_feature: MA Experiment ID: 20000535 Result: Up-regulated in Transcription
  misc_feature: MA Experiment 20000535 PARAMETER Experiment Name: Zm_Hybrid_Seed_Dev_P Parameter: DAP Value: 30 vs. 12
  misc_feature: MA Experiment 20000535 PARAMETER Experiment Name: Zm_Hybrid_Seed_Dev_P Parameter: Organism Value: Zea mays
  misc_feature: MA Experiment 20000535 PARAMETER Experiment Name: Zm_Hybrid_Seed_Dev_P Parameter: Plant Line Value: 35A19
  misc_feature: MA Experiment 20000535 PARAMETER Experiment Name: Zm_Hybrid_Seed_Dev_P Parameter: Tissue Value: Embryo vs. Unfert Floret
  misc_feature: MA Experiment ID: 20000626 Result: Down-regulated in Transcription
  misc_feature: MA Experiment 20000626 PARAMETER Experiment Name: Zm_Herbicide-Treatments_P Parameter: Timepoint (hr) Value: 12
  misc_feature: MA Experiment 20000626 PARAMETER Experiment Name: Zm_Herbicide-Treatments_P Parameter: Tissue Value: Aerial
  misc_feature: MA Experiment 20000626 PARAMETER Experiment Name: Zm_Herbicide-Treatments_P Parameter: Treatment Value: Roundup vs. No Treatment
  misc_feature: MA Experiment ID: 20001608 Result: Up-regulated in Transcription
  misc_feature: MA Experiment 20001608 PARAMETER Experiment Name: Zm_50ppm_KNO3_L-to-H_P Parameter: Age (day) Value: 21
  misc_feature: MA Experiment 20001608 PARAMETER Experiment Name: Zm_50ppm_KNO3_L-to-H_P Parameter: Organism Value: Zea mays
  misc_feature: MA Experiment 20001608 PARAMETER Experiment Name: Zm_50ppm_KNO3_L-to-H_P Parameter: Plant Line Value: 35A19
  misc_feature: MA Experiment 20001608 PARAMETER Experiment Name: Zm_50ppm_KNO3_L-to-H_P Parameter: Timepoint (hr) Value: 48
  misc_feature: MA Experiment 20001608 PARAMETER Experiment Name: Zm_50ppm_KNO3_L-to-H_P Parameter: Tissue Value: Shoots
  misc_feature: MA Experiment 20001608 PARAMETER Experiment Name: Zm_50ppm_KNO3_L-to-H_P Parameter: Treatment Value: 50ppm KNO3 vs. 50ppm KCl
gcgcttcagcagcagcggcttccactgtagtcccaagccggcgtgaccattccaaatcttccgcacccatctctcgccgcctcgcctgcaccggagactggccctagtgcccgcgcgcctgcgaggtatcgaacacccaaagatggcaatggcaaccttcacatcatccccagttctctgcagcttcaggaccatcgaacagaagaaggcccctctgctgaacaacagcacaaaacggccgcttcacttgggcttcccaaggagcgtgccgacgtcgccgagcttgagagagaggctagacctgcgcgtcgccgctgtctacaaggtgaagctcctcggccccgaagggcaggagagcgtgctcgacgtgccagaggacagctacatcctggacgcggccgaggaggccggtctcgacctgccctactcctgccgcgccggcgcgtgctccacgtgcgccggcaagctcctggagggctccgtcgaccaggcagaccagtcgttcctcgacgaggcgcaggtcggtgccgggtacgcgctcacctgcgtcgcgtacccgacgtctgactgcgtcatccagacgcacagggaggaagacttgtactagcccgggccggtccccgggcatggatcaacccagggccggccctgagggtgtgcagggtatgccaccgctcagggcccccaatatcagtagggccccgtatgtctagataatgtccaaatacatatatgttacaggtaaatctatattctcgtttttttgttgt

SEQ ID NO: 5706 - protein, 154 aa, Zea mays subsp. mays
  peptide (1)..(154): Ceres Seq. ID no. 12343799
  misc_feature (62)..(141): Pfam Name: 2Fe-2S iron-sulfur cluster binding domain Pfam Description: 2Fe-2S iron-sulfur cluster binding domain
  misc_feature (3)..(154): Homolog of NCBI NO: 38346336 NR Description: OSJNBa0073L04.7 [Oryza sativa (japonica
  misc_feature (1)..(154): Homolog of NCBI NO: 119958 NR Description: Ferredoxin III, chloroplast precursor (Fd III)
  misc_feature (1)..(154): Homolog of NCBI NO: 40714664 NR Description: putative ferredoxin [Oryza sativa (japonica
  misc_feature (3)..(153): Homolog of NCBI NO: 2129915 NR Description: ferredoxin [2Fe-2S] fd1 precursor,
  misc_feature (3)..(154): Homolog of NCBI NO: 7430754 NR Description: ferredoxin [2Fe-2S], root - rice
  misc_feature (58)..(154): Homolog of NCBI NO: 65771 NR Description: ferredoxin [2Fe-2S] - Fischerella sp
  misc_feature (58)..(154): Homolog of NCBI NO: 3334451 NR Description: Ferredoxin >gi|2623659|gb|AAC04840.1| ferredoxin
  misc_feature (58)..(154): Homolog of NCBI NO: 119917 NR Description: Ferredoxin I >gi|65767|pir||FEFZ1 ferredoxin
  misc_feature (58)..(154): Homolog of NCBI NO: 120035 NR Description: Ferredoxin >gi|350987|prf||0812212A ferredoxin
  misc_feature (58)..(154): Homolog of NCBI NO: 16331399 NR Description: ferredoxin [Synechocystis sp. PCC 6803]
MAMATFTSSPVLCSFRTIEQKKAPLLNNSTKRPLHLGFPRSVPTSPSLRERLDLRVAAVYKVKLLGPEGQESVLDVPEDSYILDAAEEAGLDLPYSCRAGACSTCAGKLLEGSVDQADQSFLDEAQVGAGYALTCVAYPTSDCVIQTHREEDLY

SEQ ID NO: 5707 - protein, 152 aa, Zea mays subsp. mays
  peptide (1)..(152): Ceres Seq. ID no. 12343800
  misc_feature (60)..(139): Pfam Name: 2Fe-2S iron-sulfur cluster binding domain Pfam Description: 2Fe-2S iron-sulfur cluster binding domain
  misc_feature (1)..(152): Homolog of NCBI NO: 38346336 NR Description: OSJNBa0073L04.7 [Oryza sativa (japonica
  misc_feature (1)..(152): Homolog of NCBI NO: 119958 NR Description: Ferredoxin III, chloroplast precursor (Fd III)
  misc_feature (1)..(152): Homolog of NCBI NO: 40714664 NR Description: putative ferredoxin [Oryza sativa (japonica
  misc_feature (1)..(151): Homolog of NCBI NO: 2129915 NR Description: ferredoxin [2Fe-2S] fd1 precursor,
  misc_feature (1)..(152): Homolog of NCBI NO: 7430754 NR Description: ferredoxin [2Fe-2S], root - rice
  misc_feature (56)..(152): Homolog of NCBI NO: 65771 NR Description: ferredoxin [2Fe-2S] - Fischerella sp
  misc_feature (56)..(152): Homolog of NCBI NO: 3334451 NR Description: Ferredoxin >gi|2623659|gb|AAC04840.1| ferredoxin
  misc_feature (56)..(152): Homolog of NCBI NO: 119917 NR Description: Ferredoxin I >gi|65767|pir||FEFZ1 ferredoxin
  misc_feature (56)..(152): Homolog of NCBI NO: 120035 NR Description: Ferredoxin >gi|350987|prf||0812212A ferredoxin
  misc_feature (56)..(152): Homolog of NCBI NO: 16331399 NR Description: ferredoxin [Synechocystis sp. PCC 6803]
MATFTSSPVLCSFRTIEQKKAPLLNNSTKRPLHLGFPRSVPTSPSLRERLDLRVAAVYKVKLLGPEGQESVLDVPEDSYILDAAEEAGLDLPYSCRAGACSTCAGKLLEGSVDQADQSFLDEAQVGAGYALTCVAYPTSDCVIQTHREEDLY

SEQ ID NO: 5708 - DNA, 1264 bp, Zea mays subsp. mays
  misc_feature (1)..(1264): Ceres Seq. ID no. 12409354
  misc_feature: MA Experiment ID: 108528 Result: Up-regulated in Transcription
  misc_feature: MA Experiment 108528 PARAMETER Experiment Name: Zm_Imbibed_Seeds_P Parameter: Age (day) Value: 5 vs. 2
  misc_feature: MA Experiment 108528 PARAMETER Experiment Name: Zm_Imbibed_Seeds_P Parameter: Organism Value: Zea mays
  misc_feature: MA Experiment 108528 PARAMETER Experiment Name: Zm_Imbibed_Seeds_P Parameter: Plant Line Value: 35A19
  misc_feature: MA Experiment 108528 PARAMETER Experiment Name: Zm_Imbibed_Seeds_P Parameter: Tissue Value: Aerial vs. Embryo
  misc_feature: MA Experiment ID: 108529 Result: Up-regulated in Transcription
  misc_feature: MA Experiment 108529 PARAMETER Experiment Name: Zm_Imbibed_Seeds_P Parameter: Age (day) Value: 5 vs. 2
  misc_feature: MA Experiment 108529 PARAMETER Experiment Name: Zm_Imbibed_Seeds_P Parameter: Organism Value: Zea mays
  misc_feature: MA Experiment 108529 PARAMETER Experiment Name: Zm_Imbibed_Seeds_P Parameter: Plant Line Value: 35A19
  misc_feature: MA Experiment 108529 PARAMETER Experiment Name: Zm_Imbibed_Seeds_P Parameter: Tissue Value: Roots vs. Embryo
  misc_feature: MA Experiment ID: 108535 Result: Down-regulated in Transcription
  misc_feature: MA Experiment 108535 PARAMETER Experiment Name: Zm_Meristem_P Parameter: Age (day) Value: 8
  misc_feature: MA Experiment 108535 PARAMETER Experiment Name: Zm_Meristem_P Parameter: Organism Value: Zea mays
  misc_feature: MA Experiment 108535 PARAMETER Experiment Name: Zm_Meristem_P Parameter: Plant Line Value: 35A19
  misc_feature: MA Experiment 108535 PARAMETER Experiment Name: Zm_Meristem_P Parameter: Tissue Value: Root Meristem vs. Above Root Meristem
  misc_feature: MA Experiment ID: 108546 Result: Up-regulated in Transcription
  misc_feature: MA Experiment 108546 PARAMETER Experiment Name: Zm_Imbibed_Seeds_P Parameter: Age (day) Value: 3 vs. 2
  misc_feature: MA Experiment 108546 PARAMETER Experiment Name: Zm_Imbibed_Seeds_P Parameter: Organism Value: Zea mays
  misc_feature: MA Experiment 108546 PARAMETER Experiment Name: Zm_Imbibed_Seeds_P Parameter: Plant Line Value: 35A19
  misc_feature: MA Experiment 108546 PARAMETER Experiment Name: Zm_Imbibed_Seeds_P Parameter: Tissue Value: Roots vs. Embryo
  misc_feature: MA Experiment ID: 108547 Result: Up-regulated in Transcription
  misc_feature: MA Experiment 108547 PARAMETER Experiment Name: Zm_Imbibed_Seeds_P Parameter: Age (day) Value: 4 vs. 2
  misc_feature: MA Experiment 108547 PARAMETER Experiment Name: Zm_Imbibed_Seeds_P Parameter: Organism Value: Zea mays
  misc_feature: MA Experiment 108547 PARAMETER Experiment Name: Zm_Imbibed_Seeds_P Parameter: Plant Line Value: 35A19
  misc_feature: MA Experiment 108547 PARAMETER Experiment Name: Zm_Imbibed_Seeds_P Parameter: Tissue Value: Aerial vs. Embryo
  misc_feature: MA Experiment ID: 20000108 Result: Down-regulated in Transcription
  misc_feature: MA Experiment 20000108 PARAMETER Experiment Name: Zm_Root-Tips_P Parameter: Age (day) Value: 12
  misc_feature: MA Experiment 20000108 PARAMETER Experiment Name: Zm_Root-Tips_P Parameter: Organism Value: Zea mays
  misc_feature: MA Experiment 20000108 PARAMETER Experiment Name: Zm_Root-Tips_P Parameter: Tissue Value: Root tips vs. Root mid region    35
  misc_feature: MA Experiment 20000108 PARAMETER Experiment Name: Zm_Root-Tips_P Parameter: Tissue Value: Root tips vs. Root mid region   Sequence Listing-Misc Features (4)
aattagttcctcgatcgattatcaccagcatctcacttcgttcagatatatatagcaagtctaagtcttagtttttgcttttggaacatctctctaatttcacgattgagcgtacgtgcgcacaaacaaacaaacaaacaaacaatatatgggttcttccaatgatgtcacggcgattcctctaatcgatgttgccccacttgtcaaaaagattgatgatccagacatggcaaatgataaggatttgctacgagttgttctaacgttggactatgcttgcaaggaggttggattcttttatgtgaaaggccacggcatttgtgagatgctaatgagggaagtgagggatgtgtcacacaaattctttcagcttccacatgaggaaaagatgaagattaagatgacacgtcaaagtgggtatagagggtatcaaaagctaggagagaatgttaccaaggaaaaacgtgatatgcacgaagcagtcaattgcttgactcctattgcacctggcaaatacggagaccttggtaaaacacttgaaggagacaatctgtggcctgaatacccatcaaatttgaaggtagtgctggaaaactatatcagccttgtcaaagatctgtcaaggaagatcatgcgaggtatagctttggcattgggtgggcctgctgatgcctttgaaaggggaatagcaggagatccttactgggctctcaggctggttagctaccctgtttcaagcagtgatgagaaacgcactgatgatactgggatgatgggatcgcacacagactacggacttgttacactggttaaccaggatgatgacatttgtgcccttgaggtccaaaatcgttccggtgtgtggatacgtgccaacccgattcctgaaacctttctttgcaacatcggtgacatgctccaggtctggtcaaatggaatttaccaacccacagttcatagagtcatcaacagctcccatcaacgccgcgtttctgctgtgtttttctatgagaccgattttgatgctgccgtagagcccgttgagttgtgcgtggagaaaacaggcggcgtcgccaagtatgacaaggtcgtgtatggggagcgtctggttcggaaggccttctgctgctttggccatttatagggctggagaataagttatattgctactgtgaaaacaaagggcatactatatgcattgcacacacaatgatctgttgttaaacctatgtgatatatattgtgaaataaaggaacacttatt

SEQ ID NO: 5709 - protein, 331 aa, Zea mays subsp. mays
  peptide (1)..(331): Ceres Seq. ID no. 12409355
  misc_feature (184)..(288): Pfam Name: 2OG-Fe(II) oxygenase superfamily Pfam Description: 2OG-Fe(II) oxygenase superfamily
  misc_feature (4)..(329): Homolog of NCBI NO: 6984228 NR Description: putative flavonol synthase-like protein
  misc_feature (4)..(323): Homolog of NCBI NO: 18409039 NR Description: flavonol synthase - like protein; protein id:
  misc_feature (4)..(323): Homolog of NCBI NO: 21554579 NR Description: flavonol synthase-like protein [Arabidopsis
  misc_feature (10)..(331): Homolog of NCBI NO: 11255891 NR Description: hypothetical protein T9C5.210 - Arabidopsis >gi|6561962|emb|CAB62466.1| putative protein [Arabidopsis
  misc_feature (10)..(331): Homolog of NCBI NO: 19423910 NR Description: unknown protein [Arabidopsis thaliana]
  misc_feature (10)..(331): Homolog of NCBI NO: 22331716 NR Description: oxidoreductase (din11), putative; protein id: [Arabidopsis thaliana] >gi|24030245|gb|AAN41298.1| unknown
  misc_feature (13)..(331): Homolog of NCBI NO: 15229181 NR Description: putative protein; protein id: At3g49630.1
  misc_feature (4)..(323): Homolog of NCBI NO: 11255902 NR Description: flavonol synthase-like protein - Arabidopsis
  misc_feature (6)..(300): Homolog of NCBI NO: 23130050 NR Description: hypothetical protein [Nostoc punctiforme]
  misc_feature (9)..(299): Homolog of NCBI NO: 15599386 NR Description: probable iron/ascorbate oxidoreductase aeruginosa PA01] >gi|11351420|pir||E83122 probable iron/ascorbate
MGSSNDVTAIPLIDVAPLVKKIDDPDMANDKDLLRVVLTLDYACKEVGFFYVKGHGICEMLMREVRDVSHKFFQLPHEEKMKIKMTRQSGYRGYQKLGENVTKEKRDMHEAVNCLTPIAPGKYGDLGKTLEGDNLWPEYPSNLKVVLENYISLVKDLSRKIMRGIALALGGPADAFERGIAGDPYWALRLVSYPVSSSDEKRTDDTGMMGSHTDYGLVTLVNQDDDICALEVQNRSGVWIRANPIPETFLCNIGDMLQVWSNGIYQPTVHRVINSSHQRRVSAVFFYETDFDAAVEPVELCVEKTGGVAKYDKVVYGERLVRKAFCCFGHL

SEQ ID NO: 5710 - protein, 305 aa, Zea mays subsp. mays
  peptide (1)..(305): Ceres Seq. ID no. 12409356
  misc_feature (158)..(262): Pfam Name: 2OG-Fe(II) oxygenase superfamily Pfam Description: 2OG-Fe(II) oxygenase superfamily
  misc_feature (1)..(303): Homolog of NCBI NO: 6984228 NR Description: putative flavonol synthase-like protein
  misc_feature (1)..(297): Homolog of NCBI NO: 18409039 NR Description: flavonol synthase - like protein; protein id:
  misc_feature (1)..(297): Homolog of NCBI NO: 21554579 NR Description: flavonol synthase-like protein [Arabidopsis
  misc_feature (1)..(305): Homolog of NCBI NO: 11255891 NR Description: hypothetical protein T9C5.210 - Arabidopsis >gi|6561962|emb|CAB62466.1| putative protein [Arabidopsis
  misc_feature (1)..(305): Homolog of NCBI NO: 22331716 NR Description: oxidoreductase (din11), putative; protein id: [Arabidopsis thaliana] >gi|24030245|gb|AAN41298.1| unknown
  misc_feature (1)..(305): Homolog of NCBI NO: 19423910 NR Description: unknown protein [Arabidopsis thaliana]
  misc_feature (1)..(305): Homolog of NCBI NO: 15229181 NR Description: putative protein; protein id: At3g49630.1
  misc_feature (1)..(297): Homolog of NCBI NO: 11255902 NR Description: flavonol synthase-like protein - Arabidopsis
  misc_feature (1)..(274): Homolog of NCBI NO: 23130050 NR Description: hypothetical protein [Nostoc punctiforme]
  misc_feature (1)..(273): Homolog of NCBI NO: 15599386 NR Description: probable iron/ascorbate oxidoreductase aeruginosa PA01] >gi|11351420|pir||E83122 probable iron/ascorbate
MANDKDLLRVVLTLDYACKEVGFFYVKGHGICEMLMREVRDVSHKFFQLPHEEKMKIKMTRQSGYRGYQKLGENVTKEKRDMHEAVNCLTPIAPGKYGDLGKTLEGDNLWPEYPSNLKVVLENYISLVKDLSRKIMRGIALALGGPADAFERGIAGDPYWALRLVSYPVSSSDEKRTDDTGMMGSHTDYGLVTLVNQDDDICALEVQNRSGVWIRANPIPETFLCNIGDMLQVWSNGIYQPTVHRVINSSHQRRVSAVFFYETDFDAAVEPVELCVEKTGGVAKYDKVVYGERLVRKAFCCFGHL

SEQ ID NO: 5711 - protein, 272 aa, Zea mays subsp. mays
  peptide (1)..(272): Ceres Seq. ID no. 12409357
  misc_feature (125)..(229): Pfam Name: 2OG-Fe(II) oxygenase superfamily Pfam Description: 2OG-Fe(II) oxygenase superfamily
  misc_feature (1)..(270): Homolog of NCBI NO: 6984228 NR Description: putative flavonol synthase-like protein
  misc_feature (1)..(264): Homolog of NCBI NO: 18409039 NR Description: flavonol synthase - like protein; protein id:
  misc_feature (1)..(264): Homolog of NCBI NO: 21554579 NR Description: flavonol synthase-like protein [Arabidopsis
  misc_feature (1)..(272): Homolog of NCBI NO: 11255891 NR Description: hypothetical protein T9C5.210 - Arabidopsis >gi|6561962|emb|CAB62466.1| putative protein [Arabidopsis
  misc_feature (1)..(272): Homolog of NCBI NO: 19423910 NR Description: unknown protein [Arabidopsis thaliana]
  misc_feature (1)..(272): Homolog of NCBI NO: 22331716 NR Description: oxidoreductase (din11), putative; protein id: [Arabidopsis thaliana] >gi|24030245|gb|AAN41298.1| unknown
  misc_feature (1)..(272): Homolog of NCBI NO: 15229181 NR Description: putative protein; protein id: At3g49630.1
  misc_feature (1)..(264): Homolog of NCBI NO: 11255902 NR Description: flavonol synthase-like protein - Arabidopsis
  misc_feature (1)..(241): Homolog of NCBI NO: 23130050 NR Description: hypothetical protein [Nostoc punctiforme]
  misc_feature (1)..(240): Homolog of NCBI NO: 15599386 NR Description: probable iron/ascorbate oxidoreductase aeruginosa PA01] >gi|11351420|pir||E83122 probable iron/ascorbate
MLMREVRDVSHKFFQLPHEEKMKIKMTRQSGYRGYQKLGENVTKEKRDMHEAVNCLTPIAPGKYGDLGKTLEGDNLWPEYPSNLKVVLENYISLVKDLSRKIMRGIALALGGPADAFERGIAGDPYWALRLVSYPVSSSDEKRTDDTGMMGSHTDYGLVTLVNQDDDICALEVQNRSGVWIRANPIPETFLCNIGDMLQVWSNGIYQPTVHRVINSSHQRRVSAVFFYETDFDAAVEPVELCVEKTGGVAKYDKVVYGERLVRKAFCCFGHL

SEQ ID NO: 5712 - DNA, 1569 bp, Zea mays subsp. mays
  misc_feature (1)..(1569): Ceres Seq. ID no. 12365538
  misc_feature: MA Experiment ID: 108543 Result: Down-regulated in Transcription
agggctctagcatccccaatcccatcggtcagcctcatccatccgcagggcgccggcggcgggagtcttgccggccacatcgtcgccgatttcaccgatccgagctccggcctcttagccatggaatctccacgaactctggaagccctcaccaacgacctcgtggtggagatattcctccggatcggctcccctgccgacctcgttcgcgcctccgccgcctgcgtcgccctctgccgtctcatcgccaacccctccttcttgcgccggtaccgctccgtccacccgccgctacttctcggcctcctcgacccttatggcgatatcgaacccaccgagacaccccatccctccgctgctctcgctggcgccgtcgctcgcgccgctgacctccgcttcggcgagtattttcctagcagcaagttatccggctattgtgtctctgacgtccgagacggtcatgtcctcctcaccatcacgccctaccttgaggacgacgaggatgagaagttggtgccagacctcgcggtgtgcgaccccctggcccgtgtatgcctgcgactgccccccataccagacgaccttctcgcctccgtccaggttcagcagcaagatctcgtacattatagttgcgatacattccttgtcccttcaggagatgaagaagatgtcacttcttttagagtgatcgtcatgatgagatctacacagatgctagtcgcttttatcttctcttcaaccactggtgattggagtgctggttcacctttcagcctgggttctctgagaataccatacgacaacattccgagttatgcttatggctgcttctactggaaagtcgagtctgagaacaggttgctcacgctcaacatgagcagtatggagttctcagtcgttgacctcccacctgggcccgataggagtttcgtcatcatggtggaggcaggcgaaagcaggcttgggatgtttagtctaattaaccatggtaccactctctgttatgccattaggcaaattgggagcgagaagtccaatcagttggagatggacagtgtgatccctttacctgagggttatatttactttcgcattcacggttcatatgaaggacacattctcatatttggatacgcgtttagtgaagacgcatgcttcgcacttgagatcaagactatgaagattgagagagtctgtcggaagtggcgtggtttctgtccttattttgtgttcctgccatccatgtcacaaaggaggatataatgtggactgaattcacatccaggtttggggcttcttccaatccattctgctggtgtggagttgagctaggtgatggcacaggccctcatgtagatgtagcacatctgcaacactgtcccatgttatcctcctagtctgtcgtattgtctagcttacattagtagctactgaaactttagttatatctatatttttaagttctcccgactgtaatttaagatgtgacaaaggcgtctttagtgtatcaagagccaacttttataagccggctctgtgtgctgcgaaatcacgtgtttgctagtctag

SEQ ID NO: 5713 - protein, 420 aa, Zea mays subsp. mays
  peptide (1)..(420): Ceres Seq. ID no. 12365539
  misc_feature (36)..(392): Homolog of NCBI NO: 34393354 NR Description: hypothetical protein [Oryza sativa (japonica
  misc_feature (41)..(347): Homolog of NCBI NO: 34393352 NR Description: hypothetical protein [Oryza sativa (japonica
  misc_feature (39)..(256): Homolog of NCBI NO: 34393351 NR Description: hypothetical protein [Oryza sativa (japonica
  misc_feature (45)..(377): Homolog of NCBI NO: 37530886 NR Description: hypothetical protein [Oryza sativa (japonica group)] >gi|15528857|gb|AAL01182.1| Hypothetical protein [Oryza >gi|31430068|gb|AAP52032.1| hypothetical protein [Oryza sativa
  misc_feature (47)..(304): Homolog of NCBI NO: 32480316 NR Description: OSJNBa0042D13.1 [Oryza sativa (japonica
  misc_feature (44)..(399): Homolog of NCBI NO: 37530888 NR Description: hypothetical protein [Oryza sativa (japonica group)] >gi|18640637|gb|AAL76116.1| Hypothetical protein [Oryza >gi|18642696|gb|AAL76188.1| Hypothetical protein [Oryza sativa]
  misc_feature (40)..(356): Homolog of NCBI NO: 34901902 NR Description: OSJNBa0036M16.17 [Oryza sativa (japonica >gi|28071338|dbj|BAC56026.1| hypothetical protein [Oryza sativa
  misc_feature (50)..(303): Homolog of NCBI NO: 37530982 NR Description: unknown protein [Oryza sativa (japonica
RALASPIPSVSLIHPQGAGGGSLAGHIVADFTDPSSGLLAMESPRTLEALTNDLVVEIFLRIGSPADLVRASAACVALCRLIANPSFLRRYRSVHPPLLLGLLDPYGDIEPTETPHPSAALAGAVARAADLRFGEYFPSSKLSGYCVSDVRDGHVLLTITPYLEDDEDEKLVPDLAVCDPLARVCLRLPPIPDDLLASVQVQQQDLVHYSCDTFLVPSGDEEDVTSFRVIVMMRSTQMLVAFIFSSTTGDWSAGSPFSLGSLRIPYDNIPSYAYGCFYWKVESENRLLTLNMSSMEFSVVDLPPGPDRSFVIMVEAGESRLGMFSLINHGTTLCYAIRQIGSEKSNQLEMDSVIPLPEGYIYFRIHGSYEGHILIFGYAFSEDACFALEIKTMKIERVCRKWRGFCPYFVFLPSMSQRRI

SEQ ID NO: 5714 - protein, 380 aa, Zea mays subsp. mays
  peptide (1)..(380): Ceres Seq. ID no. 12365540
  misc_feature (1)..(352): Homolog of NCBI NO: 34393354 NR Description: hypothetical protein [Oryza sativa (japonica
  misc_feature (1)..(307): Homolog of NCBI NO: 34393352 NR Description: hypothetical protein [Oryza sativa (japonica
  misc_feature (1)..(216): Homolog of NCBI NO: 34393351 NR Description: hypothetical protein [Oryza sativa (japonica
  misc_feature (5)..(337): Homolog of NCBI NO: 37530886 NR Description: hypothetical protein [Oryza sativa (japonica group)] >gi|15528857|gb|AAL01182.1| Hypothetical protein [Oryza >gi|31430068|gb|AAP52032.1| hypothetical protein [Oryza sativa
  misc_feature (7)..(264): Homolog of NCBI NO: 32480316 NR Description: OSJNBa0042D13.1 [Oryza sativa (japonica
  misc_feature (4)..(359): Homolog of NCBI NO: 37530888 NR Description: hypothetical protein [Oryza sativa (japonica group)] >gi|18640637|gb|AAL76116.1| Hypothetical protein [Oryza >gi|18642696|gb|AAL76188.1| Hypothetical protein [Oryza sativa]
  misc_feature (1)..(316): Homolog of NCBI NO: 34901902 NR Description: OSJNBa0036M16.17 [Oryza sativa (japonica >gi|28071338|dbj|BAC56026.1| hypothetical protein [Oryza sativa
  misc_feature (10)..(263): Homolog of NCBI NO: 37530982 NR Description: unknown protein [Oryza sativa (japonica
MESPRTLEALTNDLVVEIFLRIGSPADLVRASAACVALCRLIANPSFLRRYRSVHPPLLLGLLDPYGDIEPTETPHPSAALAGAVARAADLRFGEYFPSSKLSGYCVSDVRDGHVLLTITPYLEDDEDEKLVPDLAVCDPLARVCLRLPPIPDDLLASVQVQQQDLVHYSCDTFLVPSGDEEDVTSFRVIVMMRSTQMLVAFIFSSTTGDWSAGSPFSLGSLRIPYDNIPSYAYGCFYWKVESENRLLTLNMSSMEFSVVDLPPGPDRSFVIMVEAGESRLGMFSLINHGTTLCYAIRQIGSEKSNQLEMDSVIPLPEGYIYFRIHGSYEGHILIFGYAFSEDACFALEIKTMKIERVCRKWRGFCPYFVFLPSMSQRRI

SEQ ID NO: 5715 - DNA, 1328 bp, Zea mays subsp. mays
  misc_feature (1)..(1328): Ceres Seq. ID no. 12409352
  misc_feature: MA Experiment ID: 108527 Result: Up-regulated in Transcription
  misc_feature: MA Experiment 108527 PARAMETER Experiment Name: Zm_5mM_NO_P Parameter: Age (day) Value: 8
  misc_feature: MA Experiment 108527 PARAMETER Experiment Name: Zm_5mM_NO_P Parameter: Organism Value: Zea mays
  misc_feature: MA Experiment 108527 PARAMETER Experiment Name: Zm_5mM_NO_P Parameter: Plant Line Value: 35A19
  misc_feature: MA Experiment 108527 PARAMETER Experiment Name: Zm_5mM_NO_P Parameter: Timepoint (hr) Value: 6
  misc_feature: MA Experiment 108527 PARAMETER Experiment Name: Zm_5mM_NO_P Parameter: Tissue Value: Aerial
  misc_feature: MA Experiment 108527 PARAMETER Experiment Name: Zm_5mM_NO_P Parameter: Treatment Value: 5mM NO vs. No Treatment
  misc_feature: MA Experiment ID: 108528 Result: Up-regulated in Transcription
  misc_feature: MA Experiment 108528 PARAMETER Experiment Name: Zm_Imbibed_Seeds_P Parameter: Age (day) Value: 5 vs. 2
  misc_feature: MA Experiment 108528 PARAMETER Experiment Name: Zm_Imbibed_Seeds_P Parameter: Organism Value: Zea mays
  misc_feature: MA Experiment 108528 PARAMETER Experiment Name: Zm_Imbibed_Seeds_P Parameter: Plant Line Value: 35A19
  misc_feature: MA Experiment 108528 PARAMETER Experiment Name: Zm_Imbibed_Seeds_P Parameter: Tissue Value: Aerial vs. Embryo
  misc_feature: MA Experiment ID: 108529 Result: Down-regulated in Transcription
  misc_feature: MA Experiment 108529 PARAMETER Experiment Name: Zm_Imbibed_Seeds_P Parameter: Age (day) Value: 5 vs. 2
  misc_feature: MA Experiment 108529 PARAMETER Experiment Name: Zm_Imbibed_Seeds_P Parameter: Organism Value: Zea mays
  misc_feature: MA Experiment 108529 PARAMETER Experiment Name: Zm_Imbibed_Seeds_P Parameter: Plant Line Value: 35A19
  misc_feature: MA Experiment 108529 PARAMETER Experiment Name: Zm_Imbibed_Seeds_P Parameter: Tissue Value: Roots vs. Embryo
  misc_feature: MA Experiment ID: 108530 Result: Up-regulated in Transcription
  misc_feature: MA Experiment 108530 PARAMETER Experiment Name: Zm_Imbibed_Seeds_P Parameter: Age (day) Value: 6 vs. 2
  misc_feature: MA Experiment 108530 PARAMETER Experiment Name: Zm_Imbibed_Seeds_P Parameter: Organism Value: Zea mays
  misc_feature: MA Experiment 108530 PARAMETER Experiment Name: Zm_Imbibed_Seeds_P Parameter: Plant Line Value: 35A19
  misc_feature: MA Experiment 108530 PARAMETER Experiment Name: Zm_Imbibed_Seeds_P Parameter: Tissue Value: Aerial vs. Embryo
  misc_feature: MA Experiment ID: 108536 Result: Down-regulated in Transcription
  misc_feature: MA Experiment 108536 PARAMETER Experiment Name: Zm_Meristem_P Parameter: Age (day) Value: 8
  misc_feature: MA Experiment 108536 PARAMETER Experiment Name: Zm_Meristem_P Parameter: Organism Value: Zea mays
  misc_feature: MA Experiment 108536 PARAMETER Experiment Name: Zm_Meristem_P Parameter: Plant Line Value: 35A19
  misc_feature: MA Experiment 108536 PARAMETER Experiment Name: Zm_Meristem_P Parameter: Tissue Value: Shoot Meristem vs. Above Shoot Meristem
  misc_feature: MA Experiment ID: 108545 Result: Up-regulated in Transcription
  misc_feature: MA Experiment 108545 PARAMETER Experiment Name: Zm_Imbibed_Seeds_P Parameter: Age (day) Value: 3 vs. 2
  misc_feature: MA Experiment 108545 PARAMETER Experiment Name: Zm_Imbibed_Seeds_P Parameter: Organism Value: Zea mays
  misc_feature: MA Experiment 108545 PARAMETER Experiment Name: Zm_Imbibed_Seeds_P Parameter: Plant Line Value: 35A19
  misc_feature: MA Experiment 108545 PARAMETER Experiment Name: Zm_Imbibed_Seeds_P Parameter: Tissue Value: Aerial vs. Embryo
  misc_feature: MA Experiment ID: 108546 Result: Down-regulated in Transcription
  misc_feature: MA Experiment 108546 PARAMETER Experiment Name: Zm_Imbibed_Seeds_P Parameter: Age (day) Value: 3 vs. 2
  misc_feature: MA Experiment 108546 PARAMETER Experiment Name: Zm_Imbibed_Seeds_P Parameter: Organism Value: Zea mays
  misc_feature: MA Experiment 108546 PARAMETER Experiment Name: Zm_Imbibed_Seeds_P Parameter: Plant Line Value: 35A19
  misc_feature: MA Experiment 108546 PARAMETER Experiment Name: Zm_Imbibed_Seeds_P Parameter: Tissue Value: Roots vs. Embryo
  misc_feature: MA Experiment ID: 108547 Result: Up-regulated in Transcription
  misc_feature: MA Experiment 108547 PARAMETER Experiment Name: Zm_Imbibed_Seeds_P Parameter: Age (day) Value: 4 vs. 2
  misc_feature: MA Experiment 108547 PARAMETER Experiment Name: Zm_Imbibed_Seeds_P Parameter: Organism Value: Zea mays
  misc_feature: MA Experiment 108547 PARAMETER Experiment Name: Zm_Imbibed_Seeds_P Parameter: Plant Line Value: 35A19
  misc_feature: MA Experiment 108547 PARAMETER Experiment Name: Zm_Imbibed_Seeds_P Parameter: Tissue Value: Aerial vs. Embryo
aaaacccatctcgcccccactcgtatccgcagagtactaaacatcaccagggaaggaggttgcgagttgcgaccgggggccggccgacccagccaaagtacgctaccactcttgctgcaccgaccgcgagggtgcaacaacgacttacatatatataaatatccgcgccgcagctagctagctagctagcagagcagcccggccgaagccgtgtagcctagcctcctcacatatagcagcagcaggacgagatcgtcgatcgatcgatggtgtctctgcagccctcatcagcggcgccgctcctgccggaggccgccaccgcgaacaagctcccgccgtggctctccctcgtcggcagcgtcgtcgcctcctccaccggtaccgcggccaccagcaagaagcggaagcgggacggcagcggcggcggcggcgacgaggacgaccgtggcgaggtcgtggacgggatcgagctcaatttcgacgccgcgccgctgccccccgagtggcaacgctgcctcgacatcaagtcggggcagatccactactacaacacgaggacgcagaagcggacgtgcaaggaccccagggggcacgacgggcagccggactaccgcgccgaagaaggccaggaggaggaggaggactccgcgaattattgcgcgccgccagggctggacctggagctgaacctcacgttcgagccgcgccgcgtgctcgccgcccacgggaagacgacgaagagggccaagcagcagcccgcggaggaggaggaggaggccgaggacgacgacgacagcgacagcagcagtagcagtagggagatggtggctggcgtgtgcgtgcggtgccacatgctggtgatgatgtgccgcgccagcccggcgtgccccaactgcaagttcctgcacccacccagccgcgccacgccgcctccgccgccgctcaagctcggcctccagctgctctgctgcagggactagctagagaccaaagcgtcccaacgacccatggatgggctggctccccagcaggcatgcgtgcaccagtagaacgcgcgcacgtgtgtcgcacgcatgtgcaaggaagacacagcgtaatattcaatcagaggcaggatggtgtggtagctagctagaggagttgatcagtagtggcggcgcctatgcccgtggccgaccgatcggctgtgcgtgcgtacgtacgtacggttcgccaaggggtatatcgtgtcataatgttattactcatgtggcgatggatggatggtggtggtgtagatatcataaagtgcatgcatagcataaatgtagctcggaactttcggcgtt

SEQ ID NO: 5716 - protein, 237 aa, Zea mays subsp. mays
  peptide (1)..(237): Ceres Seq. ID no. 12409353
  misc_feature (154)..(216): Homolog of NCBI NO: 15236641 NR Description: hypothetical protein; protein id: At4g08910.1
  misc_feature (172)..(234): Homolog of NCBI NO: 25372722 NR Description: unknown protein T11I11.11 [imported] -
  misc_feature (172)..(234): Homolog of NCBI NO: 30699311 NR Description: expressed protein [Arabidopsis thaliana] unknown protein [Arabidopsis thaliana]
  misc_feature (174)..(234): Homolog of NCBI NO: 30687784 NR Description: expressed protein [Arabidopsis thaliana]
MVSLQPSSAAPLLPEAATANKLPPWLSLVGSVVASSTGTAATSKKRKRDGSGGGGDEDDRGEVVDGIELNFDAAPLPPEWQRCLDIKSGQIHYYNTRTQKRTCKDPRGHDGQPDYRAEEGQEEEEDSANYCAPPGLDLELNLTFEPRRVLAAHGKTTKRAKQQPAEEEEEAEDDDDSDSSSSSREMVAGVCVRCHMLVMMCRASPACPNCKFLHPPSRATPPPPPLKLGLQLLCCRD

SEQ ID NO: 5717 - DNA, 1627 bp, Zea mays subsp. mays
  misc_feature (1)..(1627): Ceres Seq. ID no. 12412663
  misc_feature: MA Experiment ID: 108536 Result: Up-regulated in Transcription
  misc_feature: MA Experiment 108536 PARAMETER Experiment Name: Zm_Meristem_P Parameter: Age (day) Value: 8
  misc_feature: MA Experiment 108536 PARAMETER Experiment Name: Zm_Meristem_P Parameter: Organism Value: Zea mays
  misc_feature: MA Experiment 108536 PARAMETER Experiment Name: Zm_Meristem_P Parameter: Plant Line Value: 35A19
  misc_feature: MA Experiment 108536 PARAMETER Experiment Name: Zm_Meristem_P Parameter: Tissue Value: Shoot Meristem vs. Above Shoot Meristem
  misc_feature: MA Experiment ID: 20000492 Result: Down-regulated in Transcription
  misc_feature: MA Experiment 20000492 PARAMETER Experiment Name: Zm_Hybrid_Seed_Dev_P Parameter: DAP Value: 12
  misc_feature: MA Experiment 20000492 PARAMETER Experiment Name: Zm_Hybrid_Seed_Dev_P Parameter: Organism Value: Zea mays
  misc_feature: MA Experiment 20000492 PARAMETER Experiment Name: Zm_Hybrid_Seed_Dev_P Parameter: Plant Line Value: 35A19
  misc_feature: MA Experiment 20000492 PARAMETER Experiment Name: Zm_Hybrid_Seed_Dev_P Parameter: Tissue Value: Fert Kernel vs. Unfert Floret
  misc_feature: MA Experiment ID: 20000534 Result: Up-regulated in Transcription
  misc_feature: MA Experiment 20000534 PARAMETER Experiment Name: Zm_Hybrid_Pollen_P Parameter: Age (day) Value: 8
  misc_feature: MA Experiment 20000534 PARAMETER Experiment Name: Zm_Hybrid_Pollen_P Parameter: Organism Value: Zea mays
  misc_feature: MA Experiment 20000534 PARAMETER Experiment Name: Zm_Hybrid_Pollen_P Parameter: Plant Line Value: 35A19
  misc_feature: MA Experiment 20000534 PARAMETER Experiment Name: Zm_Hybrid_Pollen_P Parameter: Tissue Value: Pollen vs. Aerial
cttcgtccattccgatcactcgctgctcccctctctcgccggagcgagccccgggccggatggcggcggcagcagcagctcctcccgcctccgcgatcgcgtgatggacgccgacgccgacgccgccgcgatccgccgatggacgacgccggaagggcaccaccacccgcgccagcggcggtgaccgtctccgccaccgccgcacccgcgcctaccccgccctccgccacggccgccgccgacaagtcctccctcgaccccgacgcgctttatgaagaggggatgtggcaacagatggccatgaacagcggtgccacaatgcaacctgggtcatatcctgagcgaccaggtgaaccggactgcacttactacctcaggactggattgtgtcgatttggcatgagctgcaggttcaatcatcctccggataggaatctggctattgcctctgccagaatgaagggagaatatcctgagagagtgggacagccagagtgtcagtattatctgaagaccggaacatgcaagtttggtcctacatgcaaatttcaccatcccagggaaaaggccggaattgcagggagggtgcagctaaacacattaggatatccacttctcccgaatgaaaaggagtgtgcgtattatttaaaaacaggacaatgtaaatatgcaaatacttgtaaattccaccacccagaacttttcaatgtggtgccttcgtcacgtggttcacctatttatacttctgtacattcctctgcaagcgctggtccacagtcatatactggaactatgtcaagctggacttttccacgagcttcttttataccaagccctaggtggcaaagtccttcaaattatgcaccaatggttgtacctcatggccttgtccaagtgccgagctggaattcatatcctggtcagctgcagtcacctggggctcaacaaacttatggaagttcacaacaaggcgaagctagtgcaggaaatcagggaatgctatcaccctatagatccagttcatttcctgtgcctcaatatgcgttgcagagagataatgtatttcctgagagacccgatgaaccagaatgccaatattacatgaagacaggagattgtaaatttggtgcagtgtgcaagttccatcatccccgtgtgagatcacagccccctccggattgtgtcttaagtccaatgggtcttccaatacgtccaggtgaagaactttgcaaattctattctcgttatggcatctgcaagttcggcgccaactgtaaatttgatcatcctacaatggctgctccaatgggagtttatgcatatggtttctctgggtctgcttctgtcgcacccgcttcaactaatgcacctatgacgcgacatcttcttggatctccatcaggttctggatatatgtcttaggtgtcttttttttcagttgacctactttgatgtataaaatccacggcatcgcctcaggcgctgtgaatgtttctcctaacttcccgccgggatgaagttctgtaaattgagttgctgctggagatgtacagcccccccccccccccccccctccccaattaatccagaactttgggaataactgttggaacctaataaacttcag

SEQ ID NO: 5718 - protein, 473 aa, Zea mays subsp. mays
  peptide (1)..(473): Ceres Seq. ID no. 12412664
  misc_feature (359)..(385): Pfam Name: Zinc finger C-x8-C-x5-C-x3-H type (and similar) Pfam Description: Zinc finger C-x8-C-x5-C-x3-H type (and similar)
  misc_feature (67)..(458): Homolog of NCBI NO: 34906988 NR Description: putative zinc finger protein [Oryza sativa
  misc_feature (88)..(473): Homolog of NCBI NO: 11288368 NR Description: zinc finger protein [imported] - garden pea
  misc_feature (78)..(462): Homolog of NCBI NO: 18396338 NR Description: zinc finger protein 1 (zfn1); protein id: supported by cDNA: gi_4928916 [Arabidopsis thaliana]
  misc_feature (78)..(462): Homolog of NCBI NO: 11288371 NR Description: zinc finger protein 1 [imported] - Arabidopsis >gi|4928917|gb|AAD33769.1|AF138743_1 zinc finger protein 1
  misc_feature (95)..(462): Homolog of NCBI NO: 6728979 NR Description: zinc finger protein 1 (zfn1) [Arabidopsis
  misc_feature (70)..(469): Homolog of NCBI NO: 30690809 NR Description: expressed protein [Arabidopsis thaliana]
  misc_feature (111)..(469): Homolog of NCBI NO: 25409067 NR Description: hypothetical protein At2g47850 [imported] - thaliana >gi|3738297|gb|AAC63639.1| unknown protein [Arabidopsis
  misc_feature (104)..(447): Homolog of NCBI NO: 34902926 NR Description: putative zinc finger protein [Oryza sativa
  misc_feature (95)..(473): Homolog of NCBI NO: 15230715 NR Description: hypothetical protein; protein id: At3g06410.1 thaliana] >gi|6437560|gb|AAF08587.1|AC011623_20 hypothetical
  misc_feature (78)..(467): Homolog of NCBI NO: 15238861 NR Description: zinc finger -like protein; protein id:
LRPFRSLAAPLSRRSEPRAGWRRQQQLLPPPRSRDGRRRRRRRDPPMDDAGRAPPPAPAAVTVSATAAPAPTPPSATAAADKSSLDPDALYEEGMWQQMAMNSGATMQPGSYPERPGEPDCTYYLRTGLCRFGMSCRFNHPPDRNLAIASARMKGEYPERVGQPECQYYLKTGTCKFGPTCKFHHPREKAGIAGRVQLNTLGYPLLPNEKECAYYLKTGQCKYANTCKFHHPELFNVVPSSRGSPIYTSVHSSASAGPQSYTGTMSSWTFPRASFIPSPRWQSPSNYAPMVVPHGLVQVPSWNSYPGQLQSPGAQQTYGSSQQGEASAGNQGMLSPYRSSSFPVPQYALQRDNVFPERPDEPECQYYMKTGDCKFGAVCKFHHPRVRSQPPPDCVLSPMGLPIRPGEELCKFYSRYGICKFGANCKFDHPTMAAPMGVYAYGFSGSASVAPASTNAPMTRHLLGSPSGSGYMS

SEQ ID NO: 5719 - protein, 427 aa, Zea mays subsp. mays
  peptide (1)..(427): Ceres Seq. ID no. 12412665
  misc_feature (313)..(339): Pfam Name: Zinc finger C-x8-C-x5-C-x3-H type (and similar) Pfam Description: Zinc finger C-x8-C-x5-C-x3-H type (and similar)
  misc_feature (24)..(423): Homolog of NCBI NO: 30690809 NR Description: expressed protein [Arabidopsis thaliana]
  misc_feature (65)..(423): Homolog of NCBI NO: 25409067 NR Description: hypothetical protein At2g47850 [imported] - thaliana >gi|3738297|gb|AAC63639.1| unknown protein [Arabidopsis
  misc_feature (58)..(401): Homolog of NCBI NO: 34902926 NR Description: putative zinc finger protein [Oryza sativa
  misc_feature (42)..(427): Homolog of NCBI NO: 11288368 NR Description: zinc finger protein [imported] - garden pea
  misc_feature (32)..(416): Homolog of NCBI NO: 11288371 NR Description: zinc finger protein 1 [imported] - Arabidopsis >gi|4928917|gb|AAD33769.1|AF138743_1 zinc finger protein 1
  misc_feature (49)..(416): Homolog of NCBI NO: 6728979 NR Description: zinc finger protein 1 (zfn1) [Arabidopsis
  misc_feature (32)..(416): Homolog of NCBI NO: 18396338 NR Description: zinc finger protein 1 (zfn1); protein id: supported by cDNA: gi_4928916 [Arabidopsis thaliana]
  misc_feature (21)..(412): Homolog of NCBI NO: 34906988 NR Description: putative zinc finger protein [Oryza sativa
  misc_feature (49)..(427): Homolog of NCBI NO: 15230715 NR Description: hypothetical protein; protein id: At3g06410.1 thaliana] >gi|6437560|gb|AAF08587.1|AC011623_20 hypothetical
  misc_feature (32)..(421): Homolog of NCBI NO: 15238861 NR Description: zinc finger -like protein; protein id:
MDDAGRAPPPAPAAVTVSATAAPAPTPPSATAAADKSSLDPDALYEEGMWQQMAMNSGATMQPGSYPERPGEPDCTYYLRTGLCRFGMSCRFNHPPDRNLAIASARMKGEYPERVGQPECQYYLKTGTCKFGPTCKFHHPREKAGIAGRVQLNTLGYPLLPNEKECAYYLKTGQCKYANTCKFHHPELFNVVPSSRGSPIYTSVHSSASAGPQSYTGTMSSWTFPRASFIPSPRWQSPSNYAPMVVPHGLVQVPSWNSYPGQLQSPGAQQTYGSSQQGEASAGNQGMLSPYRSSSFPVPQYALQRDNVFPERPDEPECQYYMKTGDCKFGAVCKFHHPRVRSQPPPDCVLSPMGLPIRPGEELCKFYSRYGICKFGANCKFDHPTMAAPMGVYAYGFSGSASVAPASTNAPMTRHLLGSPSGSGYMS

SEQ ID NO: 5720 - protein, 379 aa, Zea mays subsp. mays
  peptide (1)..(379): Ceres Seq. ID no. 12412666
  misc_feature (265)..(291): Pfam Name: Zinc finger C-x8-C-x5-C-x3-H type (and similar) Pfam Description: Zinc finger C-x8-C-x5-C-x3-H type (and similar)
  misc_feature (1)..(364): Homolog of NCBI NO: 34906988 NR Description: putative zinc finger protein [Oryza sativa
  misc_feature (1)..(379): Homolog of NCBI NO: 11288368 NR Description: zinc finger protein [imported] - garden pea
  misc_feature (1)..(368): Homolog of NCBI NO: 18396338 NR Description: zinc finger protein 1 (zfn1); protein id: supported by cDNA: gi_4928916 [Arabidopsis thaliana]
  misc_feature (1)..(368): Homolog of NCBI NO: 11288371 NR Description: zinc finger protein 1 [imported] - Arabidopsis >gi|4928917|gb|AAD33769.1|AF138743_1 zinc finger protein 1
  misc_feature (1)..(368): Homolog of NCBI NO: 6728979 NR Description: zinc finger protein 1 (zfn1) [Arabidopsis
  misc_feature (1)..(375): Homolog of NCBI NO: 30690809 NR Description: expressed protein [Arabidopsis thaliana]
  misc_feature (17)..(375): Homolog of NCBI NO: 25409067 NR Description: hypothetical protein At2g47850 [imported] - thaliana >gi|3738297|gb|AAC63639.1| unknown protein [Arabidopsis
  misc_feature (10)..(353): Homolog of NCBI NO: 34902926 NR Description: putative zinc finger protein [Oryza sativa
  misc_feature (1)..(379): Homolog of NCBI NO: 15230715 NR Description: hypothetical protein; protein id: At3g06410.1 thaliana] >gi|6437560|gb|AAF08587.1|AC011623_20 hypothetical
  misc_feature (1)..(373): Homolog of NCBI NO: 15238861 NR Description: zinc finger -like protein; protein id:
MWQQMAMNSGATMQPGSYPERPGEPDCTYYLRTGLCRFGMSCRFNHPPDRNLAIASARMKGEYPERVGQPECQYYLKTGTCKFGPTCKFHHPREKAGIAGRVQLNTLGYPLLPNEKECAYYLKTGQCKYANTCKFHHPELFNVVPSSRGSPIYTSVHSSASAGPQSYTGTMSSWTFPRASFIPSPRWQSPSNYAPMVVPHGLVQVPSWNSYPGQLQSPGAQQTYGSSQQGEASAGNQGMLSPYRSSSFPVPQYALQRDNVFPERPDEPECQYYMKTGDCKFGAVCKFHHPRVRSQPPPDCVLSPMGLPIRPGEELCKFYSRYGICKFGANCKFDHPTMAAPMGVYAYGFSGSASVAPASTNAPMTRHLLGSPSGSGYMS

SEQ ID NO: 5721 - DNA, 1628 bp, Zea mays subsp. mays
  misc_feature (1)..(1628): Ceres Seq. ID no. 13636255
  misc_feature: MA Experiment ID: 108528 Result: Down-regulated in Transcription
  misc_feature: MA Experiment 108528 PARAMETER Experiment Name: Zm_Imbibed_Seeds_P Parameter: Age (day) Value: 5 vs. 2
  misc_feature: MA Experiment 108528 PARAMETER Experiment Name: Zm_Imbibed_Seeds_P Parameter: Organism Value: Zea mays
  misc_feature: MA Experiment 108528 PARAMETER Experiment Name: Zm_Imbibed_Seeds_P Parameter: Plant Line Value: 35A19
  misc_feature: MA Experiment 108528 PARAMETER Experiment Name: Zm_Imbibed_Seeds_P Parameter: Tissue Value: Aerial vs. Embryo
  misc_feature: MA Experiment ID: 108530 Result: Down-regulated in Transcription
  misc_feature: MA Experiment 108530 PARAMETER Experiment Name: Zm_Imbibed_Seeds_P Parameter: Age (day) Value: 6 vs. 2
  misc_feature: MA Experiment 108530 PARAMETER Experiment Name: Zm_Imbibed_Seeds_P Parameter: Organism Value: Zea mays
  misc_feature: MA Experiment 108530 PARAMETER Experiment Name: Zm_Imbibed_Seeds_P Parameter: Plant Line Value: 35A19
  misc_feature: MA Experiment 108530 PARAMETER Experiment Name: Zm_Imbibed_Seeds_P Parameter: Tissue Value: Aerial vs. Embryo
  misc_feature: MA Experiment ID: 20000492 Result: Up-regulated in Transcription
  misc_feature: MA Experiment 20000492 PARAMETER Experiment Name: Zm_Hybrid_Seed_Dev_P Parameter: DAP Value: 12
  misc_feature: MA Experiment 20000492 PARAMETER Experiment Name: Zm_Hybrid_Seed_Dev_P Parameter: Organism Value: Zea mays
  misc_feature: MA Experiment 20000492 PARAMETER Experiment Name: Zm_Hybrid_Seed_Dev_P Parameter: Plant Line Value: 35A19
  misc_feature: MA Experiment 20000492 PARAMETER Experiment Name: Zm_Hybrid_Seed_Dev_P Parameter: Tissue Value: Fert Kernel vs. Unfert Floret
actagctgctctggctcccccgaggcaatcgagtaatcgacgaaggccaccaccacctccacaccactttgcctcgagaaggttccaccaagcctctcggctagggtttggggactttgggggcgatcgcaatggagggacgcggcgcggaacaagcacccgaggcggcggcggaggtgaaaaatccgaggtgcttcatggacgtcaccatcggcggcgagatggaggggaggatcgttgtagagctctacgcttccgtggtaccgcggacggcggagaacttccgcgcgctctgcacaggggagaaaggcatcggcgccgccagcgggcaagccgcttcactttaagggctcatgcttccaccgtgttattaaagggtttatgattcaagggggagacacaactgctggagacggaactgggggatagtcaatttatgggtccaaatttgaggacgagaattttgttttaaagcatgagaggaaaggaatgctttcaatggctaattctggtcccaacacaaatggttctcagtttttcatcactactacacggacacctcatttagacgggaaacatgttgtttttggtagagtgatgaaaggaatgggggtagttcgctctattgagcatgtttctgtcggagaagctgactgccccactcttgaagttaaaattgttgattgtggggagcttcctgaaggtgctgatgatggagttgtaaactttttcaaagatggtgatacgtacccagattggcccaatgatcttgaagagaagcctgctgaggtttcatggtggatggatgctgtggagtctgctaaagcttatgggaatgacaatttcaagaaacaggactacaaggcagctctcagaaagtacaggaaagctctgcgctacttggatctttgctgggagaaagaagagatagatgaagataagagcacagcactgcggaagaccaagtcaataatactcactaatagctccgcatgcaaattaaagttaggagattcaagtggggctttattagacgcagattttgcactgcgtgaaagggagggaaatgctaaagcttttttccgacaaggacaggcacacattgcacttaatgacattgatgcagccgtggagagctttaaacaggcattggagttggagccaaatgatgctggaatcaaaagagagctggctgctgcaaagaagaagattgctgacagaagagatcaggagcggaaggcatttgctaggattttccaatcttctggaaagtctgacaagagcaacgaagagaataattgatctacagttcctttcccccgtctgaaactttgcttagcttaaatctggggcacattggaacaggagtctcatgggagtctgctctgcaaaaaaacgcagattactgatctttagatagaaggaaacatagtggggggaaaggaagcttttgttttcttgtactacagaagtagcaattcgtgcttttgtcccggtcttagtttattcaggaaacggacattgaatttaaatgtgcaatttttagacccaacctgacgattcacatcttttgtgggtagttcgcccgtttcactttcgtggtgttttcttgtagccttttgtctgct

SEQ ID NO: 5722 - protein, 270 aa, Zea mays subsp. mays
  peptide (1)..(270): Ceres Seq. ID no. 13636256
  misc_feature (108)..(141): Pfam Name: TPR Domain Pfam Description: TPR Domain
  misc_feature (108)..(141): Pfam Name: TPR Domain Pfam Description: TPR Domain
  misc_feature (1)..(256): Homolog of NCBI NO: 18397936 NR Description: cyclophilin-40 [Arabidopsis thaliana]
  misc_feature (1)..(244): Homolog of NCBI NO: 25411671 NR Description: hypothetical protein At2g15790 [imported] -
  misc_feature (1)..(256): Homolog of NCBI NO: 34857103 NR Description: similar to peptidylprolyl isomerase D
  misc_feature (1)..(256): Homolog of NCBI NO: 13385854 NR Description: peptidylprolyl isomerase D (cyclophilin D) [Mus
  misc_feature (1)..(256): Homolog of NCBI NO: 27806463 NR Description: peptidylprolyl isomerase D (cyclophilin D) [Bos
  misc_feature (1)..(244): Homolog of NCBI NO: 25411671 NR Description: hypothetical protein At2g15790 [imported] -
  misc_feature (1)..(256): Homolog of NCBI NO: 13385854 NR Description: peptidylprolyl isomerase D (cyclophilin D) [Mus
  misc_feature (1)..(258): Homolog of NCBI NO: 40741736 NR Description: hypothetical protein AN4583.2 [Aspergillus
  misc_feature (1)..(256): Homolog of NCBI NO: 32405118 NR Description: hypothetical protein ( (AJ292563) peptidyl-prolyl
  misc_feature (1)..(256): Homolog of NCBI NO: 38174405 NR Description: Unknown (protein for MGC:75854) [Silurana
  misc_feature (1)..(256): Homolog of NCBI NO: 4826932 NR Description: peptidylprolyl isomerase D (cyclophilin D);
  misc_feature (1)..(256): Homolog of NCBI NO: 27687349 NR Description: similar to peptidylprolyl isomerase D
  misc_feature (1)..(256): Homolog of NCBI NO: 27806463 NR Description: peptidylprolyl isomerase D (cyclophilin D) [Bos
  misc_feature (1)..(256): Homolog of NCBI NO: 34857103 NR Description: similar to peptidylprolyl isomerase D
  misc_feature (1)..(256): Homolog of NCBI NO: 18397936 NR Description: cyclophilin-40 [Arabidopsis thaliana]
  misc_feature (1)..(256): Homolog of NCBI NO: 27687349 NR Description: similar to peptidylprolyl isomerase D
  misc_feature (1)..(256): Homolog of NCBI NO: 4826932 NR Description: peptidylprolyl isomerase D (cyclophilin D);
  misc_feature (1)..(256): Homolog of NCBI NO: 38174405 NR Description: Unknown (protein for MGC:75854) [Silurana
  misc_feature (1)..(256): Homolog of NCBI NO: 32405118 NR Description: hypothetical protein ( (AJ292563) peptidyl-prolyl
  misc_feature (1)..(258): Homolog of NCBI NO: 40741736 NR Description: hypothetical protein AN4583.2 [Aspergillus
MLSMANSGPNTNGSQFFITTTRTPHLDGKHVVFGRVMKGMGVVRSIEHVSVGEADCPTLEVKIVDCGELPEGADDGVVNFFKDGDTYPDWPNDLEEKPAEVSWWMDAVESAKAYGNDNFKKQDYKAALRKYRKALRYLDLCWEKEEIDEDKSTALRKTKSIILTNSSACKLKLGDSSGALLDADFALREREGNAKAFFRQGQAHIALNDIDAAVESFKQALELEPNDAGIKRELAAAKKKIADRRDQERKAFARIFQSSGKSDKSNEENN

SEQ ID NO: 5723 - protein, 267 aa, Zea mays subsp. mays
  peptide (1)..(267): Ceres Seq. ID no. 13636257
  misc_feature (105)..(138): Pfam Name: TPR Domain Pfam Description: TPR Domain
  misc_feature (105)..(138): Pfam Name: TPR Domain Pfam Description: TPR Domain
  misc_feature (1)..(253): Homolog of NCBI NO: 18397936 NR Description: cyclophilin-40 [Arabidopsis thaliana]
  misc_feature (1)..(241): Homolog of NCBI NO: 25411671 NR Description: hypothetical protein At2g15790 [imported] -
  misc_feature (1)..(253): Homolog of NCBI NO: 34857103 NR Description: similar to peptidylprolyl isomerase D
  misc_feature (1)..(253): Homolog of NCBI NO: 13385854 NR Description: peptidylprolyl isomerase D (cyclophilin D) [Mus
  misc_feature (1)..(253): Homolog of NCBI NO: 27806463 NR Description: peptidylprolyl isomerase D (cyclophilin D) [Bos
  misc_feature (1)..(241): Homolog of NCBI NO: 25411671 NR Description: hypothetical protein At2g15790 [imported] -
  misc_feature (1)..(253): Homolog of NCBI NO: 13385854 NR Description: peptidylprolyl isomerase D (cyclophilin D) [Mus
  misc_feature (1)..(255): Homolog of NCBI NO: 40741736 NR Description: hypothetical protein AN4583.2 [Aspergillus
  misc_feature (1)..(253): Homolog of NCBI NO: 32405118 NR Description: hypothetical protein ( (AJ292563) peptidyl-prolyl
  misc_feature (1)..(253): Homolog of NCBI NO: 38174405 NR Description: Unknown (protein for MGC:75854) [Silurana
  misc_feature (1)..(253): Homolog of NCBI NO: 4826932 NR Description: peptidylprolyl isomerase D (cyclophilin D);
  misc_feature (1)..(253): Homolog of NCBI NO: 27687349 NR Description: similar to peptidylprolyl isomerase D
  misc_feature (1)..(253): Homolog of NCBI NO: 27806463 NR Description: peptidylprolyl isomerase D (cyclophilin D) [Bos
  misc_feature (1)..(253): Homolog of NCBI NO: 34857103 NR Description: similar to peptidylprolyl isomerase D
  misc_feature (1)..(253): Homolog of NCBI NO: 18397936 NR Description: cyclophilin-40 [Arabidopsis thaliana]
  misc_feature (1)..(253): Homolog of NCBI NO: 27687349 NR Description: similar to peptidylprolyl isomerase D
  misc_feature (1)..(253): Homolog of NCBI NO: 4826932 NR Description: peptidylprolyl isomerase D (cyclophilin D);
  misc_feature (1)..(253): Homolog of NCBI NO: 38174405 NR Description: Unknown (protein for MGC:75854) [Silurana
  misc_feature (1)..(253): Homolog of NCBI NO: 32405118 NR Description: hypothetical protein ( (AJ292563) peptidyl-prolyl
  misc_feature (1)..(255): Homolog of NCBI NO: 40741736 NR Description: hypothetical protein AN4583.2 [Aspergillus
MANSGPNTNGSQFFITTTRTPHLDGKHVVFGRVMKGMGVVRSIEHVSVGEADCPTLEVKIVDCGELPEGADDGVVNFFKDGDTYPDWPNDLEEKPAEVSWWMDAVESAKAYGNDNFKKQDYKAALRKYRKALRYLDLCWEKEEIDEDKSTALRKTKSIILTNSSACKLKLGDSSGALLDADFALREREGNAKAFFRQGQAHIALNDIDAAVESFKQALELEPNDAGIKRELAAAKKKIADRRDQERKAFARIFQSSGKSDKSNEENN

SEQ ID NO: 5724 - protein, 234 aa, Zea mays subsp. mays
  peptide (1)..(234): Ceres Seq. ID no. 13636258
  misc_feature (72)..(105): Pfam Name: TPR Domain Pfam Description: TPR Domain
  misc_feature (72)..(105): Pfam Name: TPR Domain Pfam Description: TPR Domain
  misc_feature (1)..(220): Homolog of NCBI NO: 18397936 NR Description: cyclophilin-40 [Arabidopsis thaliana]
  misc_feature (1)..(208): Homolog of NCBI NO: 25411671 NR Description: hypothetical protein At2g15790 [imported] -
  misc_feature (1)..(220): Homolog of NCBI NO: 34857103 NR Description: similar to peptidylprolyl isomerase D
  misc_feature (1)..(220): Homolog of NCBI NO: 13385854 NR Description: peptidylprolyl isomerase D (cyclophilin D) [Mus
  misc_feature (1)..(220): Homolog of NCBI NO: 27806463 NR Description: peptidylprolyl isomerase D (cyclophilin D) [Bos
  misc_feature (1)..(208): Homolog of NCBI NO: 25411671 NR Description: hypothetical protein At2g15790 [imported] -
  misc_feature (1)..(220): Homolog of NCBI NO: 13385854 NR Description: peptidylprolyl isomerase D (cyclophilin D) [Mus
  misc_feature (1)..(222): Homolog of NCBI NO: 40741736 NR Description: hypothetical protein AN4583.2 [Aspergillus
  misc_feature (1)..(220): Homolog of NCBI NO: 32405118 NR Description: hypothetical protein ( (AJ292563) peptidyl-prolyl
  misc_feature (1)..(220): Homolog of NCBI NO: 38174405 NR Description: Unknown (protein for MGC:75854) [Silurana
  misc_feature (1)..(220): Homolog of NCBI NO: 4826932 NR Description: peptidylprolyl isomerase D (cyclophilin D);
  misc_feature (1)..(220): Homolog of NCBI NO: 27687349 NR Description: similar to peptidylprolyl isomerase D
  misc_feature (1)..(220): Homolog of NCBI NO: 27806463 NR Description: peptidylprolyl isomerase D (cyclophilin D) [Bos
  misc_feature (1)..(220): Homolog of NCBI NO: 34857103 NR Description: similar to peptidylprolyl isomerase D
  misc_feature (1)..(220): Homolog of NCBI NO: 18397936 NR Description: cyclophilin-40 [Arabidopsis thaliana]
  misc_feature (1)..(220): Homolog of NCBI NO: 27687349 NR Description: similar to peptidylprolyl isomerase D
  misc_feature (1)..(220): Homolog of NCBI NO: 4826932 NR Description: peptidylprolyl isomerase D (cyclophilin D);
  misc_feature (1)..(220): Homolog of NCBI NO: 38174405 NR Description: Unknown (protein for MGC:75854) [Silurana
  misc_feature (1)..(220): Homolog of NCBI NO: 32405118 NR Description: hypothetical protein ( (AJ292563) peptidyl-prolyl
  misc_feature (1)..(222): Homolog of NCBI NO: 40741736 NR Description: hypothetical protein AN4583.2 [Aspergillus
MKGMGVVRSIEHVSVGEADCPTLEVKIVDCGELPEGADDGVVNFFKDGDTYPDWPNDLEEKPAEVSWWMDAVESAKAYGNDNFKKQDYKAALRKYRKALRYLDLCWEKEEIDEDKSTALRKTKSIILTNSSACKLKLGDSSGALLDADFALREREGNAKAFFRQGQAHIALNDIDAAVESFKQALELEPNDAGIKRELAAAKKKIADRRDQERKAFARIFQSSGKSDKSNEENN

SEQ ID NO: 5725 - DNA, 1301 bp, Zea mays subsp. mays
  misc_feature (1)..(1301): Ceres Seq. ID no. 12382069
  misc_feature: MA Experiment ID: 108522 Result: Up-regulated in Transcription
  misc_feature: MA Experiment 108522 PARAMETER Experiment Name: Zm_42deg_Heat_P Parameter: Age (day) Value: 8
  misc_feature: MA Experiment 108522 PARAMETER Experiment Name: Zm_42deg_Heat_P Parameter: Organism Value: Zea mays
  misc_feature: MA Experiment 108522 PARAMETER Experiment Name: Zm_42deg_Heat_P Parameter: Plant Line Value: 35A19
  misc_feature: MA Experiment 108522 PARAMETER Experiment Name: Zm_42deg_Heat_P Parameter: Temperature (deg C) Value: 42 vs. 22
  misc_feature: MA Experiment 108522 PARAMETER Experiment Name: Zm_42deg_Heat_P Parameter: Timepoint (hr) Value: 1
  misc_feature: MA Experiment 108522 PARAMETER Experiment Name: Zm_42deg_Heat_P Parameter: Tissue Value: Aerial
cagcttctggaaccttcctttcgctatacgacctgagttcgcttcaggcagccgccgctctctctctctcccgcgtccgtcccaccttcgcaagccagccacctccctgagaggcctgaccgtgatttcggcgtggcatccaaaggcggtcaagattcgagaggccggaggaaccaagcgtagggcctccgaccccacgtcgtcgtccgcgcgcgccgcccgccgccgcagggagatgggggccgattactacaaggtcctcggcgtcgaccgcggcgccagcgacgacgacctcaagaaggcctatcggaagctcgccatgcgatggcaccccgacaagaactccaccaataagaaggaggcagaaaccaagttcaaggagatctctgtggcatacgaggtccttagcgatcccaagaaacgtgcaatctatgatcagctaggggaagaagggctcaaggggcagccgcccccaggagcaggaggtcctggcacatctcccttcttccctggcggggctcattccaccgctcaccattttaacccgaggagcgcggacgatatatttaaagagttctttggatcccctggcatgggtggcatgagaacggaaccaggatttcaaaggtcaatgtttggcaacgatatcttctcttcgcgcttccgcgctgagggttccaccagtatgcagcagccattgcgcaaggcagctgcaattgagaatccacttccagtcggccttgcagatctctacaagggtgtgacaaaaaagatgaaaatctcaagagagactattgatgccagcgggagaatctcaaacacagaggatattctgacaatacaagtaaaggctggttggaagaagggaacaaggattacatttcctgacaagggaaatgaagctccaaatatgaaacctgctgatattgttttcatcattgatgagaagccccatgatgttttcactcgggagggaaatgatcttgtcgtgactgagaagatctcactggtggaagcactgactggctataccgcacgtgtcactacgcttgacgggcggagcctatcattgcacatcaactcaataatccatccaaagtacgaagaggtgatgcctggagagggcatgccagtgcccaaggaccccacaaagaagggaaatctgcggattaagttcaacataatgttcccctctaggctgacttctgatcagaaggccgggatcaagaggctattgggttcttaggccgccacctcaaatgacatcttctttatgatgaaagttgtttgtgaatattgcc

SEQ ID NO: 5726 - protein, 414 aa, Zea mays subsp. mays
  peptide (1)..(414): Ceres Seq. ID no. 12382070
  misc_feature (290)..(412): Pfam Name: DnaJ C terminal region Pfam Description: DnaJ C terminal region
  misc_feature (79)..(414): Homolog of NCBI NO: 34904486 NR Description: putative heat shock protein 40 [Oryza sativa
  misc_feature (79)..(413): Homolog of NCBI NO: 15225377 NR Description: putative heat shock protein; protein id: supported by cDNA: 25528., supported by cDNA: gi_15982894 thaliana] >gi|25296018|pir||G84590 probable heat shock protein
  misc_feature (79)..(414): Homolog of NCBI NO: 6179940 NR Description: DnaJ-like protein [Nicotiana tabacum]
  misc_feature (79)..(413): Homolog of NCBI NO: 15235310 NR Description: heat-shock protein; protein id: At4g28480.1, by cDNA: gi_14596114, supported by cDNA: gi_20148388 [Arabidopsis
  misc_feature (79)..(412): Homolog of NCBI NO: 15240968 NR Description: heat shock protein 40-like; protein id: supported by cDNA: 114622. [Arabidopsis thaliana]
  misc_feature (79)..(414): Homolog of NCBI NO: 11863723 NR Description: DnaJ like protein [Lycopersicon esculentum]
  misc_feature (79)..(414): Homolog of NCBI NO: 15231987 NR Description: putative heat shock protein; protein id: supported by cDNA: 96785. [Arabidopsis thaliana]
  misc_feature (79)..(414): Homolog of NCBI NO: 21618097 NR Description: putative heat shock protein [Arabidopsis thaliana]
  misc_feature (79)..(413): Homolog of NCBI NO: 15228294 NR Description: heat shock protein-like protein; protein id: [Arabidopsis thaliana] >gi|7441939|pir||T06689 heat shock protein
  misc_feature (79)..(412): Homolog of NCBI NO: 15239455 NR Description: heat-shock protein - like; protein id:
SFWNLPFAIRPEFASGSRRSLSLPRPSHLRKPATSLRGLTVISAWHPKAVKIREAGGTKRRASDPTSSSARAARRRREMGADYYKVLGVDRGASDDDLKKAYRKLAMRWHPDKNSTNKKEAETKFKEISVAYEVLSDPKKRAIYDQLGEEGLKGQPPPGAGGPGTSPFFPGGAHSTAHHFNPRSADDIFKEFFGSPGMGGMRTEPGFQRSMFGNDIFSSRFRAEGSTSMQQPLRKAAAIENPLPVGLADLYKGVTKKMKISRETIDASGRISNTEDILTIQVKAGWKKGTRITFPDKGNEAPNMKPADIVFIIDEKPHDVFTREGNDLVVTEKISLVEALTGYTARVTTLDGRSLSLHINSIIHPKYEEVMPGEGMPVPKDPTKKGNLRIKFNIMFPSRLTSDQKAGIKRLLGS

SEQ ID NO: 5727 - protein, 336 aa, Zea mays subsp. mays
  peptide (1)..(336): Ceres Seq. ID no. 12382071
  misc_feature (212)..(334): Pfam Name: DnaJ C terminal region Pfam Description: DnaJ C terminal region
  misc_feature (1)..(336): Homolog of NCBI NO: 34904486 NR Description: putative heat shock protein 40 [Oryza sativa
  misc_feature (1)..(335): Homolog of NCBI NO: 15225377 NR Description: putative heat shock protein; protein id: supported by cDNA: 25528., supported by cDNA: gi_15982894 thaliana] >gi|25296018|pir||G84590 probable heat shock protein
  misc_feature (1)..(336): Homolog of NCBI NO: 6179940 NR Description: DnaJ-like protein [Nicotiana tabacum]
  misc_feature (1)..(335): Homolog of NCBI NO: 15235310 NR Description: heat-shock protein; protein id: At4g28480.1, by cDNA: gi_14596114, supported by cDNA: gi_20148388 [Arabidopsis
  misc_feature (1)..(334): Homolog of NCBI NO: 15240968 NR Description: heat shock protein 40-like; protein id: supported by cDNA: 114622. [Arabidopsis thaliana]
  misc_feature (1)..(336): Homolog of NCBI NO: 11863723 NR Description: DnaJ like protein [Lycopersicon esculentum]
  misc_feature (1)..(336): Homolog of NCBI NO: 15231987 NR Description: putative heat shock protein; protein id: supported by cDNA: 96785. [Arabidopsis thaliana]
  misc_feature (1)..(336): Homolog of NCBI NO: 21618097 NR Description: putative heat shock protein [Arabidopsis thaliana]
  misc_feature (1)..(335): Homolog of NCBI NO: 15228294 NR Description: heat shock protein-like protein; protein id: [Arabidopsis thaliana] >gi|7441939|pir||T06689 heat shock protein
  misc_feature (1)..(334): Homolog of NCBI NO: 15239455 NR Description: heat-shock protein - like; protein id:
MGADYYKVLGVDRGASDDDLKKAYRKLAMRWHPDKNSTNKKEAETKFKEISVAYEVLSDPKKRAIYDQLGEEGLKGQPPPGAGGPGTSPFFPGGAHSTAHHFNPRSADDIFKEFFGSPGMGGMRTEPGFQRSMFGNDIFSSRFRAEGSTSMQQPLRKAAAIENPLPVGLADLYKGVTKKMKISRETIDASGRISNTEDILTIQVKAGWKKGTRITFPDKGNEAPNMKPADIVFIIDEKPHDVFTREGNDLVVTEKISLVEALTGYTARVTTLDGRSLSLHINSIIHPKYEEVMPGEGMPVPKDPTKKGNLRIKFNIMFPSRLTSDQKAGIKRLLGS

SEQ ID NO: 5728 - protein, 308 aa, Zea mays subsp. mays
  peptide (1)..(308): Ceres Seq. ID no. 12382072
  misc_feature (184)..(306): Pfam Name: DnaJ C terminal region Pfam Description: DnaJ C terminal region
  misc_feature (1)..(308): Homolog of NCBI NO: 34904486 NR Description: putative heat shock protein 40 [Oryza sativa
  misc_feature (1)..(307): Homolog of NCBI NO: 15225377 NR Description: putative heat shock protein; protein id: supported by cDNA: 25528., supported by cDNA: gi_15982894 thaliana] >gi|25296018|pir||G84590 probable heat shock protein
  misc_feature (1)..(308): Homolog of NCBI NO: 6179940 NR Description: DnaJ-like protein [Nicotiana tabacum]
  misc_feature (1)..(307): Homolog of NCBI NO: 15235310 NR Description: heat-shock protein; protein id: At4g28480.1, by cDNA: gi_14596114, supported by cDNA: gi_20148388 [Arabidopsis
  misc_feature (1)..(306): Homolog of NCBI NO: 15240968 NR Description: heat shock protein 40-like; protein id: supported by cDNA: 114622. [Arabidopsis thaliana]
  misc_feature (1)..(308): Homolog of NCBI NO: 11863723 NR Description: DnaJ like protein [Lycopersicon esculentum]
  misc_feature (1)..(308): Homolog of NCBI NO: 15231987 NR Description: putative heat shock protein; protein id: supported by cDNA: 96785. [Arabidopsis thaliana]
  misc_feature (1)..(308): Homolog of NCBI NO: 21618097 NR Description: putative heat shock protein [Arabidopsis thaliana]
  misc_feature (1)..(307): Homolog of NCBI NO: 15228294 NR Description: heat shock protein-like protein; protein id: [Arabidopsis thaliana] >gi|7441939|pir||T06689 heat shock protein
  misc_feature (1)..(306): Homolog of NCBI NO: 15239455 NR Description: heat-shock protein - like; protein id:
MRWHPDKNSTNKKEAETKFKEISVAYEVLSDPKKRAIYDQLGEEGLKGQPPPGAGGPGTSPFFPGGAHSTAHHFNPRSADDIFKEFFGSPGMGGMRTEPGFQRSMFGNDIFSSRFRAEGSTSMQQPLRKAAAIENPLPVGLADLYKGVTKKMKISRETIDASGRISNTEDILTIQVKAGWKKGTRITFPDKGNEAPNMKPADIVFIIDEKPHDVFTREGNDLVVTEKISLVEALTGYTARVTTLDGRSLSLHINSIIHPKYEEVMPGEGMPVPKDPTKKGNLRIKFNIMFPSRLTSDQKAGIKRLLGS

SEQ ID NO: 5729 - DNA, 1516 bp, Zea mays subsp. mays
  misc_feature (1)..(1516): Ceres Seq. ID no. 13498727
  misc_feature: MA Experiment ID: 108523 Result: Up-regulated in Transcription
  misc_feature: MA Experiment 108523 PARAMETER Experiment Name: Zm_42deg_Heat_P Parameter: Age (day) Value: 8
  misc_feature: MA Experiment 108523 PARAMETER Experiment Name: Zm_42deg_Heat_P Parameter: Organism Value: Zea mays
  misc_feature: MA Experiment 108523 PARAMETER Experiment Name: Zm_42deg_Heat_P Parameter: Plant Line Value: 35A19
  misc_feature: MA Experiment 108523 PARAMETER Experiment Name: Zm_42deg_Heat_P Parameter: Temperature (deg C) Value: 42 vs. 22
  misc_feature: MA Experiment 108523 PARAMETER Experiment Name: Zm_42deg_Heat_P Parameter: Timepoint (hr) Value: 6
  misc_feature: MA Experiment 108523 PARAMETER Experiment Name: Zm_42deg_Heat_P Parameter: Tissue Value: Aerial
  misc_feature: MA Experiment ID: 108527 Result: Up-regulated in Transcription
  misc_feature: MA Experiment 108527 PARAMETER Experiment Name: Zm_5mM_NO_P Parameter: Age (day) Value: 8
  misc_feature: MA Experiment 108527 PARAMETER Experiment Name: Zm_5mM_NO_P Parameter: Organism Value: Zea mays
  misc_feature: MA Experiment 108527 PARAMETER Experiment Name: Zm_5mM_NO_P Parameter: Plant Line Value: 35A19
  misc_feature: MA Experiment 108527 PARAMETER Experiment Name: Zm_5mM_NO_P Parameter: Timepoint (hr) Value: 6
  misc_feature: MA Experiment 108527 PARAMETER Experiment Name: Zm_5mM_NO_P Parameter: Tissue Value: Aerial
  misc_feature: MA Experiment 108527 PARAMETER Experiment Name: Zm_5mM_NO_P Parameter: Treatment Value: 5mM NO vs. No Treatment
  misc_feature: MA Experiment ID: 108535 Result: Up-regulated in Transcription
  misc_feature: MA Experiment 108535 PARAMETER Experiment Name: Zm_Meristem_P Parameter: Age (day) Value: 8
  misc_feature: MA Experiment 108535 PARAMETER Experiment Name: Zm_Meristem_P Parameter: Organism Value: Zea mays
  misc_feature: MA Experiment 108535 PARAMETER Experiment Name: Zm_Meristem_P Parameter: Plant Line Value: 35A19
  misc_feature: MA Experiment 108535 PARAMETER Experiment Name: Zm_Meristem_P Parameter: Tissue Value: Root Meristem vs. Above Root Meristem
  misc_feature: MA Experiment ID: 108544 Result: Down-regulated in Transcription
  misc_feature: MA Experiment ID: 20000488 Result: Up-regulated in Transcription
  misc_feature: MA Experiment 20000488 PARAMETER Experiment Name: Zm_50mM_NH4NO3_L_to_H_P Parameter: Organism Value: Zea mays
  misc_feature: MA Experiment 20000488 PARAMETER Experiment Name: Zm_50mM_NH4NO3_L_to_H_P Parameter: Timepoint (hr) Value: 8
  misc_feature: MA Experiment 20000488 PARAMETER Experiment Name: Zm_50mM_NH4NO3_L_to_H_P Parameter: Tissue Value: Leaves
  misc_feature: MA Experiment 20000488 PARAMETER Experiment Name: Zm_50mM_NH4NO3_L_to_H_P Parameter: Treatment Value: 50mM NH4NO3 vs. 100mM Mannitol
  misc_feature: MA Experiment ID: 20000534 Result: Down-regulated in Transcription
  misc_feature: MA Experiment 20000534 PARAMETER Experiment Name: Zm_Hybrid_Pollen_P Parameter: Age (day) Value: 8
  misc_feature: MA Experiment 20000534 PARAMETER Experiment Name: Zm_Hybrid_Pollen_P Parameter: Organism Value: Zea mays
  misc_feature: MA Experiment 20000534 PARAMETER Experiment Name: Zm_Hybrid_Pollen_P Parameter: Plant Line Value: 35A19
  misc_feature: MA Experiment 20000534 PARAMETER Experiment Name: Zm_Hybrid_Pollen_P Parameter: Tissue Value: Pollen vs. Aerial
  misc_feature: MA Experiment ID: 20000535 Result: Up-regulated in Transcription
  misc_feature: MA Experiment 20000535 PARAMETER Experiment Name: Zm_Hybrid_Seed_Dev_P Parameter: DAP Value: 30 vs. 12
  misc_feature: MA Experiment 20000535 PARAMETER Experiment Name: Zm_Hybrid_Seed_Dev_P Parameter: Organism Value: Zea mays
  misc_feature: MA Experiment 20000535 PARAMETER Experiment Name: Zm_Hybrid_Seed_Dev_P Parameter: Plant Line Value: 35A19
  misc_feature: MA Experiment 20000535 PARAMETER Experiment Name: Zm_Hybrid_Seed_Dev_P Parameter: Tissue Value: Embryo vs. Unfert Floret
aaacgccgcctactccgcgctcctccaaaccaaactgaaccctatcctagcacgagtgcacgacggtggcagcaggagatggtggggacggcggaaggcggcgcggagagggcggtgcggcggtgggtggacgccgccggcngggcgcctgcgtcctggacggcgggctggccacggagctcgaggccaacggcgccgacctcaacgacccgctctggagcgccaagtgcctcctctcctccccgcacctcatccgcaaggtccatatggactacctagaagccggggcgaacattataatcacagcatcgtatcaggctactatccaagggtttgaatcaaagggcttttcaaaagaacaaagtgaaaacttgttaacaaagagtgttcagattgcactggaagcccgtgagatgttcttgaaggaacatttggagaaatccactcctatacagcatcctattctggttgcagcagctctagggagttatggggcttatcttgctgatggctctgagtacagtggggattatggtgaagctggtacgaaagagttcctgaaggactttcatcggcggaggcttcaggttcttgctgaagcaggcccggatttgattgcttttgaaacgatccccaacaaattggaagctcaggcatatgttgaactccttgaggaatgtaacattaatatcccttcatggctttccttcaactcaaaagatggagtgcatgttgtgagtggtgattcgttaattgaatgcgctactattgctgacaagtgtgcaaaggttggtgcagtcgggataaattgcacacctccaagatttattcatggactgatactctccattcgaaaggtcacagacaagcctattctgatatatcccaacagtggtgaaagatatgatggtgaaaaaaaggagtgggtggaatccactggtgtgtcagatggtgattttgtttcgtacgtaaatgaatggtgcaaagatggggctgcgcttatcgggggctgctgcaggacaactccaaacactatcagggccatacacagaactcttaaccaaggctgccacaagcatcagttacctgtaggctgtagcatagatctgtgctccactcctaatgctctcctcccagcagtaccttgagctgtatccccgagattccttaaccagcgcgaaccaatatactgttgcgtgttctcctgcaaatgagatgttctgcacctatgtttgtaatgttgtatttctgggtttttaagctatccaacttggagatacaaccggtgaggaagcagcaacaataggtagttctacttctgagtgaggaaaaacaacttgcggctgagttaatgaagcttagtagctaccaccgttgtatgacagttgctcagagatgttatcttcattaagtgcttatattaccgctagttccctgtgaaatttgttaaaccattatatgtaagttttgtttgacaagactgcatctcctgaaactaagatcttagtttcctgct

SEQ ID NO: 5730 - protein, 293 aa, Zea mays subsp. mays
  peptide (1)..(293): Ceres Seq. ID no. 13498728
  misc_feature (1)..(266): Pfam Name: Homocysteine S-methyltransferase Pfam Description: Homocysteine S-methyltransferase
  misc_feature (1)..(275): Homolog of NCBI NO: 10732789 NR Description: homocysteine S-methyltransferase-3 [Zea mays]
  misc_feature (1)..(274): Homolog of NCBI NO: 10732787 NR Description: homocysteine S-methyltransferase-2 [Zea mays]
  misc_feature (1)..(265): Homolog of NCBI NO: 37534456 NR Description: putative homocysteine S-methyltransferase-2
  misc_feature (1)..(264): Homolog of NCBI NO: 15229396 NR Description: homocysteine S-methyltransferase AtHMT-2
  misc_feature (1)..(264): Homolog of NCBI NO: 25453566 NR Description: homocysteine S-methyltransferase (EC 2.1.1.10)
  misc_feature (1)..(266): Homolog of NCBI NO: 10732791 NR Description: homocysteine S-methyltransferase-4 [Zea mays]
  misc_feature (1)..(267): Homolog of NCBI NO: 6094303 NR Description: Selenocysteine methyltransferase
  misc_feature (1)..(265): Homolog of NCBI NO: 18403505 NR Description: selenocysteine methyltransferase -related thaliana] >gi|9279692|dbj|BAB01249.1| cysteine methyltransferase
  misc_feature (1)..(265): Homolog of NCBI NO: 21593147 NR Description: putative selenocysteine methyltransferase
  misc_feature (1)..(138): Homolog of NCBI NO: 34909958 NR Description: putative homocysteine S-methyltransferase-4
MDYLEAGANIIITASYQATIQGFESKGFSKEQSENLLTKSVQIALEAREMFLKEHLEKSTPIQHPILVAAALGSYGAYLADGSEYSGDYGEAGTKEFLKDFHRRRLQVLAEAGPDLIAFETIPNKLEAQAYVELLEECNINIPSWLSFNSKDGVHVVSGDSLIECATIADKCAKVGAVGINCTPPRFIHGLILSIRKVTDKPILIYPNSGERYDGEKKEWVESTGVSDGDFVSYVNEWCKDGAALIGGCCRTTPNTIRAIHRTLNQGCHKHQLPVGCSIDLCSTPNALLPAVP

SEQ ID NO: 5731 - protein, 244 aa, Zea mays subsp. mays
  peptide (1)..(244): Ceres Seq. ID no. 13498729
  misc_feature (1)..(217): Pfam Name: Homocysteine S-methyltransferase Pfam Description: Homocysteine S-methyltransferase
  misc_feature (1)..(226): Homolog of NCBI NO: 10732789 NR Description: homocysteine S-methyltransferase-3 [Zea mays]
  misc_feature (1)..(225): Homolog of NCBI NO: 10732787 NR Description: homocysteine S-methyltransferase-2 [Zea mays]
  misc_feature (1)..(216): Homolog of NCBI NO: 37534456 NR Description: putative homocysteine S-methyltransferase-2
  misc_feature (1)..(215): Homolog of NCBI NO: 15229396 NR Description: homocysteine S-methyltransferase AtHMT-2
  misc_feature (1)..(215): Homolog of NCBI NO: 25453566 NR Description: homocysteine S-methyltransferase (EC 2.1.1.10)
  misc_feature (1)..(217): Homolog of NCBI NO: 10732791 NR Description: homocysteine S-methyltransferase-4 [Zea mays]
  misc_feature (1)..(218): Homolog of NCBI NO: 6094303 NR Description: Selenocysteine methyltransferase
  misc_feature (1)..(216): Homolog of NCBI NO: 18403505 NR Description: selenocysteine methyltransferase -related thaliana] >gi|9279692|dbj|BAB01249.1| cysteine methyltransferase
  misc_feature (1)..(216): Homolog of NCBI NO: 21593147 NR Description: putative selenocysteine methyltransferase
  misc_feature (1)..(89): Homolog of NCBI NO: 34909958 NR Description: putative homocysteine S-methyltransferase-4
MFLKEHLEKSTPIQHPILVAAALGSYGAYLADGSEYSGDYGEAGTKEFLKDFHRRRLQVLAEAGPDLIAFETIPNKLEAQAYVELLEECNINIPSWLSFNSKDGVHVVSGDSLIECATIADKCAKVGAVGINCTPPRFIHGLILSIRKVTDKPILIYPNSGERYDGEKKEWVESTGVSDGDFVSYVNEWCKDGAALIGGCCRTTPNTIRAIHRTLNQGCHKHQLPVGCSIDLCSTPNALLPAVP

SEQ ID NO: 5732 - DNA, 1047 bp, Zea mays subsp. mays
  misc_feature (1)..(1047): Ceres Seq. ID no. 12565996
  misc_feature: MA Experiment ID: 20000492 Result: Down-regulated in Transcription
  misc_feature: MA Experiment 20000492 PARAMETER Experiment Name: Zm_Hybrid_Seed_Dev_P Parameter: DAP Value: 12
  misc_feature: MA Experiment 20000492 PARAMETER Experiment Name: Zm_Hybrid_Seed_Dev_P Parameter: Organism Value: Zea mays
  misc_feature: MA Experiment 20000492 PARAMETER Experiment Name: Zm_Hybrid_Seed_Dev_P Parameter: Plant Line Value: 35A19
  misc_feature: MA Experiment 20000492 PARAMETER Experiment Name: Zm_Hybrid_Seed_Dev_P Parameter: Tissue Value: Fert Kernel vs. Unfert Floret
  misc_feature: MA Experiment ID: 20000534 Result: Down-regulated in Transcription
  misc_feature: MA Experiment 20000534 PARAMETER Experiment Name: Zm_Hybrid_Pollen_P Parameter: Age (day) Value: 8
  misc_feature: MA Experiment 20000534 PARAMETER Experiment Name: Zm_Hybrid_Pollen_P Parameter: Organism Value: Zea mays
  misc_feature: MA Experiment 20000534 PARAMETER Experiment Name: Zm_Hybrid_Pollen_P Parameter: Plant Line Value: 35A19
  misc_feature: MA Experiment 20000534 PARAMETER Experiment Name: Zm_Hybrid_Pollen_P Parameter: Tissue Value: Pollen vs. Aerial
agagttggcctccaccgtcaagtcaccaaccacccagagactcaccagtcaccaccccaggccagccgccacgtttagccgggctaaacaaacacgggcgcacaatcggaactcgctgcactgcttggaatccaacgagccaatcattcaaatcctccccggaaccgcgttgagcagggcacggtcgattggatctagggtgagggtccgtcgccgaagaaactcgcaggcggtcacgaggaggcggcgggggagggcgggggagatggcctcggaggagatgacggcgacggaggtggctgcgctgctggacttgaagccgcacccggagggcggcttctacaccgagaccttccgcgacggctccatcacgctcaccacgtcccagctcccgccccactacaaggtaaaccgtgctgttagcaccgcaatctatttcctacttcccgcagggagtgtttcccgtctccaccgcattccctgtgctgaaacctggcacttctacaagggagagcctgtcacggtcttcgagcttcacgacgacggtcacattgaccttactgtcattggcccacaccttgaggcaggccagcgcccccagtataccgtgccaccgaacgtgtggtttgggtcgttccccacactagacgtcgagtcgttcgcatctgatggcagcgttcttgtcaagtctcggaagagggaccctgagctgcattactcccttgttggctgcacctgtgcccctggcttccagtacgaggattttgaaatggccaaatttgaggacgtgagatccatcgctcccaaggctgaacctttcctcaagtttcttattccctctaccgattaactccagagcagcctcagatgattgtggatgggttctcagcgactttctatactgcatactgtacggatggtgtttctagtgtgattccatgagagttctgctttcacgacagtgtagacagtaaactgtacctttgtggtggcaccggttgaaacgtttggtgcattgaaacagaataacagctggtcttgatgttg

SEQ ID NO: 5733 - protein, 282 aa, Zea mays subsp. mays
  peptide (1)..(282): Ceres Seq. ID no. 12565997
  misc_feature (96)..(259): Pfam Name: Protein of unknown function (DUF985) Pfam Description: Protein of unknown function (DUF985)
  misc_feature (89)..(277): Homolog of NCBI NO: 26449699 NR Description: unknown protein [Arabidopsis thaliana]
  misc_feature (89)..(277): Homolog of NCBI NO: 25402881 NR Description: protein F14D16.29 [imported] - Arabidopsis >gi|8778289|gb|AAF79298.1|AC068602_21 F14D16.29 [Arabidopsis
  misc_feature (89)..(175): Homolog of NCBI NO: 18394699 NR Description: expressed protein; protein id: At1g19130.1, by cDNA: 17545. [Arabidopsis thaliana]
  misc_feature (96)..(216): Homolog of NCBI NO: 39995284 NR Description: conserved hypothetical protein [Geobacter PCA] >gi|39982046|gb|AAR33508.1| conserved hypothetical protein
  misc_feature (239)..(263): Homolog of NCBI NO: 39995284 NR Description: conserved hypothetical protein [Geobacter PCA] >gi|39982046|gb|AAR33508.1| conserved hypothetical protein
  misc_feature (103)..(211): Homolog of NCBI NO: 16329452 NR Description: hypothetical protein [Synechocystis sp. PCC 6803]
  misc_feature (239)..(277): Homolog of NCBI NO: 16329452 NR Description: hypothetical protein [Synechocystis sp. PCC 6803]
  misc_feature (98)..(224): Homolog of NCBI NO: 22986010 NR Description: hypothetical protein [Burkholderia fungorum]
  misc_feature (234)..(280): Homolog of NCBI NO: 22986010 NR Description: hypothetical protein [Burkholderia fungorum]
  misc_feature (103)..(227): Homolog of NCBI NO: 18310898 NR Description: conserved hypothetical protein [Clostridium >gi|18145580|dbj|BAB81622.1| conserved hypothetical protein
ELASTVKSPTTQRLTSHHPRPAATFSRAKQTRAHNRNSLHCLESNEPIIQILPGTALSRARSIGSRVRVRRRRNSQAVTRRRRGRAGEMASEEMTATEVAALLDLKPHPEGGFYTETFRDGSITLTTSQLPPHYKVNRAVSTAIYFLLPAGSVSRLHRIPCAETWHFYKGEPVTVFELHDDGHIDLTVIGPHLEAGQRPQYTVPPNVWFGSFPTLDVESFASDGSVLVKSRKRDPELHYSLVGCTCAPGFQYEDFEMAKFEDVRSIAPKAEPFLKFLIPSTD

SEQ ID NO: 5734 - protein, 194 aa, Zea mays subsp. mays
  peptide (1)..(194): Ceres Seq. ID no. 12565998
  misc_feature (8)..(171): Pfam Name: Protein of unknown function (DUF985) Pfam Description: Protein of unknown function (DUF985)
  misc_feature (10)..(136): Homolog of NCBI NO: 22986010 NR Description: hypothetical protein [Burkholderia fungorum]
  misc_feature (146)..(192): Homolog of NCBI NO: 22986010 NR Description: hypothetical protein [Burkholderia fungorum]
  misc_feature (1)..(189): Homolog of NCBI NO: 25402881 NR Description: protein F14D16.29 [imported] - Arabidopsis >gi|8778289|gb|AAF79298.1|AC068602_21 F14D16.29 [Arabidopsis
  misc_feature (8)..(128): Homolog of NCBI NO: 39995284 NR Description: conserved hypothetical protein [Geobacter PCA] >gi|39982046|gb|AAR33508.1| conserved hypothetical protein
  misc_feature (15)..(123): Homolog of NCBI NO: 16329452 NR Description: hypothetical protein [Synechocystis sp. PCC 6803]
  misc_feature (151)..(189): Homolog of NCBI NO: 16329452 NR Description: hypothetical protein [Synechocystis sp. PCC 6803]
  misc_feature (151)..(175): Homolog of NCBI NO: 39995284 NR Description: conserved hypothetical protein [Geobacter PCA] >gi|39982046|gb|AAR33508.1| conserved hypothetical protein
  misc_feature (1)..(87): Homolog of NCBI NO: 18394699 NR Description: expressed protein; protein id: At1g19130.1, by cDNA: 17545. [Arabidopsis thaliana]
  misc_feature (1)..(189): Homolog of NCBI NO: 26449699 NR Description: unknown protein [Arabidopsis thaliana]
  misc_feature (15)..(139): Homolog of NCBI NO: 18310898 NR Description: conserved hypothetical protein [Clostridium >gi|18145580|dbj|BAB81622.1| conserved hypothetical protein
MASEEMTATEVAALLDLKPHPEGGFYTETFRDGSITLTTSQLPPHYKVNRAVSTAIYFLLPAGSVSRLHRIPCAETWHFYKGEPVTVFELHDDGHIDLTVIGPHLEAGQRPQYTVPPNVWFGSFPTLDVESFASDGSVLVKSRKRDPELHYSLVGCTCAPGFQYEDFEMAKFEDVRSIAPKAEPFLKFLIPSTD

SEQ ID NO: 5735 - protein, 189 aa, Zea mays subsp. mays
  peptide (1)..(189): Ceres Seq. ID no. 12565999
  misc_feature (3)..(166): Pfam Name: Protein of unknown function (DUF985) Pfam Description: Protein of unknown function (DUF985)
  misc_feature (1)..(184): Homolog of NCBI NO: 26449699 NR Description: unknown protein [Arabidopsis thaliana]
  misc_feature (1)..(184): Homolog of NCBI NO: 25402881 NR Description: protein F14D16.29 [imported] - Arabidopsis >gi|8778289|gb|AAF79298.1|AC068602_21 F14D16.29 [Arabidopsis
  misc_feature (1)..(82): Homolog of NCBI NO: 18394699 NR Description: expressed protein; protein id: At1g19130.1, by cDNA: 17545. [Arabidopsis thaliana]
  misc_feature (3)..(123): Homolog of NCBI NO: 39995284 NR Description: conserved hypothetical protein [Geobacter PCA] >gi|39982046|gb|AAR33508.1| conserved hypothetical protein
  misc_feature (146)..(170): Homolog of NCBI NO: 39995284 NR Description: conserved hypothetical protein [Geobacter PCA] >gi|39982046|gb|AAR33508.1| conserved hypothetical protein
  misc_feature (10)..(118): Homolog of NCBI NO: 16329452 NR Description: hypothetical protein [Synechocystis sp. PCC 6803]
  misc_feature (146)..(184): Homolog of NCBI NO: 16329452 NR Description: hypothetical protein [Synechocystis sp. PCC 6803]
  misc_feature (5)..(131): Homolog of NCBI NO: 22986010 NR Description: hypothetical protein [Burkholderia fungorum]
  misc_feature (141)..(187): Homolog of NCBI NO: 22986010 NR Description: hypothetical protein [Burkholderia fungorum]
  misc_feature (10)..(134): Homolog of NCBI NO: 18310898 NR Description: conserved hypothetical protein [Clostridium >gi|18145580|dbj|BAB81622.1| conserved hypothetical protein
MTATEVAALLDLKPHPEGGFYTETFRDGSITLTTSQLPPHYKVNRAVSTAIYFLLPAGSVSRLHRIPCAETWHFYKGEPVTVFELHDDGHIDLTVIGPHLEAGQRPQYTVPPNVWFGSFPTLDVESFASDGSVLVKSRKRDPELHYSLVGCTCAPGFQYEDFEMAKFEDVRSIAPKAEPFLKFLIPSTD

SEQ ID NO: 5736 - DNA, 1214 bp, Zea mays subsp. mays
  misc_feature (1)..(1214): Ceres Seq. ID no. 12387065
  misc_feature: MA Experiment ID: 108504 Result: Up-regulated in Transcription
  misc_feature: MA Experiment 108504 PARAMETER Experiment Name: Zm_Drought_P Parameter: Age (day) Value: 8
  misc_feature: MA Experiment 108504 PARAMETER Experiment Name: Zm_Drought_P Parameter: Organism Value: Zea mays
  misc_feature: MA Experiment 108504 PARAMETER Experiment Name: Zm_Drought_P Parameter: Plant Line Value: 35A19
  misc_feature: MA Experiment 108504 PARAMETER Experiment Name: Zm_Drought_P Parameter: Timepoint (hr) Value: 12
  misc_feature: MA Experiment 108504 PARAMETER Experiment Name: Zm_Drought_P Parameter: Tissue Value: Aerial
  misc_feature: MA Experiment 108504 PARAMETER Experiment Name: Zm_Drought_P Parameter: Treatment Value: Drought vs. No Drought
  misc_feature: MA Experiment ID: 108523 Result: Down-regulated in Transcription
  misc_feature: MA Experiment 108523 PARAMETER Experiment Name: Zm_42deg_Heat_P Parameter: Age (day) Value: 8
  misc_feature: MA Experiment 108523 PARAMETER Experiment Name: Zm_42deg_Heat_P Parameter: Organism Value: Zea mays
  misc_feature: MA Experiment 108523 PARAMETER Experiment Name: Zm_42deg_Heat_P Parameter: Plant Line Value: 35A19
  misc_feature: MA Experiment 108523 PARAMETER Experiment Name: Zm_42deg_Heat_P Parameter: Temperature (deg C) Value: 42 vs. 22
  misc_feature: MA Experiment 108523 PARAMETER Experiment Name: Zm_42deg_Heat_P Parameter: Timepoint (hr) Value: 6
  misc_feature: MA Experiment 108523 PARAMETER Experiment Name: Zm_42deg_Heat_P Parameter: Tissue Value: Aerial
  misc_feature: MA Experiment ID: 108527 Result: Down-regulated in Transcription
  misc_feature: MA Experiment 108527 PARAMETER Experiment Name: Zm_5mM_NO_P Parameter: Age (day) Value: 8
  misc_feature: MA Experiment 108527 PARAMETER Experiment Name: Zm_5mM_NO_P Parameter: Organism Value: Zea mays
  misc_feature: MA Experiment 108527 PARAMETER Experiment Name: Zm_5mM_NO_P Parameter: Plant Line Value: 35A19
  misc_feature: MA Experiment 108527 PARAMETER Experiment Name: Zm_5mM_NO_P Parameter: Timepoint (hr) Value: 6
  misc_feature: MA Experiment 108527 PARAMETER Experiment Name: Zm_5mM_NO_P Parameter: Tissue Value: Aerial
  misc_feature: MA Experiment 108527 PARAMETER Experiment Name: Zm_5mM_NO_P Parameter: Treatment Value: 5mM NO vs. No Treatment
  misc_feature: MA Experiment ID: 108535 Result: Down-regulated in Transcription
  misc_feature: MA Experiment 108535 PARAMETER Experiment Name: Zm_Meristem_P Parameter: Age (day) Value: 8
  misc_feature: MA Experiment 108535 PARAMETER Experiment Name: Zm_Meristem_P Parameter: Organism Value: Zea mays
  misc_feature: MA Experiment 108535 PARAMETER Experiment Name: Zm_Meristem_P Parameter: Plant Line Value: 35A19
  misc_feature: MA Experiment 108535 PARAMETER Experiment Name: Zm_Meristem_P Parameter: Tissue Value: Root Meristem vs. Above Root Meristem
  misc_feature: MA Experiment ID: 108536 Result: Down-regulated in Transcription
  misc_feature: MA Experiment 108536 PARAMETER Experiment Name: Zm_Meristem_P Parameter: Age (day) Value: 8
  misc_feature: MA Experiment 108536 PARAMETER Experiment Name: Zm_Meristem_P Parameter: Organism Value: Zea mays
  misc_feature: MA Experiment 108536 PARAMETER Experiment Name: Zm_Meristem_P Parameter: Plant Line Value: 35A19
  misc_feature: MA Experiment 108536 PARAMETER Experiment Name: Zm_Meristem_P Parameter: Tissue Value: Shoot Meristem vs. Above Shoot Meristem
  misc_feature: MA Experiment ID: 108543 Result: Up-regulated in Transcription
  misc_feature: MA Experiment ID: 108545 Result: Down-regulated in Transcription
  misc_feature: MA Experiment 108545 PARAMETER Experiment Name: Zm_Imbibed_Seeds_P Parameter: Age (day) Value: 3 vs. 2
  misc_feature: MA Experiment 108545 PARAMETER Experiment Name: Zm_Imbibed_Seeds_P Parameter: Organism Value: Zea mays
  misc_feature: MA Experiment 108545 PARAMETER Experiment Name: Zm_Imbibed_Seeds_P Parameter: Plant Line Value: 35A19
  misc_feature: MA Experiment 108545 PARAMETER Experiment Name: Zm_Imbibed_Seeds_P Parameter: Tissue Value: Aerial vs. Embryo
  misc_feature: MA Experiment ID: 108546 Result: Up-regulated in Transcription
  misc_feature: MA Experiment 108546 PARAMETER Experiment Name: Zm_Imbibed_Seeds_P Parameter: Age (day) Value: 3 vs. 2
  misc_feature: MA Experiment 108546 PARAMETER Experiment Name: Zm_Imbibed_Seeds_P Parameter: Organism Value: Zea mays
  misc_feature: MA Experiment 108546 PARAMETER Experiment Name: Zm_Imbibed_Seeds_P Parameter: Plant Line Value: 35A19
  misc_feature: MA Experiment 108546 PARAMETER Experiment Name: Zm_Imbibed_Seeds_P Parameter: Tissue Value: Roots vs. Embryo
  misc_feature: MA Experiment ID: 108688 Result: Down-regulated in Transcription
  misc_feature: MA Experiment 108688 PARAMETER Experiment Name: Zm_Embryos-Flowers__P Parameter: Tissue Value: Immature Flowers vs. Aerial+
  misc_feature: MA Experiment ID: 20000479 Result: Down-regulated in Transcription
  misc_feature: MA Experiment 20000479 PARAMETER Experiment Name: Zm_Drought_P Parameter: Age (day) Value: 10
  misc_feature: MA Experiment 20000479 PARAMETER Experiment Name: Zm_Drought_P Parameter: Organism Value: Zea mays
  misc_feature: MA Experiment 20000479 PARAMETER Experiment Name: Zm_Drought_P Parameter: Plant Line Value: 35A19
  misc_feature: MA Experiment 20000479 PARAMETER Experiment Name: Zm_Drought_P Parameter: Timepoint (hr) Value: 48
  misc_feature: MA Experiment 20000479 PARAMETER Experiment Name: Zm_Drought_P Parameter: Tissue Value: Aerial
  misc_feature: MA Experiment 20000479 PARAMETER Experiment Name: Zm_Drought_P Parameter: Treatment Value: Drought vs. No Drought
  misc_feature: MA Experiment ID: 20000480 Result: Down-regulated in Transcription
  misc_feature: MA Experiment 20000480 PARAMETER Experiment Name: Zm_Drought_P Parameter: Age (day) Value: 11
  misc_feature: MA Experiment 20000480 PARAMETER Experiment Name: Zm_Drought_P Parameter: Organism Value: Zea mays
  misc_feature: MA Experiment 20000480 PARAMETER Experiment Name: Zm_Drought_P Parameter: Plant Line Value: 35A19
  misc_feature: MA Experiment 20000480 PARAMETER Experiment Name: Zm_Drought_P Parameter: Timepoint (hr) Value: 72
  misc_feature: MA Experiment 20000480 PARAMETER Experiment Name: Zm_Drought_P Parameter: Tissue Value: Aerial
  misc_feature: MA Experiment 20000480 PARAMETER Experiment Name: Zm_Drought_P Parameter: Treatment Value: Drought vs. No Drought
  misc_feature: MA Experiment ID: 20000492 Result: Down-regulated in Transcription
  misc_feature: MA Experiment 20000492 PARAMETER Experiment Name: Zm_Hybrid_Seed_Dev_P Parameter: DAP Value: 12
  misc_feature: MA Experiment 20000492 PARAMETER Experiment Name: Zm_Hybrid_Seed_Dev_P Parameter: Organism Value: Zea mays
  misc_feature: MA Experiment 20000492 PARAMETER Experiment Name: Zm_Hybrid_Seed_Dev_P Parameter: Plant Line Value: 35A19
  misc_feature: MA Experiment 20000492 PARAMETER Experiment Name: Zm_Hybrid_Seed_Dev_P Parameter: Tissue Value: Fert Kernel vs. Unfert Floret
  misc_feature: MA Experiment ID: 20000535 Result: Down-regulated in Transcription
  misc_feature: MA Experiment 20000535 PARAMETER Experiment Name: Zm_Hybrid_Seed_Dev_P Parameter: DAP Value: 30 vs. 12
  misc_feature: MA Experiment 20000535 PARAMETER Experiment Name: Zm_Hybrid_Seed_Dev_P Parameter: Organism Value: Zea mays
  misc_feature: MA Experiment 20000535 PARAMETER Experiment Name: Zm_Hybrid_Seed_Dev_P Parameter: Plant Line Value: 35A19
  misc_feature: MA Experiment 20000535 PARAMETER Experiment Name: Zm_Hybrid_Seed_Dev_P Parameter: Tissue Value: Embryo vs. Unfert Floret
aaactgcatcagagcacgaccacactacccacccacctccactactgacgaccgattcccagaaagctcgatctagcgcgcgcggctgcagagtgcagacgacgacgtacaccatggcgcggcggtccctggccctgctgctcgcgtcgtcgctcgccctgatggcggccgccgtcgcatcggcggactcgtggctctacgacaagttcaacacggacggcaccgtccgcacccagtacgacgcgtcggggcaggaggtggcgatgctcagcctggaccgcagctccggcgccggcttcaactccaagaagcagtacctgtacggcgagttcagcgtccagatgaagctcatccccggcaactccgccggcaccgtctcgtgcttctacctctcgtcgggcgacggcgacgggcacgacgagatcgacatggagttcatgggcaacgcgagcgggcagccggtggtgctgaacacgaacgtgtgggccagcggcgacggcaagaaggagcaccagttcgacctctggttcgacccctccgccgactaccacacctacaccatcatctggaacccgaccaacatcctgttcaaggtggacggcgacgtgatccggtgcttcaagcgctacgccgacctgccgtacccgagcgcgaggcccatggcgctgcacgccacgctgtgggacggcagctactgggccaccgagaagggcaaggtgccggtggactggtccgccgcgcccttcgtcgtctcctaccggggctactcggccaacgcctgcgtcagcggcggggcctgcggcggcggcggcgacgacgggtggatgagcaagcagcccgacgacgccgagtggggcaccgtccggtgggccgagagcaactacatgcgctacaactactgcgacgacggctggcggttcccccagggcctcccgcccgagtgcagccgcagctaagctagctgattccgccggttttcgtacgctcggcggcgtccgctgacgacacacgccttgttggtttgttcttgctggacatcatacatctctatatgcatgattcttgttctgttattgttaaatcgtgattacaatacttgtaattgtaaagaagtgtgtgggcacgggagtatatcactgtagttttaatttgcttgtaaagaaaagaagggtttttttacttgtgacgcgggagctagcgactgcgtcctgttc

SEQ ID NO: 5737 - protein, 317 aa, Zea mays subsp. mays
  peptide (1)..(317): Ceres Seq. ID no. 12387066
  misc_feature (66)..(244): Pfam Name: Glycosyl hydrolases family 16 Pfam Description: Glycosyl hydrolases family 16
  misc_feature (38)..(316): Homolog of NCBI NO: 7447410 NR Description: xyloglucan endo-1,4-beta-D-glucanase (EC 3.2.1.-) barley >gi|1890573|emb|CAA63661.1| xyloglucan
  misc_feature (38)..(316): Homolog of NCBI NO: 40253521 NR Description: putative end-xyloglucan transferase [Oryza sativa
  misc_feature (38)..(316): Homolog of NCBI NO: 7447415 NR Description: xyloglucan endotransglycosylase (EC 2.4.1.-) - >gi|1885312|emb|CAA62848.1| similar to Xyloglucan
  misc_feature (38)..(316): Homolog of NCBI NO: 14330334 NR Description: Xet2 protein [Festuca pratensis]
  misc_feature (38)..(294): Homolog of NCBI NO: 7447411 NR Description: end-xyloglucan transferase (EC 2.4.1.-) - rice
  misc_feature (44)..(315): Homolog of NCBI NO: 7447403 NR Description: xyloglucan endo-1,4-beta-D-glucanase (EC 3.2.1.-)
  misc_feature (66)..(314): Homolog of NCBI NO: 8886865 NR Description: xyloglucan endotransglycosylase XET1 [Asparagus
  misc_feature (45)..(317): Homolog of NCBI NO: 2129936 NR Description: xyloglucan endo-1,4-beta-D-glucanase (EC 3.2.1.-)
  misc_feature (38)..(315): Homolog of NCBI NO: 29500891 NR Description: putative xyloglucan endotransglycosylase [Cucumis >gi|29500899|emb|CAD87533.1| putative xyloglucan
  misc_feature (43)..(315): Homolog of NCBI NO: 8886867 NR Description: xyloglucan endotransglycosylase XET2 [Asparagus
TASEHDHTTHPPPLLTTDSQKARSSARGCRVQTTTYTMARRSLALLLASSLALMAAAVASADSWLYDKFNTDGTVRTQYDASGQEVAMLSLDRSSGAGFNSKKQYLYGEFSVQMKLIPGNSAGTVSCFYLSSGDGDGHDEIDMEFMGNASGQPVVLNTNVWASGDGKKEHQFDLWFDPSADYHTYTIIWNPTNILFKVDGDVIRCFKRYADLPYPSARPMALHATLWDGSYWATEKGKVPVDWSAAPFVVSYRGYSANACVSGGACGGGGDDGWMSKQPDDAEWGTVRWAESNYMRYNYCDDGWRFPQGLPPECSRS

SEQ ID NO: 5738 - protein, 280 aa, Zea mays subsp. mays
  peptide (1)..(280): Ceres Seq. ID no. 12387067
  misc_feature (29)..(207): Pfam Name: Glycosyl hydrolases family 16 Pfam Description: Glycosyl hydrolases family 16
  misc_feature (1)..(279): Homolog of NCBI NO: 7447410 NR Description: xyloglucan endo-1,4-beta-D-glucanase (EC 3.2.1.-) barley >gi|1890573|emb|CAA63661.1| xyloglucan
  misc_feature (1)..(279): Homolog of NCBI NO: 40253521 NR Description: putative end-xyloglucan transferase [Oryza sativa
  misc_feature (1)..(279): Homolog of NCBI NO: 7447415 NR Description: xyloglucan endotransglycosylase (EC 2.4.1.-) - >gi|1885312|emb|CAA62848.1| similar to Xyloglucan
  misc_feature (1)..(279): Homolog of NCBI NO: 14330334 NR Description: Xet2 protein [Festuca pratensis]
  misc_feature (1)..(257): Homolog of NCBI NO: 7447411 NR Description: end-xyloglucan transferase (EC 2.4.1.-) - rice
  misc_feature (7)..(278): Homolog of NCBI NO: 7447403 NR Description: xyloglucan endo-1,4-beta-D-glucanase (EC 3.2.1.-)
  misc_feature (29)..(277): Homolog of NCBI NO: 8886865 NR Description: xyloglucan endotransglycosylase XET1 [Asparagus
  misc_feature (8)..(280): Homolog of NCBI NO: 2129936 NR Description: xyloglucan endo-1,4-beta-D-glucanase (EC 3.2.1.-)
  misc_feature (1)..(278): Homolog of NCBI NO: 29500891 NR Description: putative xyloglucan endotransglycosylase [Cucumis >gi|29500899|emb|CAD87533.1| putative xyloglucan
  misc_feature (6)..(278): Homolog of NCBI NO: 8886867 NR Description: xyloglucan endotransglycosylase XET2 [Asparagus
MARRSLALLLASSLALMAAAVASADSWLYDKFNTDGTVRTQYDASGQEVAMLSLDRSSGAGFNSKKQYLYGEFSVQMKLIPGNSAGTVSCFYLSSGDGDGHDEIDMEFMGNASGQPVVLNTNVWASGDGKKEHQFDLWFDPSADYHTYTIIWNPTNILFKVDGDVIRCFKRYADLPYPSARPMALHATLWDGSYWATEKGKVPVDWSAAPFVVSYRGYSANACVSGGACGGGGDDGWMSKQPDDAEWGTVRWAESNYMRYNYCDDGWRFPQGLPPECSRS

SEQ ID NO: 5739 - protein, 264 aa, Zea mays subsp. mays
  peptide (1)..(264): Ceres Seq. ID no. 12387068
  misc_feature (13)..(191): Pfam Name: Glycosyl hydrolases family 16 Pfam Description: Glycosyl hydrolases family 16
  misc_feature (1)..(263): Homolog of NCBI NO: 7447410 NR Description: xyloglucan endo-1,4-beta-D-glucanase (EC 3.2.1.-) barley >gi|1890573|emb|CAA63661.1| xyloglucan
  misc_feature (1)..(263): Homolog of NCBI NO: 40253521 NR Description: putative end-xyloglucan transferase [Oryza sativa
  misc_feature (1)..(263): Homolog of NCBI NO: 7447415 NR Description: xyloglucan endotransglycosylase (EC 2.4.1.-) - >gi|1885312|emb|CAA62848.1| similar to Xyloglucan
  misc_feature (1)..(263): Homolog of NCBI NO: 14330334 NR Description: Xet2 protein [Festuca pratensis]
  misc_feature (1)..(241): Homolog of NCBI NO: 7447411 NR Description: end-xyloglucan transferase (EC 2.4.1.-) - rice
  misc_feature (1)..(262): Homolog of NCBI NO: 7447403 NR Description: xyloglucan endo-1,4-beta-D-glucanase (EC 3.2.1.-)
  misc_feature (13)..(261): Homolog of NCBI NO: 8886865 NR Description: xyloglucan endotransglycosylase XET1 [Asparagus
  misc_feature (1)..(264): Homolog of NCBI NO: 2129936 NR Description: xyloglucan endo-1,4-beta-D-glucanase (EC 3.2.1.-)
  misc_feature (1)..(262): Homolog of NCBI NO: 29500891 NR Description: putative xyloglucan endotransglycosylase [Cucumis >gi|29500899|emb|CAD87533.1| putative xyloglucan
  misc_feature (1)..(262): Homolog of NCBI NO: 8886867 NR Description: xyloglucan endotransglycosylase XET2 [Asparagus
MAAAVASADSWLYDKFNTDGTVRTQYDASGQEVAMLSLDRSSGAGFNSKKQYLYGEFSVQMKLIPGNSAGTVSCFYLSSGDGDGHDEIDMEFMGNASGQPVVLNTNVWASGDGKKEHQFDLWFDPSADYHTYTIIWNPTNILFKVDGDVIRCFKRYADLPYPSARPMALHATLWDGSYWATEKGKVPVDWSAAPFVVSYRGYSANACVSGGACGGGGDDGWMSKQPDDAEWGTVRWAESNYMRYNYCDDGWRFPQGLPPECSRS

SEQ ID NO: 5740 - DNA, 1186 bp, Zea mays subsp. mays
  misc_feature (1)..(1186): Ceres Seq. ID no. 12435025
  misc_feature: MA Experiment ID: 108527 Result: Down-regulated in Transcription
  misc_feature: MA Experiment 108527 PARAMETER Experiment Name: Zm_5mM_NO_P Parameter: Age (day) Value: 8
  misc_feature: MA Experiment 108527 PARAMETER Experiment Name: Zm_5mM_NO_P Parameter: Organism Value: Zea mays
  misc_feature: MA Experiment 108527 PARAMETER Experiment Name: Zm_5mM_NO_P Parameter: Plant Line Value: 35A19
  misc_feature: MA Experiment 108527 PARAMETER Experiment Name: Zm_5mM_NO_P Parameter: Timepoint (hr) Value: 6
  misc_feature: MA Experiment 108527 PARAMETER Experiment Name: Zm_5mM_NO_P Parameter: Tissue Value: Aerial
  misc_feature: MA Experiment 108527 PARAMETER Experiment Name: Zm_5mM_NO_P Parameter: Treatment Value: 5mM NO vs. No Treatment
  misc_feature: MA Experiment ID: 108528 Result: Up-regulated in Transcription
  misc_feature: MA Experiment 108528 PARAMETER Experiment Name: Zm_Imbibed_Seeds_P Parameter: Age (day) Value: 5 vs. 2
  misc_feature: MA Experiment 108528 PARAMETER Experiment Name: Zm_Imbibed_Seeds_P Parameter: Organism Value: Zea mays
  misc_feature: MA Experiment 108528 PARAMETER Experiment Name: Zm_Imbibed_Seeds_P Parameter: Plant Line Value: 35A19
  misc_feature: MA Experiment 108528 PARAMETER Experiment Name: Zm_Imbibed_Seeds_P Parameter: Tissue Value: Aerial vs. Embryo
  misc_feature: MA Experiment ID: 108530 Result: Up-regulated in Transcription
  misc_feature: MA Experiment 108530 PARAMETER Experiment Name: Zm_Imbibed_Seeds_P Parameter: Age (day) Value: 6 vs. 2
  misc_feature: MA Experiment 108530 PARAMETER Experiment Name: Zm_Imbibed_Seeds_P Parameter: Organism Value: Zea mays
  misc_feature: MA Experiment 108530 PARAMETER Experiment Name: Zm_Imbibed_Seeds_P Parameter: Plant Line Value: 35A19
  misc_feature: MA Experiment 108530 PARAMETER Experiment Name: Zm_Imbibed_Seeds_P Parameter: Tissue Value: Aerial vs. Embryo
  misc_feature: MA Experiment ID: 108536 Result: Down-regulated in Transcription
  misc_feature: MA Experiment 108536 PARAMETER Experiment Name: Zm_Meristem_P Parameter: Age (day) Value: 8
  misc_feature: MA Experiment 108536 PARAMETER Experiment Name: Zm_Meristem_P Parameter: Organism Value: Zea mays
  misc_feature: MA Experiment 108536 PARAMETER Experiment Name: Zm_Meristem_P Parameter: Plant Line Value: 35A19
  misc_feature: MA Experiment 108536 PARAMETER Experiment Name: Zm_Meristem_P Parameter: Tissue Value: Shoot Meristem vs. Above Shoot Meristem
  misc_feature: MA Experiment ID: 108545 Result: Up-regulated in Transcription
  misc_feature: MA Experiment 108545 PARAMETER Experiment Name: Zm_Imbibed_Seeds_P Parameter: Age (day) Value: 3 vs. 2
  misc_feature: MA Experiment 108545 PARAMETER Experiment Name: Zm_Imbibed_Seeds_P Parameter: Organism Value: Zea mays
  misc_feature: MA Experiment 108545 PARAMETER Experiment Name: Zm_Imbibed_Seeds_P Parameter: Plant Line Value: 35A19
  misc_feature: MA Experiment 108545 PARAMETER Experiment Name: Zm_Imbibed_Seeds_P Parameter: Tissue Value: Aerial vs. Embryo
  misc_feature: MA Experiment ID: 108546 Result: Down-regulated in Transcription
  misc_feature: MA Experiment 108546 PARAMETER Experiment Name: Zm_Imbibed_Seeds_P Parameter: Age (day) Value: 3 vs. 2
  misc_feature: MA Experiment 108546 PARAMETER Experiment Name: Zm_Imbibed_Seeds_P Parameter: Organism Value: Zea mays
  misc_feature: MA Experiment 108546 PARAMETER Experiment Name: Zm_Imbibed_Seeds_P Parameter: Plant Line Value: 35A19
  misc_feature: MA Experiment 108546 PARAMETER Experiment Name: Zm_Imbibed_Seeds_P Parameter: Tissue Value: Roots vs. Embryo
  misc_feature: MA Experiment ID: 108547 Result: Up-regulated in Transcription
  misc_feature: MA Experiment 108547 PARAMETER Experiment Name: Zm_Imbibed_Seeds_P Parameter: Age (day) Value: 4 vs. 2
  misc_feature: MA Experiment 108547 PARAMETER Experiment Name: Zm_Imbibed_Seeds_P Parameter: Organism Value: Zea mays
  misc_feature: MA Experiment 108547 PARAMETER Experiment Name: Zm_Imbibed_Seeds_P Parameter: Plant Line Value: 35A19
  misc_feature: MA Experiment 108547 PARAMETER Experiment Name: Zm_Imbibed_Seeds_P Parameter: Tissue Value: Aerial vs. Embryo
aacaacgcgcactcgcgcagcagacactgcccatcaggatttcgcaaaagcaacaaaacccacgtcgagggtagaagaggcctgcaaatttccgaagagctcgcggaaatggcgacggtgctgccgcttgccgccgcctcggcctcgcccacgccgaggacttgcatctccggcggcccagttcccgcgcgattccttgggactcgcatgcgtctccgcatccacatcccaccgcggggcgttgcctgcgccctccgaaggagacccaccaagtacaagactaaaatccagagtgaggaggatgtggtggctgcagaagatgtcatggatgatgatgacgacgaggatggtgcactggaagcacttttcaagcagctggaagaagatcttgacaatgatgatttatctgtcgatgataatgatatatcagaagaagatatggcaaggtttgaaaaggagttggcagaagcaattgaagatgtcagtggtgttgatgactcagcgggggattcgttgctgagctctggcgactatggtattgatgagcancnagatggaagcgnacgggtagagctgaaaacctggcaactccggagattggctcgtgnnctgaaaataggccggcgtaaaactagtattaagaatcttgcaggggagctaggcctagataggggtttggttattgaaatgctccgcaatccaccaccgangcttctactcatgnctgattctttgcctgatgaagtcccttctaaatctgaagtgaaggaaatagaaacccctagtacgaccactgttgacgaggttgataccagtgaaatcaaaccacagttggagcttccagtgcacgtcatgagtncagaatggtctgcaagaaaaagactgaaaaaggtgcaacttgagaccttagaaagagtctacctgcgaagcaaacggcccacgaatacaatggtcagcagcatagttcaagtgacaaaccttccgcgaaagaccattgttaagtggtttgaggatagaagggagcaagatggagtccctgaccatcgtgctgcattcaagagatccctatctgagattggtgctagttcataacttcttcagtataagcatttgttacggtgtttacttggaaccattacaaacatgtaaatatgagctttgaaattatgacaagttttgcaagctc

SEQ ID NO: 5741 - protein, 363 aa, Zea mays subsp. mays
  peptide (1)..(363): Ceres Seq. ID no. 12435026
  misc_feature (78)..(362): Homolog of NCBI NO: 29367497 NR Description: unknown [Oryza sativa (japonica cultivar-group)]
  misc_feature (106)..(353): Homolog of NCBI NO: 8953389 NR Description: putative protein [Arabidopsis thaliana]
  misc_feature (106)..(353): Homolog of NCBI NO: 30683552 NR Description: expressed protein [Arabidopsis thaliana] putative protein [Arabidopsis thaliana]
  misc_feature (183)..(183): Xaa is any aa, unknown or other
  misc_feature (184)..(184): Xaa is any aa, unknown or other
  misc_feature (188)..(188): Xaa is any aa, unknown or other
  misc_feature (203)..(203): Xaa is any aa, unknown or other
  misc_feature (237)..(237): Xaa is any aa, unknown or other
  misc_feature (242)..(242): Xaa is any aa, unknown or other
  misc_feature (287)..(287): Xaa is any aa, unknown or other
NNAHSRSRHCPSGFRKSNKTHVEGRRGLQISEELAEMATVLPLAAASASPTPRTCISGGPVPARFLGTRMRLRIHIPPRGVACALRRRPTKYKTKIQSEEDVVAAEDVMDDDDDEDGALEALFKQLEEDLDNDDLSVDDNDISEEDMARFEKELAEAIEDVSGVDDSAGDSLLSSGDYGIDEXXDGSXRVELKTWQLRRLARXLKIGRRKTSIKNLAGELGLDRGLVIEMLRNPPPXLLLMXDSLPDEVPSKSEVKEIETPSTTTVDEVDTSEIKPQLELPVHVMSXEWSARKRLKKVQLETLERVYLRSKRPTNTMVSSIVQVTNLPRKTIVKWFEDRREQDGVPDHRAAFKRSLSEIGASS

SEQ ID NO: 5742 - protein, 327 aa, Zea mays subsp. mays
  peptide (1)..(327): Ceres Seq. ID no. 12435027
  misc_feature (42)..(326): Homolog of NCBI NO: 29367497 NR Description: unknown [Oryza sativa (japonica cultivar-group)]
  misc_feature (70)..(317): Homolog of NCBI NO: 8953389 NR Description: putative protein [Arabidopsis thaliana]
  misc_feature (70)..(317): Homolog of NCBI NO: 30683552 NR Description: expressed protein [Arabidopsis thaliana] putative protein [Arabidopsis thaliana]
  misc_feature (147)..(147): Xaa is any aa, unknown or other
  misc_feature (148)..(148): Xaa is any aa, unknown or other
  misc_feature (152)..(152): Xaa is any aa, unknown or other
  misc_feature (167)..(167): Xaa is any aa, unknown or other
  misc_feature (201)..(201): Xaa is any aa, unknown or other
  misc_feature (206)..(206): Xaa is any aa, unknown or other
  misc_feature (251)..(251): Xaa is any aa, unknown or other
MATVLPLAAASASPTPRTCISGGPVPARFLGTRMRLRIHIPPRGVACALRRRPTKYKTKIQSEEDVVAAEDVMDDDDDEDGALEALFKQLEEDLDNDDLSVDDNDISEEDMARFEKELAEAIEDVSGVDDSAGDSLLSSGDYGIDEXXDGSXRVELKTWQLRRLARXLKIGRRKTSIKNLAGELGLDRGLVIEMLRNPPPXLLLMXDSLPDEVPSKSEVKEIETPSTTTVDEVDTSEIKPQLELPVHVMSXEWSARKRLKKVQLETLERVYLRSKRPTNTMVSSIVQVTNLPRKTIVKWFEDRREQDGVPDHRAAFKRSLSEIGASS

SEQ ID NO: 5743 - protein, 294 aa, Zea mays subsp. mays
  peptide (1)..(294): Ceres Seq. ID no. 12435028
  misc_feature (9)..(293): Homolog of NCBI NO: 29367497 NR Description: unknown [Oryza sativa (japonica cultivar-group)]
  misc_feature (37)..(284): Homolog of NCBI NO: 8953389 NR Description: putative protein [Arabidopsis thaliana]
  misc_feature (37)..(284): Homolog of NCBI NO: 30683552 NR Description: expressed protein [Arabidopsis thaliana] putative protein [Arabidopsis thaliana]
  misc_feature (114)..(114): Xaa is any aa, unknown or other
  misc_feature (115)..(115): Xaa is any aa, unknown or other
  misc_feature (119)..(119): Xaa is any aa, unknown or other
  misc_feature (134)..(134): Xaa is any aa, unknown or other
  misc_feature (168)..(168): Xaa is any aa, unknown or other
  misc_feature (173)..(173): Xaa is any aa, unknown or other
  misc_feature (218)..(218): Xaa is any aa, unknown or other
MRLRIHIPPRGVACALRRRPTKYKTKIQSEEDVVAAEDVMDDDDDEDGALEALFKQLEEDLDNDDLSVDDNDISEEDMARFEKELAEAIEDVSGVDDSAGDSLLSSGDYGIDEXXDGSXRVELKTWQLRRLARXLKIGRRKTSIKNLAGELGLDRGLVIEMLRNPPPXLLLMXDSLPDEVPSKSEVKEIETPSTTTVDEVDTSEIKPQLELPVHVMSXEWSARKRLKKVQLETLERVYLRSKRPTNTMVSSIVQVTNLPRKTIVKWFEDRREQDGVPDHRAAFKRSLSEIGASS

SEQ ID NO: 5744 - DNA, 1289 bp, Zea mays subsp. mays
  misc_feature (1)..(1289): Ceres Seq. ID no. 12344120
  misc_feature: MA Experiment ID: 108504 Result: Up-regulated in Transcription
  misc_feature: MA Experiment 108504 PARAMETER Experiment Name: Zm_Drought_P Parameter: Age (day) Value: 8
  misc_feature: MA Experiment 108504 PARAMETER Experiment Name: Zm_Drought_P Parameter: Organism Value: Zea mays
  misc_feature: MA Experiment 108504 PARAMETER Experiment Name: Zm_Drought_P Parameter: Plant Line Value: 35A19
  misc_feature: MA Experiment 108504 PARAMETER Experiment Name: Zm_Drought_P Parameter: Timepoint (hr) Value: 12
  misc_feature: MA Experiment 108504 PARAMETER Experiment Name: Zm_Drought_P Parameter: Tissue Value: Aerial
  misc_feature: MA Experiment 108504 PARAMETER Experiment Name: Zm_Drought_P Parameter: Treatment Value: Drought vs. No Drought
  misc_feature: MA Experiment ID: 108544 Result: Up-regulated in Transcription
  misc_feature: MA Experiment ID: 108556 Result: Up-regulated in Transcription
  misc_feature: MA Experiment 108556 PARAMETER Experiment Name: Zm_Drought_P Parameter: Age (day) Value: 9
  misc_feature: MA Experiment 108556 PARAMETER Experiment Name: Zm_Drought_P Parameter: Organism Value: Zea mays
  misc_feature: MA Experiment 108556 PARAMETER Experiment Name: Zm_Drought_P Parameter: Plant Line Value: 35A19
  misc_feature: MA Experiment 108556 PARAMETER Experiment Name: Zm_Drought_P Parameter: Timepoint (hr) Value: 24
  misc_feature: MA Experiment 108556 PARAMETER Experiment Name: Zm_Drought_P Parameter: Tissue Value: Aerial
  misc_feature: MA Experiment 108556 PARAMETER Experiment Name: Zm_Drought_P Parameter: Treatment Value: Drought vs. No Drought
  misc_feature: MA Experiment ID: 108597 Result: Up-regulated in Transcription
  misc_feature: MA Experiment 108597 PARAMETER Experiment Name: Zm_100uM_ABA_P Parameter: Age (day) Value: 9
  misc_feature: MA Experiment 108597 PARAMETER Experiment Name: Zm_100uM_ABA_P Parameter: Organism Value: Zea mays
  misc_feature: MA Experiment 108597 PARAMETER Experiment Name: Zm_100uM_ABA_P Parameter: Plant Line Value: 35A19
  misc_feature: MA Experiment 108597 PARAMETER Experiment Name: Zm_100uM_ABA_P Parameter: Timepoint (hr) Value: 24
  misc_feature: MA Experiment 108597 PARAMETER Experiment Name: Zm_100uM_ABA_P Parameter: Tissue Value: Aerial
  misc_feature: MA Experiment 108597 PARAMETER Experiment Name: Zm_100uM_ABA_P Parameter: Treatment Value: 100uM ABA vs. No Treatment
  misc_feature: MA Experiment ID: 108689 Result: Up-regulated in Transcription
  misc_feature: MA Experiment 108689 PARAMETER Experiment Name: Zm_Drought_Roots_P Parameter: Age (day) Value: 9
  misc_feature: MA Experiment 108689 PARAMETER Experiment Name: Zm_Drought_Roots_P Parameter: Organism Value: Zea mays
  misc_feature: MA Experiment 108689 PARAMETER Experiment Name: Zm_Drought_Roots_P Parameter: Plant Line Value: 35A19
  misc_feature: MA Experiment 108689 PARAMETER Experiment Name: Zm_Drought_Roots_P Parameter: Timepoint (hr) Value: 24
  misc_feature: MA Experiment 108689 PARAMETER Experiment Name: Zm_Drought_Roots_P Parameter: Tissue Value: Roots
  misc_feature: MA Experiment 108689 PARAMETER Experiment Name: Zm_Drought_Roots_P Parameter: Treatment Value: Drought vs. No Drought
  misc_feature: MA Experiment ID: 20000478 Result: Up-regulated in Transcription
  misc_feature: MA Experiment 20000478 PARAMETER Experiment Name: Zm_5mM_SA_P Parameter: Age (day) Value: 11
  misc_feature: MA Experiment 20000478 PARAMETER Experiment Name: Zm_5mM_SA_P Parameter: Organism Value: Zea mays
  misc_feature: MA Experiment 20000478 PARAMETER Experiment Name: Zm_5mM_SA_P Parameter: Plant Line Value: 35A19
  misc_feature: MA Experiment 20000478 PARAMETER Experiment Name: Zm_5mM_SA_P Parameter: Timepoint (hr) Value: 72
  misc_feature: MA Experiment 20000478 PARAMETER Experiment Name: Zm_5mM_SA_P Parameter: Tissue Value: Aerial
  misc_feature: MA Experiment 20000478 PARAMETER Experiment Name: Zm_5mM_SA_P Parameter: Treatment Value: 5mM SA vs. No Treatment
aagagagagaaaacgaaacgccgctccctcgcctcatcccttccctcctcctgcatcctacctccctggtacccgtcacgttcaccacgttcgcccgctcattcaccggcggcgtcgcccagctcggcctcccgccgcccacggaggccaggtccccgggccgcccgctcggtccgccacagaggcaaggcatggtggcgtctttagacaatgtgaggggcttgactttagccatgtcatctagtgcattcattggttctagctttgtgatcaagaaagttggattgaagaaggctggggataatggggtgcgtgcagcttctggaggcttctcatatctatatgagccgttatggtggttgggaatgataactatgattctaggcgaggtagccaattttgcagcatatgcatttgcccctgccgtacttgttactcctctaggagctctaagcatcatatttagtgcagtgctcgcacacttcattctgaaagaaaatttgcacatgtttggcgttgttggttgcatactatgtgttgttggttctgttggtatagttttgcatgccccaaaggagagaaaaattgattctatgaaggaaatatggcatcttgcaacacagccaggttttattgtttattcatgcgtggcagtggcctgcgttctttttttgatatttcgggttgttgagcgctctgggcacagattgatgcttgtttacatagcaatctgttcattaatgggatctcttacggttatcagtgtaaaagcagttgccattgctctaaagctatcatttggtggatcaaatcaattcatctacgtccagacatggttcttcatagtagtagtcactatttgctgcttggtgcaattaaactacttaaacaaggctctggactcgttcaacacggctgtggtttctcctgtatactacgtgatgttcaccattcttaccattgttgcaaatatgatcatgtacaaggactgggcctcgcagactgcaacgcagatcgcaacacagctatgtgggtttgtgaccattgtcgcggggacttttctgcttcacaagactagggatatgggaaatccaccaccaccaccacctgaccaaatgtgcctgcaagaagccggggaatgtgctccacggtcaatgaccagttctagctgaacacactaagatgtcaaaatctcacagcctctatggactgaattggaattttgagctatatggtgacctttgtagatatattaggaaggagtaaagattggagtgcccagcagttgg

SEQ ID NO: 5745 - protein, 389 aa, Zea mays subsp. mays
  peptide (1)..(389): Ceres Seq. ID no. 12344121
  misc_feature (67)..(363): Pfam Name: Protein of unknown function (DUF803) Pfam Description: Protein of unknown function (DUF803)
  misc_feature (64)..(363): Homolog of NCBI NO: 21742149 NR Description: OSJNBa0069D17.4 [Oryza sativa (japonica
  misc_feature (67)..(363): Homolog of NCBI NO: 18414079 NR Description: expressed protein; protein id: At4g13800.1,
  misc_feature (67)..(363): Homolog of NCBI NO: 21593618 NR Description: unknown [Arabidopsis thaliana]
  misc_feature (67)..(363): Homolog of NCBI NO: 15229534 NR Description: unknown protein; protein id: At3g23870.1 thaliana] >gi|9294655|dbj|BAB03004.1|
  misc_feature (62)..(368): Homolog of NCBI NO: 20161440 NR Description: B1065E10.15 [Oryza sativa (japonica
  misc_feature (62)..(361): Homolog of NCBI NO: 18409942 NR Description: expressed protein; protein id: At1g71900.1, by cDNA: gi_15028240, supported by cDNA: gi_19310780 [Arabidopsis >gi|15028241|gb|AAK76709.1| unknown protein [Arabidopsis
  misc_feature (62)..(361): Homolog of NCBI NO: 25406128 NR Description: unknown protein F17M19.5 [imported] - Arabidopsis
  misc_feature (62)..(361): Homolog of NCBI NO: 18399280 NR Description: expressed protein; protein id: At1g34470.1, by cDNA: 110782. [Arabidopsis thaliana] F12K21.21 [Arabidopsis thaliana]
  misc_feature (69)..(360): Homolog of NCBI NO: 30681265 NR Description: expressed protein [Arabidopsis thaliana]
  misc_feature (69)..(379): Homolog of NCBI NO: 26449939 NR Description: unknown protein [Arabidopsis thaliana]
ERENETPLPRLIPSLLLHPTSLVPVTFTTFARSFTGGVAQLGLPPPTEARSPGRPLGPPQRQGMVASLDNVRGLTLAMSSSAFIGSSFVIKKVGLKKAGDNGVRAASGGFSYLYEPLWWLGMITMILGEVANFAAYAFAPAVLVTPLGALSIIFSAVLAHFILKENLHMFGVVGCILCVVGSVGIVLHAPKERKIDSMKEIWHLATQPGFIVYSCVAVACVLFLIFRVVERSGHRLMLVYIAICSLMGSLTVISVKAVAIALKLSFGGSNQFIYVQTWFFIVVVTICCLVQLNYLNKALDSFNTAVVSPVYYVMFTILTIVANMIMYKDWASQTATQIATQLCGFVTIVAGTFLLHKTRDMGNPPPPPPDQMCLQEAGECAPRSMTSSS

SEQ ID NO: 5746 - protein, 326 aa, Zea mays subsp. mays
  peptide (1)..(326): Ceres Seq. ID no. 12344122
  misc_feature (4)..(300): Pfam Name: Protein of unknown function (DUF803) Pfam Description: Protein of unknown function (DUF803)
  misc_feature (1)..(300): Homolog of NCBI NO: 21742149 NR Description: OSJNBa0069D17.4 [Oryza sativa (japonica
  misc_feature (4)..(300): Homolog of NCBI NO: 18414079 NR Description: expressed protein; protein id: At4g13800.1,
  misc_feature (4)..(300): Homolog of NCBI NO: 21593618 NR Description: unknown [Arabidopsis thaliana]
  misc_feature (4)..(300): Homolog of NCBI NO: 15229534 NR Description: unknown protein; protein id: At3g23870.1 thaliana] >gi|9294655|dbj|BAB03004.1|
  misc_feature (1)..(305): Homolog of NCBI NO: 20161440 NR Description: B1065E10.15 [Oryza sativa (japonica
  misc_feature (1)..(298): Homolog of NCBI NO: 18409942 NR Description: expressed protein; protein id: At1g71900.1, by cDNA: gi_15028240, supported by cDNA: gi_19310780 [Arabidopsis >gi|15028241|gb|AAK76709.1| unknown protein [Arabidopsis
  misc_feature (1)..(298): Homolog of NCBI NO: 25406128 NR Description: unknown protein F17M19.5 [imported] - Arabidopsis
  misc_feature (1)..(298): Homolog of NCBI NO: 18399280 NR Description: expressed protein; protein id: At1g34470.1, by cDNA: 110782. [Arabidopsis thaliana] F12K21.21 [Arabidopsis thaliana]
  misc_feature (6)..(297): Homolog of NCBI NO: 30681265 NR Description: expressed protein [Arabidopsis thaliana]
  misc_feature (6)..(316): Homolog of NCBI NO: 26449939 NR Description: unknown protein [Arabidopsis thaliana]
MVASLDNVRGLTLAMSSSAFIGSSFVIKKVGLKKAGDNGVRAASGGFSYLYEPLWWLGMITMILGEVANFAAYAFAPAVLVTPLGALSIIFSAVLAHFILKENLHMFGVVGCILCVVGSVGIVLHAPKERKIDSMKEIWHLATQPGFIVYSCVAVACVLFLIFRVVERSGHRLMLVYIAICSLMGSLTVISVKAVAIALKLSFGGSNQFIYVQTWFFIVVVTICCLVQLNYLNKALDSFNTAVVSPVYYVMFTILTIVANMIMYKDWASQTATQIATQLCGFVTIVAGTFLLHKTRDMGNPPPPPPDQMCLQEAGECAPRSMTSSS

SEQ ID NO: 5747 - protein, 312 aa, Zea mays subsp. mays
  peptide (1)..(312): Ceres Seq. ID no. 12344123
  misc_feature (1)..(286): Pfam Name: Protein of unknown function (DUF803) Pfam Description: Protein of unknown function (DUF803)
  misc_feature (1)..(286): Homolog of NCBI NO: 21742149 NR Description: OSJNBa0069D17.4 [Oryza sativa (japonica
  misc_feature (1)..(286): Homolog of NCBI NO: 18414079 NR Description: expressed protein; protein id: At4g13800.1,
  misc_feature (1)..(286): Homolog of NCBI NO: 21593618 NR Description: unknown [Arabidopsis thaliana]
  misc_feature (1)..(286): Homolog of NCBI NO: 15229534 NR Description: unknown protein; protein id: At3g23870.1 thaliana] >gi|9294655|dbj|BAB03004.1|
  misc_feature (1)..(291): Homolog of NCBI NO: 20161440 NR Description: B1065E10.15 [Oryza sativa (japonica
  misc_feature (1)..(284): Homolog of NCBI NO: 18409942 NR Description: expressed protein; protein id: At1g71900.1, by cDNA: gi_15028240, supported by cDNA: gi_19310780 [Arabidopsis >gi|15028241|gb|AAK76709.1| unknown protein [Arabidopsis
  misc_feature (1)..(284): Homolog of NCBI NO: 25406128 NR Description: unknown protein F17M19.5 [imported] - Arabidopsis
  misc_feature (1)..(284): Homolog of NCBI NO: 18399280 NR Description: expressed protein; protein id: At1g34470.1, by cDNA: 110782. [Arabidopsis thaliana] F12K21.21 [Arabidopsis thaliana]
  misc_feature (1)..(283): Homolog of NCBI NO: 30681265 NR Description: expressed protein [Arabidopsis thaliana]
  misc_feature (1)..(302): Homolog of NCBI NO: 26449939 NR Description: unknown protein [Arabidopsis thaliana]
MSSSAFIGSSFVIKKVGLKKAGDNGVRAASGGFSYLYEPLWWLGMITMILGEVANFAAYAFAPAVLVTPLGALSIIFSAVLAHFILKENLHMFGVVGCILCVVGSVGIVLHAPKERKIDSMKEIWHLATQPGFIVYSCVAVACVLFLIFRVVERSGHRLMLVYIAICSLMGSLTVISVKAVAIALKLSFGGSNQFIYVQTWFFIVVVTICCLVQLNYLNKALDSFNTAVVSPVYYVMFTILTIVANMIMYKDWASQTATQIATQLCGFVTIVAGTFLLHKTRDMGNPPPPPPDQMCLQEAGECAPRSMTSSS

SEQ ID NO: 5748 - DNA, 932 bp, Zea mays subsp. mays
  misc_feature (1)..(932): Ceres Seq. ID no. 12405069
  misc_feature: MA Experiment ID: 108523 Result: Up-regulated in Transcription
  misc_feature: MA Experiment 108523 PARAMETER Experiment Name: Zm_42deg_Heat_P Parameter: Age (day) Value: 8
  misc_feature: MA Experiment 108523 PARAMETER Experiment Name: Zm_42deg_Heat_P Parameter: Organism Value: Zea mays
  misc_feature: MA Experiment 108523 PARAMETER Experiment Name: Zm_42deg_Heat_P Parameter: Plant Line Value: 35A19
  misc_feature: MA Experiment 108523 PARAMETER Experiment Name: Zm_42deg_Heat_P Parameter: Temperature (deg C) Value: 42 vs. 22
  misc_feature: MA Experiment 108523 PARAMETER Experiment Name: Zm_42deg_Heat_P Parameter: Timepoint (hr) Value: 6
  misc_feature: MA Experiment 108523 PARAMETER Experiment Name: Zm_42deg_Heat_P Parameter: Tissue Value: Aerial
  misc_feature: MA Experiment ID: 20000487 Result: Up-regulated in Transcription
  misc_feature: MA Experiment 20000487 PARAMETER Experiment Name: Zm_50mM_NH4NO3_L_to_H_P Parameter: Organism Value: Zea mays
  misc_feature: MA Experiment 20000487 PARAMETER Experiment Name: Zm_50mM_NH4NO3_L_to_H_P Parameter: Timepoint (hr) Value: 4
  misc_feature: MA Experiment 20000487 PARAMETER Experiment Name: Zm_50mM_NH4NO3_L_to_H_P Parameter: Tissue Value: Leaves
  misc_feature: MA Experiment 20000487 PARAMETER Experiment Name: Zm_50mM_NH4NO3_L_to_H_P Parameter: Treatment Value: 50mM NH4NO3 vs. 100mM Mannitol
  misc_feature: MA Experiment ID: 20000492 Result: Up-regulated in Transcription
  misc_feature: MA Experiment 20000492 PARAMETER Experiment Name: Zm_Hybrid_Seed_Dev_P Parameter: DAP Value: 12
  misc_feature: MA Experiment 20000492 PARAMETER Experiment Name: Zm_Hybrid_Seed_Dev_P Parameter: Organism Value: Zea mays
  misc_feature: MA Experiment 20000492 PARAMETER Experiment Name: Zm_Hybrid_Seed_Dev_P Parameter: Plant Line Value: 35A19
  misc_feature: MA Experiment 20000492 PARAMETER Experiment Name: Zm_Hybrid_Seed_Dev_P Parameter: Tissue Value: Fert Kernel vs. Unfert Floret
gatcggcacagccacaacctccttctccaatactctctccctcgccgccggccacctccgcctcctcccacgcgccacctccgcctcctcccacgcgccacctccgcctcctcccacgcgccacctccgcgacaaaccactgaaggagggagaggactcgctcatatcgtccgatggaggaggactcgatcaaggggatgatctccgcgatatcctgggtgcccaggggcgccgccaagagcgtgcccgtcgttgccgacccgcccactcaggaggagatcgccgaggccatgaagaccttcgacctgggcagagactccgggagcgacgctgacgaggatgatgatgctgccaccatggaactcgacggtgcggcggaaacggtggaggaggttgatgaggctgcccgagccaaggccgtagccaaggcgctctgcaagggctctagcaaggcggacgacgtcgctgatgagctccgcgaactcaacatggacgcgtacgatgatgaagatgaagaggtcgatattttcggctctgggctgggggacttgtactatccgagcaacgcaatggacccatatctgaagaagaacaatgaggatgatgaggaggacgacgatgatgatgaggaaatcgaagataagatgatcatgcctactgattttgttattgtctgcacatagtgaggacgatatcttctctcttcaggtcaacattcttgaagaaacaaatgatggtgaacaaaatatctttgtgcatcatgacgttcctctcgctgattttccgctatgcacagcttggatggattttaatctgaaaggtggtgaaaaagggaattttgtagccgttggaaccatggatcctgccatagaaatatgggacttagatatggttgatgaagtgcaaccgcacatggtgctaggaggacttcc

SEQ ID NO: 5749 - protein, 169 aa, Zea mays subsp. mays
  peptide (1)..(169): Ceres Seq. ID no. 12405070
  misc_feature (9)..(166): Homolog of NCBI NO: 20161737 NR Description: B1033B05.3 [Oryza sativa (japonica
  misc_feature (9)..(168): Homolog of NCBI NO: 18415195 NR Description: Expressed protein; protein id: At4g18905.1, by cDNA: gi_15292898, supported by cDNA: gi_15912304, supported cDNA: gi_21280826 [Arabidopsis thaliana]
  misc_feature (1)..(114): Homolog of NCBI NO: 7485426 NR Description: hypothetical protein F13C5.70 - Arabidopsis >gi|2832618|emb|CAA16747.1| putative protein [Arabidopsis >gi|7268684|emb|CAB78892.1| putative protein [Arabidopsis
  misc_feature (114)..(168): Homolog of NCBI NO: 7485426 NR Description: hypothetical protein F13C5.70 - Arabidopsis >gi|2832618|emb|CAA16747.1| putative protein [Arabidopsis >gi|7268684|emb|CAB78892.1| putative protein [Arabidopsis
  misc_feature (31)..(115): Homolog of NCBI NO: 7485426 NR Description: hypothetical protein F13C5.70 - Arabidopsis >gi|2832618|emb|CAA16747.1| putative protein [Arabidopsis >gi|7268684|emb|CAB78892.1| putative protein [Arabidopsis
  misc_feature (113)..(168): Homolog of NCBI NO: 7485426 NR Description: hypothetical protein F13C5.70 - Arabidopsis >gi|2832618|emb|CAA16747.1| putative protein [Arabidopsis >gi|7268684|emb|CAB78892.1| putative protein [Arabidopsis
  misc_feature (31)..(168): Homolog of NCBI NO: 18415193 NR Description: putative protein; protein id: At4g18900.1
  misc_feature (38)..(168): Homolog of NCBI NO: 15236974 NR Description: putative protein; protein id: At4g35370.1
  misc_feature (6)..(167): Homolog of NCBI NO: 40746560 NR Description: hypothetical protein AN0310.2 [Aspergillus
  misc_feature (6)..(167): Homolog of NCBI NO: 29436469 NR Description: Unknown (protein for MGC:56486) [Danio rerio]
MEEDSIKGMISAISWVPRGAAKSVPVVADPPTQEEIAEAMKTFDLGRDSGSDADEDDDAATMELDGAAETVEEVDEAARAKAVAKALCKGSSKADDVADELRELNMDAYDDEDEEVDIFGSGLGDLYYPSNAMDPYLKKNNEDDEEDDDDDEEIEDKMIMPTDFVIVCT

SEQ ID NO: 5750 - protein, 161 aa, Zea mays subsp. mays
  peptide (1)..(161): Ceres Seq. ID no. 12405071
  misc_feature (1)..(159): Homolog of NCBI NO: 29436469 NR Description: Unknown (protein for MGC:56486) [Danio rerio]
  misc_feature (30)..(160): Homolog of NCBI NO: 15236974 NR Description: putative protein; protein id: At4g35370.1
  misc_feature (1)..(159): Homolog of NCBI NO: 40746560 NR Description: hypothetical protein AN0310.2 [Aspergillus
  misc_feature (1)..(158): Homolog of NCBI NO: 20161737 NR Description: B1033B05.3 [Oryza sativa (japonica
  misc_feature (1)..(160): Homolog of NCBI NO: 18415195 NR Description: Expressed protein; protein id: At4g18905.1, by cDNA: gi_15292898, supported by cDNA: gi_15912304, supported cDNA: gi_21280826 [Arabidopsis thaliana]
  misc_feature (1)..(106): Homolog of NCBI NO: 7485426 NR Description: hypothetical protein F13C5.70 - Arabidopsis >gi|2832618|emb|CAA16747.1| putative protein [Arabidopsis >gi|7268684|emb|CAB78892.1| putative protein [Arabidopsis
  misc_feature (106)..(160): Homolog of NCBI NO: 7485426 NR Description: hypothetical protein F13C5.70 - Arabidopsis >gi|2832618|emb|CAA16747.1| putative protein [Arabidopsis >gi|7268684|emb|CAB78892.1| putative protein [Arabidopsis
  misc_feature (23)..(107): Homolog of NCBI NO: 7485426 NR Description: hypothetical protein F13C5.70 - Arabidopsis >gi|2832618|emb|CAA16747.1| putative protein [Arabidopsis >gi|7268684|emb|CAB78892.1| putative protein [Arabidopsis
  misc_feature (105)..(160): Homolog of NCBI NO: 7485426 NR Description: hypothetical protein F13C5.70 - Arabidopsis >gi|2832618|emb|CAA16747.1| putative protein [Arabidopsis >gi|7268684|emb|CAB78892.1| putative protein [Arabidopsis
  misc_feature (23)..(160): Homolog of NCBI NO: 18415193 NR Description: putative protein; protein id: At4g18900.1
MISAISWVPRGAAKSVPVVADPPTQEEIAEAMKTFDLGRDSGSDADEDDDAATMELDGAAETVEEVDEAARAKAVAKALCKGSSKADDVADELRELNMDAYDDEDEEVDIFGSGLGDLYYPSNAMDPYLKKNNEDDEEDDDDDEEIEDKMIMPTDFVIVCT

SEQ ID NO: 5751 - protein, 130 aa, Zea mays subsp. mays
  peptide (1)..(130): Ceres Seq. ID no. 12405072
  misc_feature (1)..(127): Homolog of NCBI NO: 20161737 NR Description: B1033B05.3 [Oryza sativa (japonica
  misc_feature (1)..(129): Homolog of NCBI NO: 18415195 NR Description: Expressed protein; protein id: At4g18905.1, by cDNA: gi_15292898, supported by cDNA: gi_15912304, supported cDNA: gi_21280826 [Arabidopsis thaliana]
  misc_feature (1)..(75): Homolog of NCBI NO: 7485426 NR Description: hypothetical protein F13C5.70 - Arabidopsis >gi|2832618|emb|CAA16747.1| putative protein [Arabidopsis >gi|7268684|emb|CAB78892.1| putative protein [Arabidopsis
  misc_feature (75)..(129): Homolog of NCBI NO: 7485426 NR Description: hypothetical protein F13C5.70 - Arabidopsis >gi|2832618|emb|CAA16747.1| putative protein [Arabidopsis >gi|7268684|emb|CAB78892.1| putative protein [Arabidopsis
  misc_feature (1)..(76): Homolog of NCBI NO: 7485426 NR Description: hypothetical protein F13C5.70 - Arabidopsis >gi|2832618|emb|CAA16747.1| putative protein [Arabidopsis >gi|7268684|emb|CAB78892.1| putative protein [Arabidopsis
  misc_feature (74)..(129): Homolog of NCBI NO: 7485426 NR Description: hypothetical protein F13C5.70 - Arabidopsis >gi|2832618|emb|CAA16747.1| putative protein [Arabidopsis >gi|7268684|emb|CAB78892.1| putative protein [Arabidopsis
  misc_feature (1)..(129): Homolog of NCBI NO: 18415193 NR Description: putative protein; protein id: At4g18900.1
  misc_feature (1)..(129): Homolog of NCBI NO: 15236974 NR Description: putative protein; protein id: At4g35370.1
  misc_feature (1)..(128): Homolog of NCBI NO: 40746560 NR Description: hypothetical protein AN0310.2 [Aspergillus
  misc_feature (1)..(128): Homolog of NCBI NO: 29436469 NR Description: Unknown (protein for MGC:56486) [Danio rerio]
MKTFDLGRDSGSDADEDDDAATMELDGAAETVEEVDEAARAKAVAKALCKGSSKADDVADELRELNMDAYDDEDEEVDIFGSGLGDLYYPSNAMDPYLKKNNEDDEEDDDDDEEIEDKMIMPTDFVIVCT

SEQ ID NO: 5752 - DNA, 1399 bp, Zea mays subsp. mays
  misc_feature (1)..(1399): Ceres Seq. ID no. 12369116
  misc_feature: MA Experiment ID: 108523 Result: Down-regulated in Transcription
  misc_feature: MA Experiment 108523 PARAMETER Experiment Name: Zm_42deg_Heat_P Parameter: Age (day) Value: 8
  misc_feature: MA Experiment 108523 PARAMETER Experiment Name: Zm_42deg_Heat_P Parameter: Organism Value: Zea mays
  misc_feature: MA Experiment 108523 PARAMETER Experiment Name: Zm_42deg_Heat_P Parameter: Plant Line Value: 35A19
  misc_feature: MA Experiment 108523 PARAMETER Experiment Name: Zm_42deg_Heat_P Parameter: Temperature (deg C) Value: 42 vs. 22
  misc_feature: MA Experiment 108523 PARAMETER Experiment Name: Zm_42deg_Heat_P Parameter: Timepoint (hr) Value: 6
  misc_feature: MA Experiment 108523 PARAMETER Experiment Name: Zm_42deg_Heat_P Parameter: Tissue Value: Aerial
  misc_feature: MA Experiment ID: 108527 Result: Down-regulated in Transcription
  misc_feature: MA Experiment 108527 PARAMETER Experiment Name: Zm_5mM_NO_P Parameter: Age (day) Value: 8
  misc_feature: MA Experiment 108527 PARAMETER Experiment Name: Zm_5mM_NO_P Parameter: Organism Value: Zea mays
  misc_feature: MA Experiment 108527 PARAMETER Experiment Name: Zm_5mM_NO_P Parameter: Plant Line Value: 35A19
  misc_feature: MA Experiment 108527 PARAMETER Experiment Name: Zm_5mM_NO_P Parameter: Timepoint (hr) Value: 6
  misc_feature: MA Experiment 108527 PARAMETER Experiment Name: Zm_5mM_NO_P Parameter: Tissue Value: Aerial
  misc_feature: MA Experiment 108527 PARAMETER Experiment Name: Zm_5mM_NO_P Parameter: Treatment Value: 5mM NO vs. No Treatment
  misc_feature: MA Experiment ID: 108528 Result: Up-regulated in Transcription
  misc_feature: MA Experiment 108528 PARAMETER Experiment Name: Zm_Imbibed_Seeds_P Parameter: Age (day) Value: 5 vs. 2
  misc_feature: MA Experiment 108528 PARAMETER Experiment Name: Zm_Imbibed_Seeds_P Parameter: Organism Value: Zea mays
  misc_feature: MA Experiment 108528 PARAMETER Experiment Name: Zm_Imbibed_Seeds_P Parameter: Plant Line Value: 35A19
  misc_feature: MA Experiment 108528 PARAMETER Experiment Name: Zm_Imbibed_Seeds_P Parameter: Tissue Value: Aerial vs. Embryo
  misc_feature: MA Experiment ID: 108529 Result: Down-regulated in Transcription
  misc_feature: MA Experiment 108529 PARAMETER Experiment Name: Zm_Imbibed_Seeds_P Parameter: Age (day) Value: 5 vs. 2
  misc_feature: MA Experiment 108529 PARAMETER Experiment Name: Zm_Imbibed_Seeds_P Parameter: Organism Value: Zea mays
  misc_feature: MA Experiment 108529 PARAMETER Experiment Name: Zm_Imbibed_Seeds_P Parameter: Plant Line Value: 35A19
  misc_feature: MA Experiment 108529 PARAMETER Experiment Name: Zm_Imbibed_Seeds_P Parameter: Tissue Value: Roots vs. Embryo
  misc_feature: MA Experiment ID: 108530 Result: Up-regulated in Transcription
  misc_feature: MA Experiment 108530 PARAMETER Experiment Name: Zm_Imbibed_Seeds_P Parameter: Age (day) Value: 6 vs. 2
  misc_feature: MA Experiment 108530 PARAMETER Experiment Name: Zm_Imbibed_Seeds_P Parameter: Organism Value: Zea mays
  misc_feature: MA Experiment 108530 PARAMETER Experiment Name: Zm_Imbibed_Seeds_P Parameter: Plant Line Value: 35A19
  misc_feature: MA Experiment 108530 PARAMETER Experiment Name: Zm_Imbibed_Seeds_P Parameter: Tissue Value: Aerial vs. Embryo
  misc_feature: MA Experiment ID: 108536 Result: Down-regulated in Transcription
  misc_feature: MA Experiment 108536 PARAMETER Experiment Name: Zm_Meristem_P Parameter: Age (day) Value: 8
  misc_feature: MA Experiment 108536 PARAMETER Experiment Name: Zm_Meristem_P Parameter: Organism Value: Zea mays
  misc_feature: MA Experiment 108536 PARAMETER Experiment Name: Zm_Meristem_P Parameter: Plant Line Value: 35A19
  misc_feature: MA Experiment 108536 PARAMETER Experiment Name: Zm_Meristem_P Parameter: Tissue Value: Shoot Meristem vs. Above Shoot Meristem
  misc_feature: MA Experiment ID: 108543 Result: Up-regulated in Transcription
  misc_feature: MA Experiment ID: 108545 Result: Up-regulated in Transcription
  misc_feature: MA Experiment 108545 PARAMETER Experiment Name: Zm_Imbibed_Seeds_P Parameter: Age (day) Value: 3 vs. 2
  misc_feature: MA Experiment 108545 PARAMETER Experiment Name: Zm_Imbibed_Seeds_P Parameter: Organism Value: Zea mays
  misc_feature: MA Experiment 108545 PARAMETER Experiment Name: Zm_Imbibed_Seeds_P Parameter: Plant Line Value: 35A19
  misc_feature: MA Experiment 108545 PARAMETER Experiment Name: Zm_Imbibed_Seeds_P Parameter: Tissue Value: Aerial vs. Embryo
  misc_feature: MA Experiment ID: 108546 Result: Down-regulated in Transcription
  misc_feature: MA Experiment 108546 PARAMETER Experiment Name: Zm_Imbibed_Seeds_P Parameter: Age (day) Value: 3 vs. 2
  misc_feature: MA Experiment 108546 PARAMETER Experiment Name: Zm_Imbibed_Seeds_P Parameter: Organism Value: Zea mays
  misc_feature: MA Experiment 108546 PARAMETER Experiment Name: Zm_Imbibed_Seeds_P Parameter: Plant Line Value: 35A19
  misc_feature: MA Experiment 108546 PARAMETER Experiment Name: Zm_Imbibed_Seeds_P Parameter: Tissue Value: Roots vs. Embryo
  misc_feature: MA Experiment ID: 108547 Result: Up-regulated in Transcription
  misc_feature: MA Experiment 108547 PARAMETER Experiment Name: Zm_Imbibed_Seeds_P Parameter: Age (day) Value: 4 vs. 2
  misc_feature: MA Experiment 108547 PARAMETER Experiment Name: Zm_Imbibed_Seeds_P Parameter: Organism Value: Zea mays
  misc_feature: MA Experiment 108547 PARAMETER Experiment Name: Zm_Imbibed_Seeds_P Parameter: Plant Line Value: 35A19
  misc_feature: MA Experiment 108547 PARAMETER Experiment Name: Zm_Imbibed_Seeds_P Parameter: Tissue Value: Aerial vs. Embryo
  misc_feature: MA Experiment ID: 108556 Result: Down-regulated in Transcription
  misc_feature: MA Experiment 108556 PARAMETER Experiment Name: Zm_Drought_P Parameter: Age (day) Value: 9
  misc_feature: MA Experiment 108556 PARAMETER Experiment Name: Zm_Drought_P Parameter: Organism Value: Zea mays
  misc_feature: MA Experiment 108556 PARAMETER Experiment Name: Zm_Drought_P Parameter: Plant Line Value: 35A19
  misc_feature: MA Experiment 108556 PARAMETER Experiment Name: Zm_Drought_P Parameter: Timepoint (hr) Value: 24
  misc_feature: MA Experiment 108556 PARAMETER Experiment Name: Zm_Drought_P Parameter: Tissue Value: Aerial
  misc_feature: MA Experiment 108556 PARAMETER Experiment Name: Zm_Drought_P Parameter: Treatment Value: Drought vs. No Drought
  misc_feature: MA Experiment ID: 108559 Result: Down-regulated in Transcription
  misc_feature: MA Experiment 108559 PARAMETER Experiment Name: Zm_5mM_NO_P Parameter: Age (day) Value: 8
  misc_feature: MA Experiment 108559 PARAMETER Experiment Name: Zm_5mM_NO_P Parameter: Organism Value: Zea mays
  misc_feature: MA Experiment 108559 PARAMETER Experiment Name: Zm_5mM_NO_P Parameter: Plant Line Value: 35A19
  misc_feature: MA Experiment 108559 PARAMETER Experiment Name: Zm_5mM_NO_P Parameter: Timepoint (hr) Value: 12
  misc_feature: MA Experiment 108559 PARAMETER Experiment Name: Zm_5mM_NO_P Parameter: Tissue Value: Aerial
  misc_feature: MA Experiment 108559 PARAMETER Experiment Name: Zm_5mM_NO_P Parameter: Treatment Value: 5mM NO vs. No Treatment
  misc_feature: MA Experiment ID: 108687 Result: Down-regulated in Transcription
  misc_feature: MA Experiment 108687 PARAMETER Experiment Name: Zm_Embryos-Flowers__P Parameter: Tissue Value: Embryo vs. Aerial+
  misc_feature: MA Experiment ID: 108688 Result: Down-regulated in Transcription
  misc_feature: MA Experiment 108688 PARAMETER Experiment Name: Zm_Embryos-Flowers__P Parameter: Tissue Value: Immature Flowers vs. Aerial+
  misc_feature: MA Experiment ID: 20000477 Result: Down-regulated in Transcription
  misc_feature: MA Experiment 20000477 PARAMETER Experiment Name: Zm_5mM_SA_P Parameter: Age (day) Value: 10
  misc_feature: MA Experiment 20000477 PARAMETER Experiment Name: Zm_5mM_SA_P Parameter: Organism Value: Zea mays
  misc_feature: MA Experiment 20000477 PARAMETER Experiment Name: Zm_5mM_SA_P Parameter: Plant Line Value: 35A19
  misc_feature: MA Experiment 20000477 PARAMETER Experiment Name: Zm_5mM_SA_P Parameter: Timepoint (hr) Value: 48
  misc_feature: MA Experiment 20000477 PARAMETER Experiment Name: Zm_5mM_SA_P Parameter: Tissue Value: Aerial
  misc_feature: MA Experiment 20000477 PARAMETER Experiment Name: Zm_5mM_SA_P Parameter: Treatment Value: 5mM SA vs. No Treatment
  misc_feature: MA Experiment ID: 20000478 Result: Down-regulated in Transcription
  misc_feature: MA Experiment 20000478 PARAMETER Experiment Name: Zm_5mM_SA_P Parameter: Age (day) Value: 11
  misc_feature: MA Experiment 20000478 PARAMETER Experiment Name: Zm_5mM_SA_P Parameter: Organism Value: Zea mays
  misc_feature: MA Experiment 20000478 PARAMETER Experiment Name: Zm_5mM_SA_P Parameter: Plant Line Value: 35A19
  misc_feature: MA Experiment 20000478 PARAMETER Experiment Name: Zm_5mM_SA_P Parameter: Timepoint (hr) Value: 72
  misc_feature: MA Experiment 20000478 PARAMETER Experiment Name: Zm_5mM_SA_P Parameter: Tissue Value: Aerial
  misc_feature: MA Experiment 20000478 PARAMETER Experiment Name: Zm_5mM_SA_P Parameter: Treatment Value: 5mM SA vs. No Treatment
  misc_feature: MA Experiment ID: 20000479 Result: Down-regulated in Transcription
  misc_feature: MA Experiment 20000479 PARAMETER Experiment Name: Zm_Drought_P Parameter: Age (day) Value: 10
  misc_feature: MA Experiment 20000479 PARAMETER Experiment Name: Zm_Drought_P Parameter: Organism Value: Zea mays
  misc_feature: MA Experiment 20000479 PARAMETER Experiment Name: Zm_Drought_P Parameter: Plant Line Value: 35A19
  misc_feature: MA Experiment 20000479 PARAMETER Experiment Name: Zm_Drought_P Parameter: Timepoint (hr) Value: 48
  misc_feature: MA Experiment 20000479 PARAMETER Experiment Name: Zm_Drought_P Parameter: Tissue Value: Aerial
  misc_feature: MA Experiment 20000479 PARAMETER Experiment Name: Zm_Drought_P Parameter: Treatment Value: Drought vs. No Drought
  misc_feature: MA Experiment ID: 20000480 Result: Down-regulated in Transcription
  misc_feature: MA Experiment 20000480 PARAMETER Experiment Name: Zm_Drought_P Parameter: Age (day) Value: 11
  misc_feature: MA Experiment 20000480 PARAMETER Experiment Name: Zm_Drought_P Parameter: Organism Value: Zea mays
  misc_feature: MA Experiment 20000480 PARAMETER Experiment Name: Zm_Drought_P Parameter: Plant Line Value: 35A19
  misc_feature: MA Experiment 20000480 PARAMETER Experiment Name: Zm_Drought_P Parameter: Timepoint (hr) Value: 72
  misc_feature: MA Experiment 20000480 PARAMETER Experiment Name: Zm_Drought_P Parameter: Tissue Value: Aerial
  misc_feature: MA Experiment 20000480 PARAMETER Experiment Name: Zm_Drought_P Parameter: Treatment Value: Drought vs. No Drought
  misc_feature: MA Experiment ID: 20000492 Result: Down-regulated in Transcription
  misc_feature: MA Experiment 20000492 PARAMETER Experiment Name: Zm_Hybrid_Seed_Dev_P Parameter: DAP Value: 12
  misc_feature: MA Experiment 20000492 PARAMETER Experiment Name: Zm_Hybrid_Seed_Dev_P Parameter: Organism Value: Zea mays
  misc_feature: MA Experiment 20000492 PARAMETER Experiment Name: Zm_Hybrid_Seed_Dev_P Parameter: Plant Line Value: 35A19
  misc_feature: MA Experiment 20000492 PARAMETER Experiment Name: Zm_Hybrid_Seed_Dev_P Parameter: Tissue Value: Fert Kernel vs. Unfert Floret
aatcccttggagccagcaactccactcctgagtcctcacctcgtgctgcccgcgccatttccacctcccactgtcctttcgtccagtccccagccctgcagcccaaccgtggaggttctggaaggcggtgtatcccttctagaaccttctcgagatgcagagcgccgcggctttccggccgtgccccactcggctgctggtgagcagcccttgtcgccccctcctctcggcccgcccgcttcgtgtctccgccgctggcgccgtcgctaccagaagcagcgccgtgggccctcgcggtctggggctcgggctgctgccagcctcgcccgatcgggatggcaagtgccgccagcgacaggtgtcatgcagcgcggccggggatgctgtggcggccccgaaggcggaagaaggaggcgggctcatgaagacgctgtggctcggctcgctcttcggcctctggtacctgttcaacatctacttcaacatctataacaagcaggtactcaaggttttcccataccctataaacatcacagaagttcaatttgctgtcggaactgtagcagctctgttcatgtggatcactggtattattaagaggccaaagatttctggagcacagcttgtagccatcctacctctggctattgttcatactatgggcaatctcttcaccaacatgagccttgggaaagttgcagtgtcatttacgcacaccatcaaggctatggagcctttcttttctgttattctttctgcaattttccttggcgagttacctactatttgggtagtatcatctcttcttccaattgttggtggtgttgcattggcatctcttactgaggcatcctttaactgggctggcttttggagtgcaatggcttcaaatgttacctttcaatcccgaaatgtattgagcaagaagctcatggttaagaaagaggaatccttggacaaccttaatctcttctctatcattacagtgatgtcatttttccttttggcccctgttaccttctttacagaaggtgtcaaaattactcctacatttttgcaatctgctggtctgaatgtaaaccaagtccttacaaggtgtcttttcgctggactgtgtttccatgcataccaacaggtgtcttacatgattttggcgatggtgtctcctgtcactcattctgtgggcaactgtgttaaacgtgttgtggtcattgtaacatcagtgctgttcttcaggacacctgtttctcctatcaactctctcggtactgcgattgcacttgccggagttttcctgtactcacagctcaagcgacttaagcccaagccgaagacggcttaaatagggattgtattttccatctctttgtgttaatggagttaaacacttctatgttgc

SEQ ID NO: 5753 - protein, 395 aa, Zea mays subsp. mays
  peptide (1)..(395): Ceres Seq. ID no. 12369117
  misc_feature (104)..(229): Pfam Name: Integral membrane protein DUF6 Pfam Description: Integral membrane protein DUF6
  misc_feature (1)..(395): Homolog of NCBI NO: 29647427 NR Description: putative phosphoenolpyruvate/phosphate
  misc_feature (1)..(395): Homolog of NCBI NO: 13991929 NR Description: phosphoenolpyruvate/phosphate translocator [Oryza
  misc_feature (1)..(395): Homolog of NCBI NO: 7489743 NR Description: glucose-6-phosphate/phosphate-translocator
  misc_feature (1)..(395): Homolog of NCBI NO: 7489742 NR Description: glucose-6-phosphate/phosphate-translocator
  misc_feature (3)..(394): Homolog of NCBI NO: 7489171 NR Description: phosphate/phosphoenolpyruvate translocator
  misc_feature (1)..(395): Homolog of NCBI NO: 7489170 NR Description: phosphate/phosphoenolpyruvate translocator
  misc_feature (77)..(395): Homolog of NCBI NO: 1706110 NR Description: Triose phosphate/phosphate translocator,
  misc_feature (77)..(395): Homolog of NCBI NO: 15242801 NR Description: phosphate/phosphoenolpyruvate translocator protein id: At5g33320.1, supported by cDNA: 21316., supported by
  misc_feature (77)..(395): Homolog of NCBI NO: 21554233 NR Description: phosphate/phosphoenolpyruvate translocator
  misc_feature (77)..(395): Homolog of NCBI NO: 1778141 NR Description: phosphate/phosphoenolpyruvate translocator
MQSAAAFRPCPTRLLVSSPCRPLLSARPLRVSAAGAVATRSSAVGPRGLGLGLLPASPDRDGKCRQRQVSCSAAGDAVAAPKAEEGGGLMKTLWLGSLFGLWYLFNIYFNIYNKQVLKVFPYPINITEVQFAVGTVAALFMWITGIIKRPKISGAQLVAILPLAIVHTMGNLFTNMSLGKVAVSFTHTIKAMEPFFSVILSAIFLGELPTIWVVSSLLPIVGGVALASLTEASFNWAGFWSAMASNVTFQSRNVLSKKLMVKKEESLDNLNLFSIITVMSFFLLAPVTFFTEGVKITPTFLQSAGLNVNQVLTRCLFAGLCFHAYQQVSYMILAMVSPVTHSVGNCVKRVVVIVTSVLFFRTPVSPINSLGTAIALAGVFLYSQLKRLKPKPKTA

SEQ ID NO: 5754 - protein, 306 aa, Zea mays subsp. mays
  peptide (1)..(306): Ceres Seq. ID no. 12369118
  misc_feature (15)..(140): Pfam Name: Integral membrane protein DUF6 Pfam Description: Integral membrane protein DUF6
  misc_feature (1)..(306): Homolog of NCBI NO: 29647427 NR Description: putative phosphoenolpyruvate/phosphate
  misc_feature (1)..(306): Homolog of NCBI NO: 13991929 NR Description: phosphoenolpyruvate/phosphate translocator [Oryza
  misc_feature (1)..(306): Homolog of NCBI NO: 7489743 NR Description: glucose-6-phosphate/phosphate-translocator
  misc_feature (1)..(306): Homolog of NCBI NO: 7489742 NR Description: glucose-6-phosphate/phosphate-translocator
  misc_feature (1)..(305): Homolog of NCBI NO: 7489171 NR Description: phosphate/phosphoenolpyruvate translocator
  misc_feature (1)..(306): Homolog of NCBI NO: 7489170 NR Description: phosphate/phosphoenolpyruvate translocator
  misc_feature (1)..(306): Homolog of NCBI NO: 1706110 NR Description: Triose phosphate/phosphate translocator,
  misc_feature (1)..(306): Homolog of NCBI NO: 15242801 NR Description: phosphate/phosphoenolpyruvate translocator protein id: At5g33320.1, supported by cDNA: 21316., supported by
  misc_feature (1)..(306): Homolog of NCBI NO: 21554233 NR Description: phosphate/phosphoenolpyruvate translocator
  misc_feature (1)..(306): Homolog of NCBI NO: 1778141 NR Description: phosphate/phosphoenolpyruvate translocator
MKTLWLGSLFGLWYLFNIYFNIYNKQVLKVFPYPINITEVQFAVGTVAALFMWITGIIKRPKISGAQLVAILPLAIVHTMGNLFTNMSLGKVAVSFTHTIKAMEPFFSVILSAIFLGELPTIWVVSSLLPIVGGVALASLTEASFNWAGFWSAMASNVTFQSRNVLSKKLMVKKEESLDNLNLFSIITVMSFFLLAPVTFFTEGVKITPTFLQSAGLNVNQVLTRCLFAGLCFHAYQQVSYMILAMVSPVTHSVGNCVKRVVVIVTSVLFFRTPVSPINSLGTAIALAGVFLYSQLKRLKPKPKTA

SEQ ID NO: 5755 - protein, 255 aa, Zea mays subsp. mays
  peptide (1)..(255): Ceres Seq. ID no. 12369119
  misc_feature (1)..(89): Pfam Name: Integral membrane protein DUF6 Pfam Description: Integral membrane protein DUF6
  misc_feature (1)..(255): Homolog of NCBI NO: 29647427 NR Description: putative phosphoenolpyruvate/phosphate
  misc_feature (1)..(255): Homolog of NCBI NO: 13991929 NR Description: phosphoenolpyruvate/phosphate translocator [Oryza
  misc_feature (1)..(255): Homolog of NCBI NO: 7489743 NR Description: glucose-6-phosphate/phosphate-translocator
  misc_feature (1)..(255): Homolog of NCBI NO: 7489742 NR Description: glucose-6-phosphate/phosphate-translocator
  misc_feature (1)..(254): Homolog of NCBI NO: 7489171 NR Description: phosphate/phosphoenolpyruvate translocator
  misc_feature (1)..(255): Homolog of NCBI NO: 7489170 NR Description: phosphate/phosphoenolpyruvate translocator
  misc_feature (1)..(255): Homolog of NCBI NO: 1706110 NR Description: Triose phosphate/phosphate translocator,
  misc_feature (1)..(255): Homolog of NCBI NO: 15242801 NR Description: phosphate/phosphoenolpyruvate translocator protein id: At5g33320.1, supported by cDNA: 21316., supported by
  misc_feature (1)..(255): Homolog of NCBI NO: 21554233 NR Description: phosphate/phosphoenolpyruvate translocator
  misc_feature (1)..(255): Homolog of NCBI NO: 1778141 NR Description: phosphate/phosphoenolpyruvate translocator
MWITGIIKRPKISGAQLVAILPLAIVHTMGNLFTNMSLGKVAVSFTHTIKAMEPFFSVILSAIFLGELPTIWVVSSLLPIVGGVALASLTEASFNWAGFWSAMASNVTFQSRNVLSKKLMVKKEESLDNLNLFSIITVMSFFLLAPVTFFTEGVKITPTFLQSAGLNVNQVLTRCLFAGLCFHAYQQVSYMILAMVSPVTHSVGNCVKRVVVIVTSVLFFRTPVSPINSLGTAIALAGVFLYSQLKRLKPKPKTA

SEQ ID NO: 5756 - DNA, 934 bp, Zea mays subsp. mays
  misc_feature (1)..(934): Ceres Seq. ID no. 12408029
  misc_feature: MA Experiment ID: 108522 Result: Up-regulated in Transcription
  misc_feature: MA Experiment 108522 PARAMETER Experiment Name: Zm_42deg_Heat_P Parameter: Age (day) Value: 8
  misc_feature: MA Experiment 108522 PARAMETER Experiment Name: Zm_42deg_Heat_P Parameter: Organism Value: Zea mays
  misc_feature: MA Experiment 108522 PARAMETER Experiment Name: Zm_42deg_Heat_P Parameter: Plant Line Value: 35A19
  misc_feature: MA Experiment 108522 PARAMETER Experiment Name: Zm_42deg_Heat_P Parameter: Temperature (deg C) Value: 42 vs. 22
  misc_feature: MA Experiment 108522 PARAMETER Experiment Name: Zm_42deg_Heat_P Parameter: Timepoint (hr) Value: 1
  misc_feature: MA Experiment 108522 PARAMETER Experiment Name: Zm_42deg_Heat_P Parameter: Tissue Value: Aerial
  misc_feature: MA Experiment ID: 108523 Result: Up-regulated in Transcription
  misc_feature: MA Experiment 108523 PARAMETER Experiment Name: Zm_42deg_Heat_P Parameter: Age (day) Value: 8
  misc_feature: MA Experiment 108523 PARAMETER Experiment Name: Zm_42deg_Heat_P Parameter: Organism Value: Zea mays
  misc_feature: MA Experiment 108523 PARAMETER Experiment Name: Zm_42deg_Heat_P Parameter: Plant Line Value: 35A19
  misc_feature: MA Experiment 108523 PARAMETER Experiment Name: Zm_42deg_Heat_P Parameter: Temperature (deg C) Value: 42 vs. 22
  misc_feature: MA Experiment 108523 PARAMETER Experiment Name: Zm_42deg_Heat_P Parameter: Timepoint (hr) Value: 6
  misc_feature: MA Experiment 108523 PARAMETER Experiment Name: Zm_42deg_Heat_P Parameter: Tissue Value: Aerial
  misc_feature: MA Experiment ID: 108527 Result: Up-regulated in Transcription
  misc_feature: MA Experiment 108527 PARAMETER Experiment Name: Zm_5mM_NO_P Parameter: Age (day) Value: 8
  misc_feature: MA Experiment 108527 PARAMETER Experiment Name: Zm_5mM_NO_P Parameter: Organism Value: Zea mays
  misc_feature: MA Experiment 108527 PARAMETER Experiment Name: Zm_5mM_NO_P Parameter: Plant Line Value: 35A19
  misc_feature: MA Experiment 108527 PARAMETER Experiment Name: Zm_5mM_NO_P Parameter: Timepoint (hr) Value: 6
  misc_feature: MA Experiment 108527 PARAMETER Experiment Name: Zm_5mM_NO_P Parameter: Tissue Value: Aerial
  misc_feature: MA Experiment 108527 PARAMETER Experiment Name: Zm_5mM_NO_P Parameter: Treatment Value: 5mM NO vs. No Treatment
  misc_feature: MA Experiment ID: 20000534 Result: Down-regulated in Transcription
  misc_feature: MA Experiment 20000534 PARAMETER Experiment Name: Zm_Hybrid_Pollen_P Parameter: Age (day) Value: 8
  misc_feature: MA Experiment 20000534 PARAMETER Experiment Name: Zm_Hybrid_Pollen_P Parameter: Organism Value: Zea mays
  misc_feature: MA Experiment 20000534 PARAMETER Experiment Name: Zm_Hybrid_Pollen_P Parameter: Plant Line Value: 35A19
  misc_feature: MA Experiment 20000534 PARAMETER Experiment Name: Zm_Hybrid_Pollen_P Parameter: Tissue Value: Pollen vs. Aerial
ctcgcggtcgcagctagcgaaccctaatggagatcgctgaggccctgcaggcctacacgggcctcacacccgcggccgccgccaccatcctcgccctcatggtggccacctacctcctcgtctcctccctcttcgtcgcccccgcccccgcccccgccccactttccaagccgccccagcagcagcgcgagggggagaaggcacaggaggaggaggaggaagaaccgatgcctttcgtgtatccggaccccgtggaggtgggcgagctcacgctcgagcagctcagtgcgtatgacggcaaggacccagccaagcagatcctcattgccatccggggccaggtctacgacgtctcccgcgggaggctcttttatggccctcagggaccatattccttgtttgccgggagggatgcaacccgggccctggcattgatgtcatttgacccaaacgacctcaccggggatctggacggcctaagcgccgatgagctggaggtgttgcaagattgggaggaaaaattcaagtagaggtatccgagggtgggccaccttgcctgtcaagacgcgacagacagtggtcagaccaccgctgggcttcatcacgaggaaggggacgcctaaaactccactggtttgcctcgtcgtcctctcctctgtttttttttttttacttgctggatttcaccctgtagatctgatgtgcgcacttgtgggtgacgcagctgtcgtcgtcgtttgctgtatatgtatgtacgtgtgcggtgtgcctactgactaatgcacgcacctgctgtcccatttcttttggatctgtagcggctataaggaaattttgagcctaaaaaaaactggaggctttaggaacagcccatgttcgactcttggttgtatacgcgtgatttgtgtcatgatttgtggctttgttgttcatc

SEQ ID NO: 5757 - protein, 167 aa, Zea mays subsp. mays
  peptide (1)..(167): Ceres Seq. ID no. 12408030
  misc_feature (80)..(167): Pfam Name: Cytochrome b5-like Heme/Steroid binding domain Pfam Description: Cytochrome b5-like Heme/Steroid binding domain
  misc_feature (3)..(167): Homolog of NCBI NO: 37535798 NR Description: putative steroid membrane binding protein [Oryza
  misc_feature (3)..(167): Homolog of NCBI NO: 4960154 NR Description: putative progesterone-binding protein homolog
  misc_feature (3)..(167): Homolog of NCBI NO: 15229044 NR Description: putative progesterone-binding protein homolog protein id: At3g48890.1, supported by cDNA: gi_16930426, by cDNA: gi_19310508, supported by cDNA: gi_4960153 [Arabidopsis
  misc_feature (3)..(167): Homolog of NCBI NO: 4960156 NR Description: putative progesterone-binding protein homolog
  misc_feature (3)..(167): Homolog of NCBI NO: 15242943 NR Description: progesterone-binding protein-like; protein id: supported by cDNA: 28003., supported by cDNA: gi_15028112,
  misc_feature (2)..(167): Homolog of NCBI NO: 37535794 NR Description: putative steroid membrane binding protein [Oryza
  misc_feature (80)..(167): Homolog of NCBI NO: 15224648 NR Description: putative steroid binding protein; protein id: supported by cDNA: 10261. [Arabidopsis thaliana]
  misc_feature (80)..(167): Homolog of NCBI NO: 40889041 NR Description: Chain A, Solution Structure Of A Putative
  misc_feature (80)..(167): Homolog of NCBI NO: 18859969 NR Description: CG9066-PA [Drosophila melanogaster]
  misc_feature (73)..(167): Homolog of NCBI NO: 40741827 NR Description: hypothetical protein AN4939.2 [Aspergillus
MEIAEALQAYTGLTPAAAATILALMVATYLLVSSLFVAPAPAPAPLSKPPQQQREGEKAQEEEEEEPMPFVYPDPVEVGELTLEQLSAYDGKDPAKQILIAIRGQVYDVSRGRLFYGPQGPYSLFAGRDATRALALMSFDPNDLTGDLDGLSADELEVLQDWEEKFK

SEQ ID NO: 5758 - protein, 143 aa, Zea mays subsp. mays
  peptide (1)..(143): Ceres Seq. ID no. 12408031
  misc_feature (56)..(143): Pfam Name: Cytochrome b5-like Heme/Steroid binding domain Pfam Description: Cytochrome b5-like Heme/Steroid binding domain
  misc_feature (1)..(143): Homolog of NCBI NO: 37535798 NR Description: putative steroid membrane binding protein [Oryza
  misc_feature (1)..(143): Homolog of NCBI NO: 4960154 NR Description: putative progesterone-binding protein homolog
  misc_feature (1)..(143): Homolog of NCBI NO: 15229044 NR Description: putative progesterone-binding protein homolog protein id: At3g48890.1, supported by cDNA: gi_16930426, by cDNA: gi_19310508, supported by cDNA: gi_4960153 [Arabidopsis
  misc_feature (1)..(143): Homolog of NCBI NO: 4960156 NR Description: putative progesterone-binding protein homolog
  misc_feature (1)..(143): Homolog of NCBI NO: 15242943 NR Description: progesterone-binding protein-like; protein id: supported by cDNA: 28003., supported by cDNA: gi_15028112,
  misc_feature (1)..(143): Homolog of NCBI NO: 37535794 NR Description: putative steroid membrane binding protein [Oryza
  misc_feature (56)..(143): Homolog of NCBI NO: 15224648 NR Description: putative steroid binding protein; protein id: supported by cDNA: 10261. [Arabidopsis thaliana]
  misc_feature (56)..(143): Homolog of NCBI NO: 40889041 NR Description: Chain A, Solution Structure Of A Putative
  misc_feature (56)..(143): Homolog of NCBI NO: 18859969 NR Description: CG9066-PA [Drosophila melanogaster]
  misc_feature (49)..(143): Homolog of NCBI NO: 40741827 NR Description: hypothetical protein AN4939.2 [Aspergillus
MVATYLLVSSLFVAPAPAPAPLSKPPQQQREGEKAQEEEEEEPMPFVYPDPVEVGELTLEQLSAYDGKDPAKQILIAIRGQVYDVSRGRLFYGPQGPYSLFAGRDATRALALMSFDPNDLTGDLDGLSADELEVLQDWEEKFK

SEQ ID NO: 5759 - protein, 100 aa, Zea mays subsp. mays
  peptide (1)..(100): Ceres Seq. ID no. 12408032
  misc_feature (13)..(100): Pfam Name: Cytochrome b5-like Heme/Steroid binding domain Pfam Description: Cytochrome b5-like Heme/Steroid binding domain
  misc_feature (1)..(100): Homolog of NCBI NO: 37535798 NR Description: putative steroid membrane binding protein [Oryza
  misc_feature (1)..(100): Homolog of NCBI NO: 4960154 NR Description: putative progesterone-binding protein homolog
  misc_feature (1)..(100): Homolog of NCBI NO: 15229044 NR Description: putative progesterone-binding protein homolog protein id: At3g48890.1, supported by cDNA: gi_16930426, by cDNA: gi_19310508, supported by cDNA: gi_4960153 [Arabidopsis
  misc_feature (1)..(100): Homolog of NCBI NO: 4960156 NR Description: putative progesterone-binding protein homolog
  misc_feature (1)..(100): Homolog of NCBI NO: 15242943 NR Description: progesterone-binding protein-like; protein id: supported by cDNA: 28003., supported by cDNA: gi_15028112,
  misc_feature (1)..(100): Homolog of NCBI NO: 37535794 NR Description: putative steroid membrane binding protein [Oryza
  misc_feature (13)..(100): Homolog of NCBI NO: 15224648 NR Description: putative steroid binding protein; protein id: supported by cDNA: 10261. [Arabidopsis thaliana]
  misc_feature (13)..(100): Homolog of NCBI NO: 40889041 NR Description: Chain A, Solution Structure Of A Putative
  misc_feature (13)..(100): Homolog of NCBI NO: 18859969 NR Description: CG9066-PA [Drosophila melanogaster]
  misc_feature (6)..(100): Homolog of NCBI NO: 40741827 NR Description: hypothetical protein AN4939.2 [Aspergillus
MPFVYPDPVEVGELTLEQLSAYDGKDPAKQILIAIRGQVYDVSRGRLFYGPQGPYSLFAGRDATRALALMSFDPNDLTGDLDGLSADELEVLQDWEEKFK

SEQ ID NO: 5760 - DNA, 1338 bp, Zea mays subsp. mays
  misc_feature (1)..(1338): Ceres Seq. ID no. 12344124
  misc_feature: MA Experiment ID: 108528 Result: Up-regulated in Transcription
  misc_feature: MA Experiment 108528 PARAMETER Experiment Name: Zm_Imbibed_Seeds_P Parameter: Age (day) Value: 5 vs. 2
  misc_feature: MA Experiment 108528 PARAMETER Experiment Name: Zm_Imbibed_Seeds_P Parameter: Organism Value: Zea mays
  misc_feature: MA Experiment 108528 PARAMETER Experiment Name: Zm_Imbibed_Seeds_P Parameter: Plant Line Value: 35A19
  misc_feature: MA Experiment 108528 PARAMETER Experiment Name: Zm_Imbibed_Seeds_P Parameter: Tissue Value: Aerial vs. Embryo
  misc_feature: MA Experiment ID: 108545 Result: Up-regulated in Transcription
  misc_feature: MA Experiment 108545 PARAMETER Experiment Name: Zm_Imbibed_Seeds_P Parameter: Age (day) Value: 3 vs. 2
  misc_feature: MA Experiment 108545 PARAMETER Experiment Name: Zm_Imbibed_Seeds_P Parameter: Organism Value: Zea mays
  misc_feature: MA Experiment 108545 PARAMETER Experiment Name: Zm_Imbibed_Seeds_P Parameter: Plant Line Value: 35A19
  misc_feature: MA Experiment 108545 PARAMETER Experiment Name: Zm_Imbibed_Seeds_P Parameter: Tissue Value: Aerial vs. Embryo
  misc_feature: MA Experiment ID: 108547 Result: Up-regulated in Transcription
  misc_feature: MA Experiment 108547 PARAMETER Experiment Name: Zm_Imbibed_Seeds_P Parameter: Age (day) Value: 4 vs. 2
  misc_feature: MA Experiment 108547 PARAMETER Experiment Name: Zm_Imbibed_Seeds_P Parameter: Organism Value: Zea mays
  misc_feature: MA Experiment 108547 PARAMETER Experiment Name: Zm_Imbibed_Seeds_P Parameter: Plant Line Value: 35A19
  misc_feature: MA Experiment 108547 PARAMETER Experiment Name: Zm_Imbibed_Seeds_P Parameter: Tissue Value: Aerial vs. Embryo
  misc_feature: MA Experiment ID: 20000487 Result: Up-regulated in Transcription
  misc_feature: MA Experiment 20000487 PARAMETER Experiment Name: Zm_50mM_NH4NO3_L_to_H_P Parameter: Organism Value: Zea mays
  misc_feature: MA Experiment 20000487 PARAMETER Experiment Name: Zm_50mM_NH4NO3_L_to_H_P Parameter: Timepoint (hr) Value: 4
  misc_feature: MA Experiment 20000487 PARAMETER Experiment Name: Zm_50mM_NH4NO3_L_to_H_P Parameter: Tissue Value: Leaves
  misc_feature: MA Experiment 20000487 PARAMETER Experiment Name: Zm_50mM_NH4NO3_L_to_H_P Parameter: Treatment Value: 50mM NH4NO3 vs. 100mM Mannitol
  misc_feature: MA Experiment ID: 20000488 Result: Up-regulated in Transcription
  misc_feature: MA Experiment 20000488 PARAMETER Experiment Name: Zm_50mM_NH4NO3_L_to_H_P Parameter: Organism Value: Zea mays
  misc_feature: MA Experiment 20000488 PARAMETER Experiment Name: Zm_50mM_NH4NO3_L_to_H_P Parameter: Timepoint (hr) Value: 8
  misc_feature: MA Experiment 20000488 PARAMETER Experiment Name: Zm_50mM_NH4NO3_L_to_H_P Parameter: Tissue Value: Leaves
  misc_feature: MA Experiment 20000488 PARAMETER Experiment Name: Zm_50mM_NH4NO3_L_to_H_P Parameter: Treatment Value: 50mM NH4NO3 vs. 100mM Mannitol
  misc_feature: MA Experiment ID: 20001606 Result: Up-regulated in Transcription
  misc_feature: MA Experiment 20001606 PARAMETER Experiment Name: Zm_50ppm_KNO3_L-to-H_P Parameter: Age (day) Value: 19
  misc_feature: MA Experiment 20001606 PARAMETER Experiment Name: Zm_50ppm_KNO3_L-to-H_P Parameter: Organism Value: Zea mays
  misc_feature: MA Experiment 20001606 PARAMETER Experiment Name: Zm_50ppm_KNO3_L-to-H_P Parameter: Plant Line Value: 35A19
  misc_feature: MA Experiment 20001606 PARAMETER Experiment Name: Zm_50ppm_KNO3_L-to-H_P Parameter: Timepoint (hr) Value: 8
  misc_feature: MA Experiment 20001606 PARAMETER Experiment Name: Zm_50ppm_KNO3_L-to-H_P Parameter: Tissue Value: Shoots
  misc_feature: MA Experiment 20001606 PARAMETER Experiment Name: Zm_50ppm_KNO3_L-to-H_P Parameter: Treatment Value: 50ppm KNO3 vs. 50ppm KCl
gtccccgccccactgctgcccattcctctcatcccagcgaacgaccctccagcacgccatccgcttagccgccccggagcattgccatcgtcgccgccaccttctatcccagtgtggagcgggagagaacccgtctgcactcagaagctggtttaatccggtgggagcacaagtcgtgtctaaaatattcagattgctaagatgttgggtcatggtctagtaactgatccctcaagaaccttacgatgtccagttaattcaagggtatcaagtgcacccttggggcttgtttcttcgttgaatttcaacaggggatgcaagggaaagaacaaaatattcaatgtggatagacacaccaagtatagtacttctttctgttatgcgccaagaaatgccagaatcacaccactagcaactgcatcatttggggatatggctgattcttcaactcctatctttccccgaatccatgtaaaagatccatatcagcgtctcggaatcagcagggaagcatcagaagaagaaattcgagctgctaggaactatctgataagcaagtatgcaggccacaagccaagtgttgatgcaattgagtctgcccatgacaggattatcatgcagagtttctttgataggaaaaaaccaaaaatgaatctcaagaaaaaatttagggaacttagtcagtcacgtgcagtgaaggctattcaaggcagatttcaaacaccacgtagcaaagtcatttggcagacagctattgcttttgtcttgcttggagtgcttacccttgctttccctaccgaagaagggccaaccctccaggtggccatctcttgtgcagcaaatatctatttcatttatcagagggtcaaaagtggatggcgagcattcttttatgggtttggttctttctttgcttcctggttccttggcaccttcttgatggtatctgtaattccccctatactccccggtccaagaaacttggaagtgagcaccgcgtgtgttacttatgtgctccttttcatatcgtcgaccttcttgaagtaagagatctttgtgtttccatgttagcgcaaagtcttgcaggagttataaacatggtatcatgcttcaaatagcttgtacaatccatcggctttttctttgcttgtttcacgtttatggagttggaaatgctagttccttagtgagttgatagtagttttcaggttgcaatgtgagatgtagaacgttttttttttgctttggcccgtgatatcttgagcagggtctaacacctcaagtaggtattttcggttgatgtattaaatacagttgtgttcgaatagatcatatgag

SEQ ID NO: 5761 - protein, 281 aa, Zea mays subsp. mays
  peptide (1)..(281): Ceres Seq. ID no. 12344125
  misc_feature (63)..(281): Homolog of NCBI NO: 11357625 NR Description: hypothetical protein F24M12.180 - Arabidopsis >gi|6562266|emb|CAB62636.1| putative protein [Arabidopsis
  misc_feature (63)..(281): Homolog of NCBI NO: 18409276 NR Description: putative protein; protein id: At3g51140.1, by cDNA: 266414., supported by cDNA: gi_14334851, supported by gi_17104692 [Arabidopsis thaliana] >gi|14334852|gb|AAK59604.1|
  misc_feature (82)..(281): Homolog of NCBI NO: 15237199 NR Description: putative protein; protein id: At5g23040.1 thaliana] >gi|9759362|dbj|BAB09821.1| to unknown protein [Arabidopsis thaliana]
  misc_feature (170)..(281): Homolog of NCBI NO: 37573058 NR Description: unknown protein [Oryza sativa (japonica
  misc_feature (92)..(281): Homolog of NCBI NO: 17230751 NR Description: hypothetical protein [Nostoc sp. PCC 7120]
  misc_feature (92)..(281): Homolog of NCBI NO: 23129945 NR Description: hypothetical protein [Nostoc punctiforme]
  misc_feature (95)..(281): Homolog of NCBI NO: 23039527 NR Description: hypothetical protein [Trichodesmium erythraeum
  misc_feature (93)..(250): Homolog of NCBI NO: 37520608 NR Description: hypothetical protein glr1039 [Gloeobacter
  misc_feature (94)..(281): Homolog of NCBI NO: 16329734 NR Description: unknown protein [Synechocystis sp. PCC 6803]
MLGHGLVTDPSRTLRCPVNSRVSSAPLGLVSSLNFNRGCKGKNKIFNVDRHTKYSTSFCYAPRNARITPLATASFGDMADSSTPIFPRIHVKDPYQRLGISREASEEEIRAARNYLISKYAGHKPSVDAIESAHDRIIMQSFFDRKKPKMNLKKKFRELSQSRAVKAIQGRFQTPRSKVIWQTAIAFVLLGVLTLAFPTEEGPTLQVAISCAANIYFIYQRVKSGWRAFFYGFGSFFASWFLGTFLMVSVIPPILPGPRNLEVSTACVTYVLLFISSTFLK

SEQ ID NO: 5762 - protein, 204 aa, Zea mays subsp. mays
  peptide (1)..(204): Ceres Seq. ID no. 12344126
  misc_feature (1)..(204): Homolog of NCBI NO: 11357625 NR Description: hypothetical protein F24M12.180 - Arabidopsis >gi|6562266|emb|CAB62636.1| putative protein [Arabidopsis
  misc_feature (1)..(204): Homolog of NCBI NO: 18409276 NR Description: putative protein; protein id: At3g51140.1, by cDNA: 266414., supported by cDNA: gi_14334851, supported by gi_17104692 [Arabidopsis thaliana] >gi|14334852|gb|AAK59604.1|
  misc_feature (5)..(204): Homolog of NCBI NO: 15237199 NR Description: putative protein; protein id: At5g23040.1 thaliana] >gi|9759362|dbj|BAB09821.1| to unknown protein [Arabidopsis thaliana]
  misc_feature (93)..(204): Homolog of NCBI NO: 37573058 NR Description: unknown protein [Oryza sativa (japonica
  misc_feature (15)..(204): Homolog of NCBI NO: 17230751 NR Description: hypothetical protein [Nostoc sp. PCC 7120]
  misc_feature (15)..(204): Homolog of NCBI NO: 23129945 NR Description: hypothetical protein [Nostoc punctiforme]
  misc_feature (18)..(204): Homolog of NCBI NO: 23039527 NR Description: hypothetical protein [Trichodesmium erythraeum
  misc_feature (16)..(173): Homolog of NCBI NO: 37520608 NR Description: hypothetical protein glr1039 [Gloeobacter
  misc_feature (17)..(204): Homolog of NCBI NO: 16329734 NR Description: unknown protein [Synechocystis sp. PCC 6803]
MADSSTPIFPRIHVKDPYQRLGISREASEEEIRAARNYLISKYAGHKPSVDAIESAHDRIIMQSFFDRKKPKMNLKKKFRELSQSRAVKAIQGRFQTPRSKVIWQTAIAFVLLGVLTLAFPTEEGPTLQVAISCAANIYFIYQRVKSGWRAFFYGFGSFFASWFLGTFLMVSVIPPILPGPRNLEVSTACVTYVLLFISSTFLK

SEQ ID NO: 5763 - protein, 143 aa, Zea mays subsp. mays
  peptide (1)..(143): Ceres Seq. ID no. 12344127
  misc_feature (1)..(143): Homolog of NCBI NO: 11357625 NR Description: hypothetical protein F24M12.180 - Arabidopsis >gi|6562266|emb|CAB62636.1| putative protein [Arabidopsis
  misc_feature (1)..(143): Homolog of NCBI NO: 18409276 NR Description: putative protein; protein id: At3g51140.1, by cDNA: 266414., supported by cDNA: gi_14334851, supported by gi_17104692 [Arabidopsis thaliana] >gi|14334852|gb|AAK59604.1|
  misc_feature (1)..(143): Homolog of NCBI NO: 15237199 NR Description: putative protein; protein id: At5g23040.1 thaliana] >gi|9759362|dbj|BAB09821.1| to unknown protein [Arabidopsis thaliana]
  misc_feature (32)..(143): Homolog of NCBI NO: 37573058 NR Description: unknown protein [Oryza sativa (japonica
  misc_feature (1)..(143): Homolog of NCBI NO: 17230751 NR Description: hypothetical protein [Nostoc sp. PCC 7120]
  misc_feature (1)..(143): Homolog of NCBI NO: 23129945 NR Description: hypothetical protein [Nostoc punctiforme]
  misc_feature (1)..(143): Homolog of NCBI NO: 23039527 NR Description: hypothetical protein [Trichodesmium erythraeum
  misc_feature (1)..(112): Homolog of NCBI NO: 37520608 NR Description: hypothetical protein glr1039 [Gloeobacter
  misc_feature (1)..(143): Homolog of NCBI NO: 16329734 NR Description: unknown protein [Synechocystis sp. PCC 6803]
MQSFFDRKKPKMNLKKKFRELSQSRAVKAIQGRFQTPRSKVIWQTAIAFVLLGVLTLAFPTEEGPTLQVAISCAANIYFIYQRVKSGWRAFFYGFGSFFASWFLGTFLMVSVIPPILPGPRNLEVSTACVTYVLLFISSTFLK

SEQ ID NO: 5764 - DNA, 1517 bp, Zea mays subsp. mays
  misc_feature (1)..(1517): Ceres Seq. ID no. 12365543
  misc_feature: MA Experiment ID: 108527 Result: Up-regulated in Transcription
  misc_feature: MA Experiment 108527 PARAMETER Experiment Name: Zm_5mM_NO_P Parameter: Age (day) Value: 8
  misc_feature: MA Experiment 108527 PARAMETER Experiment Name: Zm_5mM_NO_P Parameter: Organism Value: Zea mays
  misc_feature: MA Experiment 108527 PARAMETER Experiment Name: Zm_5mM_NO_P Parameter: Plant Line Value: 35A19
  misc_feature: MA Experiment 108527 PARAMETER Experiment Name: Zm_5mM_NO_P Parameter: Timepoint (hr) Value: 6
  misc_feature: MA Experiment 108527 PARAMETER Experiment Name: Zm_5mM_NO_P Parameter: Tissue Value: Aerial
  misc_feature: MA Experiment 108527 PARAMETER Experiment Name: Zm_5mM_NO_P Parameter: Treatment Value: 5mM NO vs. No Treatment
  misc_feature: MA Experiment ID: 108559 Result: Up-regulated in Transcription
  misc_feature: MA Experiment 108559 PARAMETER Experiment Name: Zm_5mM_NO_P Parameter: Age (day) Value: 8
  misc_feature: MA Experiment 108559 PARAMETER Experiment Name: Zm_5mM_NO_P Parameter: Organism Value: Zea mays
  misc_feature: MA Experiment 108559 PARAMETER Experiment Name: Zm_5mM_NO_P Parameter: Plant Line Value: 35A19
  misc_feature: MA Experiment 108559 PARAMETER Experiment Name: Zm_5mM_NO_P Parameter: Timepoint (hr) Value: 12
  misc_feature: MA Experiment 108559 PARAMETER Experiment Name: Zm_5mM_NO_P Parameter: Tissue Value: Aerial
  misc_feature: MA Experiment 108559 PARAMETER Experiment Name: Zm_5mM_NO_P Parameter: Treatment Value: 5mM NO vs. No Treatment
  misc_feature: MA Experiment ID: 20000477 Result: Up-regulated in Transcription
  misc_feature: MA Experiment 20000477 PARAMETER Experiment Name: Zm_5mM_SA_P Parameter: Age (day) Value: 10
  misc_feature: MA Experiment 20000477 PARAMETER Experiment Name: Zm_5mM_SA_P Parameter: Organism Value: Zea mays
  misc_feature: MA Experiment 20000477 PARAMETER Experiment Name: Zm_5mM_SA_P Parameter: Plant Line Value: 35A19
  misc_feature: MA Experiment 20000477 PARAMETER Experiment Name: Zm_5mM_SA_P Parameter: Timepoint (hr) Value: 48
  misc_feature: MA Experiment 20000477 PARAMETER Experiment Name: Zm_5mM_SA_P Parameter: Tissue Value: Aerial
  misc_feature: MA Experiment 20000477 PARAMETER Experiment Name: Zm_5mM_SA_P Parameter: Treatment Value: 5mM SA vs. No Treatment
  misc_feature: MA Experiment ID: 20000478 Result: Up-regulated in Transcription
  misc_feature: MA Experiment 20000478 PARAMETER Experiment Name: Zm_5mM_SA_P Parameter: Age (day) Value: 11
  misc_feature: MA Experiment 20000478 PARAMETER Experiment Name: Zm_5mM_SA_P Parameter: Organism Value: Zea mays
  misc_feature: MA Experiment 20000478 PARAMETER Experiment Name: Zm_5mM_SA_P Parameter: Plant Line Value: 35A19
  misc_feature: MA Experiment 20000478 PARAMETER Experiment Name: Zm_5mM_SA_P Parameter: Timepoint (hr) Value: 72
  misc_feature: MA Experiment 20000478 PARAMETER Experiment Name: Zm_5mM_SA_P Parameter: Tissue Value: Aerial
  misc_feature: MA Experiment 20000478 PARAMETER Experiment Name: Zm_5mM_SA_P Parameter: Treatment Value: 5mM SA vs. No Treatment
  misc_feature: MA Experiment ID: 20000487 Result: Up-regulated in Transcription
  misc_feature: MA Experiment 20000487 PARAMETER Experiment Name: Zm_50mM_NH4NO3_L_to_H_P Parameter: Organism Value: Zea mays
  misc_feature: MA Experiment 20000487 PARAMETER Experiment Name: Zm_50mM_NH4NO3_L_to_H_P Parameter: Timepoint (hr) Value: 4
  misc_feature: MA Experiment 20000487 PARAMETER Experiment Name: Zm_50mM_NH4NO3_L_to_H_P Parameter: Tissue Value: Leaves
  misc_feature: MA Experiment 20000487 PARAMETER Experiment Name: Zm_50mM_NH4NO3_L_to_H_P Parameter: Treatment Value: 50mM NH4NO3 vs. 100mM Mannitol
aagcatcaccatcgacggggcgagggtacacggaacaccagccgtccgatccatatcgacggccaggtaaatcggaggaagcccggaagaagtctccttccagcaccacccttctctcctccgcatccccccggccggttcctccttgccgccgccgtcgctgtgccaagccttgcgaataaccgttgtccgggctgtggggggcagacatggcgctccggaggctgctgcaggggagtgtcctgccgcgggtaaccggcagggtttcggcaccggccgtggcgccgttttcaacggagtccggagagaccatccgtgccacgctctttccgggcgacggcatcgggccagagattgccgagtctgtcaagcaggtattcaatgttgcaggggtaccaattgaatgggaagaacactatgttggtacagaagttgatcccagaacagagagttttttgacttgggaaagcctggagtcagtgcgtagaaacaaagttggcttgaaaggtcctatggctacacctattggaaagggtcatcgatctttgaatcttacattaaggaaagaacttgggctctatgccaatgtcaggccttgcaacagcctcccaggctacaagaccagatacgatgatgttaaccttgtgacaattcgtgaaaatactgaaggagaatatagtggtcttgagcatcaggttgtgagaggtgttgtagaaagtttgaaaattattacccgccaagcaagtttgagagtggcagaatatgcttttcattatgccaaggccaatggccgggaaagggtctctgcgattcacaaggccaatattatgaggaagacagatggtcttttcctcaagtgttgccgtgaagtggctgagacgtaccctgaaattcaatacgaggaggtcatcattgacaattgttgtatgacgcttgtgaagaatcctggtctttttgatgtattagtgatgccaaacctctatggtgacatcattagcgatctatgtgctggtttgattgggggcttgggcctaacacccagttgcaatattggtgaaggtggcatttgtctagcagaagctgttcatggttctgctcctgatattgctggcaagaaccttgcgaacccgactgctcttatgctgagtgctgtcatgatgttgcgccacttgcaattcaacgacaaagcagaccggatccacaacgccatcctccagactattgctggggggaagtacaggactgctgatcttggtggaaaggcatcgacatccgagtttacaaatgcagtctgtgatcacatctgagaatcggatgtggttctttccttctgattgttctgtcttcctaatatctttttgtcgcatatggggaggagctttagctttaagaggttaactggcagcacctcgaacttctttgggtggttaacacggtttgagaccgtcaaatatttttgtcacatatcttgctgtccagaaattttttcaacttcagaatcgagtaaataattctgc

SEQ ID NO: 5765 - protein, 365 aa, Zea mays subsp. mays
  peptide (1)..(365): Ceres Seq. ID no. 12365544
  misc_feature (36)..(361): Pfam Name: Isocitrate/isopropylmalate dehydrogenase Pfam Description: Isocitrate/isopropylmalate dehydrogenase
  misc_feature (27)..(365): Homolog of NCBI NO: 7431333 NR Description: probable isocitrate dehydrogenase (NAD) (EC
  misc_feature (1)..(365): Homolog of NCBI NO: 11251553 NR Description: 3-isopropylmalate dehydrogenase-like protein -
  misc_feature (1)..(365): Homolog of NCBI NO: 18414179 NR Description: putative protein; protein id: At5g03290.1, by cDNA: gi_15724319, supported by cDNA: gi_20466713 [Arabidopsis >gi|15724320|gb|AAL06553.1|AF412100_1 W25EPL23M/W25EPL23M
  misc_feature (37)..(365): Homolog of NCBI NO: 28974492 NR Description: NAD-dependent isocitrate dehydrogenase alpha
  misc_feature (27)..(342): Homolog of NCBI NO: 266463 NR Description: 3-isopropylmalate dehydrogenase, chloroplast
  misc_feature (1)..(365): Homolog of NCBI NO: 34903262 NR Description: unnamed protein product [Oryza sativa (japonica group)] >gi|6539562|dbj|BAA88179.1| unnamed protein product
  misc_feature (27)..(342): Homolog of NCBI NO: 7427677 NR Description: 3-isopropylmalate dehydrogenase (EC 1.1.1.85)
  misc_feature (4)..(365): Homolog of NCBI NO: 21536667 NR Description: putative (NAD+) isocitrate dehydrogenase
  misc_feature (10)..(365): Homolog of NCBI NO: 39850137 NR Description: Unknown (protein for MGC:76128) [Silurana
  misc_feature (31)..(365): Homolog of NCBI NO: 18250284 NR Description: isocitrate dehydrogenase 3 (NAD+) alpha; sequence AI316514 [Mus musculus] >gi|12845252|dbj|BAB26679.1| protein product [Mus musculus] >gi|26328565|dbj|BAC28021.1|
MALRRLLQGSVLPRVTGRVSAPAVAPFSTESGETIRATLFPGDGIGPEIAESVKQVFNVAGVPIEWEEHYVGTEVDPRTESFLTWESLESVRRNKVGLKGPMATPIGKGHRSLNLTLRKELGLYANVRPCNSLPGYKTRYDDVNLVTIRENTEGEYSGLEHQVVRGVVESLKIITRQASLRVAEYAFHYAKANGRERVSAIHKANIMRKTDGLFLKCCREVAETYPEIQYEEVIIDNCCMTLVKNPGLFDVLVMPNLYGDIISDLCAGLIGGLGLTPSCNIGEGGICLAEAVHGSAPDIAGKNLANPTALMLSAVMMLRHLQFNDKADRIHNAILQTIAGGKYRTADLGGKASTSEFTNAVCDHI

SEQ ID NO: 5766 - protein, 264 aa, Zea mays subsp. mays
  peptide (1)..(264): Ceres Seq. ID no. 12365545
  misc_feature (1)..(260): Pfam Name: Isocitrate/isopropylmalate dehydrogenase Pfam Description: Isocitrate/isopropylmalate dehydrogenase
  misc_feature (1)..(264): Homolog of NCBI NO: 34903262 NR Description: unnamed protein product [Oryza sativa (japonica group)] >gi|6539562|dbj|BAA88179.1| unnamed protein product
  misc_feature (1)..(264): Homolog of NCBI NO: 7431333 NR Description: probable isocitrate dehydrogenase (NAD) (EC
  misc_feature (1)..(264): Homolog of NCBI NO: 11251553 NR Description: 3-isopropylmalate dehydrogenase-like protein -
  misc_feature (1)..(264): Homolog of NCBI NO: 18414179 NR Description: putative protein; protein id: At5g03290.1, by cDNA: gi_15724319, supported by cDNA: gi_20466713 [Arabidopsis >gi|15724320|gb|AAL06553.1|AF412100_1 W25EPL23M/W25EPL23M
  misc_feature (1)..(264): Homolog of NCBI NO: 28974492 NR Description: NAD-dependent isocitrate dehydrogenase alpha
  misc_feature (1)..(241): Homolog of NCBI NO: 266463 NR Description: 3-isopropylmalate dehydrogenase, chloroplast
  misc_feature (1)..(241): Homolog of NCBI NO: 7427677 NR Description: 3-isopropylmalate dehydrogenase (EC 1.1.1.85)
  misc_feature (1)..(264): Homolog of NCBI NO: 21536667 NR Description: putative (NAD+) isocitrate dehydrogenase
  misc_feature (1)..(264): Homolog of NCBI NO: 39850137 NR Description: Unknown (protein for MGC:76128) [Silurana
  misc_feature (1)..(264): Homolog of NCBI NO: 18250284 NR Description: isocitrate dehydrogenase 3 (NAD+) alpha; sequence AI316514 [Mus musculus] >gi|12845252|dbj|BAB26679.1| protein product [Mus musculus] >gi|26328565|dbj|BAC28021.1|
MATPIGKGHRSLNLTLRKELGLYANVRPCNSLPGYKTRYDDVNLVTIRENTEGEYSGLEHQVVRGVVESLKIITRQASLRVAEYAFHYAKANGRERVSAIHKANIMRKTDGLFLKCCREVAETYPEIQYEEVIIDNCCMTLVKNPGLFDVLVMPNLYGDIISDLCAGLIGGLGLTPSCNIGEGGICLAEAVHGSAPDIAGKNLANPTALMLSAVMMLRHLQFNDKADRIHNAILQTIAGGKYRTADLGGKASTSEFTNAVCDHI

SEQ ID NO: 5767 - DNA, 1622 bp, Zea mays subsp. mays
  misc_feature (1)..(1622): Ceres Seq. ID no. 12344128
  misc_feature: MA Experiment ID: 108523 Result: Up-regulated in Transcription
  misc_feature: MA Experiment 108523 PARAMETER Experiment Name: Zm_42deg_Heat_P Parameter: Age (day) Value: 8
  misc_feature: MA Experiment 108523 PARAMETER Experiment Name: Zm_42deg_Heat_P Parameter: Organism Value: Zea mays
  misc_feature: MA Experiment 108523 PARAMETER Experiment Name: Zm_42deg_Heat_P Parameter: Plant Line Value: 35A19
  misc_feature: MA Experiment 108523 PARAMETER Experiment Name: Zm_42deg_Heat_P Parameter: Temperature (deg C) Value: 42 vs. 22
  misc_feature: MA Experiment 108523 PARAMETER Experiment Name: Zm_42deg_Heat_P Parameter: Timepoint (hr) Value: 6
  misc_feature: MA Experiment 108523 PARAMETER Experiment Name: Zm_42deg_Heat_P Parameter: Tissue Value: Aerial
aaaaaaaaaacaccaacccacccaccagcctattatactcaacgcgacgaactcatctcaccaccgcgccctccgccggatggagcggccagacgtgacggtcaagcaggaggaagacgaagtggtggtggtgttggacgccgacggcgatgcttgcgggcactggccgggagcccgcgcggcgccggagccttggcagacgccggtgggatccgcggttccgccgttccttgcgaagacgttcgagcttgtggaggacccggcgacggacgccgtgatatcgtggggcgccgcgcggaacagcttcgtggtgtgggatccacacgccttcgcggcggggcaccttccgcgccgcttcaagcacggcaacttctccaccttcctccggcagctgaacacctacgtccgtaatcacatatctcaattcgtaattaacaaacattgcaatggattccgcaaggtgagcccggacaggtgggagttcgcgcacgccgacttcctcgcggggcagcggcacctcctcgtgaacatccggcggcgccgcgggggcgtcgcgggacccacagcatctccgtcttcggcgggagccggcggcgaccgtgatagcgagctcgagaggctgcggcgggaccgggaggcgctggcgagggagctgacgcggctgcggcgcgagcaggaggaggcccgcgcgcagctgctggacatggagcggcgcgtgcggggcacggagcggcggcaggagcagtgcaccgccttcctggcgcgcgccatccggaacccgaccttcctggacggcctgctggcgcgccgctgtggcgcgcacgtagaggccggcaggaagcggcggctgctcgatgccgctgcggccggccctgacccagcggacgtcctcgacatcgaggagctggcgatggttgcgggcgccgaggtcggtgtggcttccatcccagccgttgcagcggcgcagatttccaacacagccaacgccacggacatgatatggtacgagcttctcggggaggagcaggtggagatcgacgccgaggtgcacgacctcgtcgtggccgccgcggctgccactgatgagttggcgcagccgtgggcggagatggacgagaaagaggttgcggagcttgtgcggcagatagactgccttgcctcgccgagtccctgatcagtgatcaccacgaggtggagaccgtgcagctagttgcacctgtaatatggtgctccctacggagagcaactacctaccactagtccactattagccatgcattgcctgtgtcactggcaatgccattggcatatgacggctgctgaagtacaatggtggcgctggtactgtggtacggtactgcagtgcgccacgctctggattggaccctaatggtcatttggtgtgtagtgtcgttagccttgctgtttgattgtggttattggattattaggtctgcgatatgctaatttggattctgcatctgttttgtgggatccgacagtggcggtatgctgcacacaaaccggccgtggtgatggatgcagcagcctgatccagttagttgatgtattcttaagaatttgaccaaagagcaactctaaccaagccttaaatttttgcc

SEQ ID NO: 5768 - protein, 390 aa, Zea mays subsp. mays
  peptide (1)..(390): Ceres Seq. ID no. 12344129
  misc_feature (74)..(253): Pfam Name: HSF-type DNA-binding Pfam Description: HSF-type DNA-binding
  misc_feature (31)..(387): Homolog of NCBI NO: 15225255 NR Description: putative heat shock transcription factor; protein At2g26150.1 [Arabidopsis thaliana] >gi|7485001|pir||T02609
  misc_feature (27)..(296): Homolog of NCBI NO: 28971956 NR Description: putative heat shock transcription factor [Oryza
  misc_feature (74)..(385): Homolog of NCBI NO: 729774 NR Description: HEAT SHOCK FACTOR PROTEIN HSF30 (HEAT SHOCK FACTOR 30) (HSTF 30) (HEAT STRESS TRANSCRIPTION FACTOR)
  misc_feature (32)..(287): Homolog of NCBI NO: 30017583 NR Description: putative heat shock factor [Oryza sativa
  misc_feature (27)..(296): Homolog of NCBI NO: 33087081 NR Description: heat stress protein [Oryza sativa (japonica
  misc_feature (60)..(390): Homolog of NCBI NO: 37534406 NR Description: putative auxin-induced protein [Oryza sativa
  misc_feature (56)..(267): Homolog of NCBI NO: 34902614 NR Description: Putative heat shock protein [Oryza sativa
  misc_feature (62)..(267): Homolog of NCBI NO: 20521264 NR Description: putative heat shock transcription factor [Oryza
  misc_feature (47)..(295): Homolog of NCBI NO: 11386827 NR Description: Heat shock factor protein HSF8 (Heat shock factor 8) (HSTF 8) (Heat stress transcription factor)
  misc_feature (48)..(295): Homolog of NCBI NO: 729775 NR Description: HEAT SHOCK FACTOR PROTEIN HSF8 (HEAT SHOCK FACTOR 8) (HSTF 8) (HEAT STRESS TRANSCRIPTION FACTOR)
KKKHQPTHQPIILNATNSSHHRALRRMERPDVTVKQEEDEVVVVLDADGDACGHWPGARAAPEPWQTPVGSAVPPFLAKTFELVEDPATDAVISWGAARNSFVVWDPHAFAAGHLPRRFKHGNFSTFLRQLNTYVRNHISQFVINKHCNGFRKVSPDRWEFAHADFLAGQRHLLVNIRRRRGGVAGPTASPSSAGAGGDRDSELERLRRDREALARELTRLRREQEEARAQLLDMERRVRGTERRQEQCTAFLARAIRNPTFLDGLLARRCGAHVEAGRKRRLLDAAAAGPDPADVLDIEELAMVAGAEVGVASIPAVAAAQISNTANATDMIWYELLGEEQVEIDAEVHDLVVAAAAATDELAQPWAEMDEKEVAELVRQIDCLASPSP

SEQ ID NO: 5769 - protein, 364 aa, Zea mays subsp. mays
  peptide (1)..(364): Ceres Seq. ID no. 12344130
  misc_feature (48)..(227): Pfam Name: HSF-type DNA-binding Pfam Description: HSF-type DNA-binding
  misc_feature (5)..(361): Homolog of NCBI NO: 15225255 NR Description: putative heat shock transcription factor; protein At2g26150.1 [Arabidopsis thaliana] >gi|7485001|pir||T02609
  misc_feature (1)..(270): Homolog of NCBI NO: 28971956 NR Description: putative heat shock transcription factor [Oryza
  misc_feature (48)..(359): Homolog of NCBI NO: 729774 NR Description: HEAT SHOCK FACTOR PROTEIN HSF30 (HEAT SHOCK FACTOR 30) (HSTF 30) (HEAT STRESS TRANSCRIPTION FACTOR)
  misc_feature (6)..(261): Homolog of NCBI NO: 30017583 NR Description: putative heat shock factor [Oryza sativa
  misc_feature (1)..(270): Homolog of NCBI NO: 33087081 NR Description: heat stress protein [Oryza sativa (japonica
  misc_feature (34)..(364): Homolog of NCBI NO: 37534406 NR Description: putative auxin-induced protein [Oryza sativa
  misc_feature (30)..(241): Homolog of NCBI NO: 34902614 NR Description: Putative heat shock protein [Oryza sativa
  misc_feature (36)..(241): Homolog of NCBI NO: 20521264 NR Description: putative heat shock transcription factor [Oryza
  misc_feature (21)..(269): Homolog of NCBI NO: 11386827 NR Description: Heat shock factor protein HSF8 (Heat shock factor 8) (HSTF 8) (Heat stress transcription factor)
  misc_feature (22)..(269): Homolog of NCBI NO: 729775 NR Description: HEAT SHOCK FACTOR PROTEIN HSF8 (HEAT SHOCK FACTOR 8) (HSTF 8) (HEAT STRESS TRANSCRIPTION FACTOR)
MERPDVTVKQEEDEVVVVLDADGDACGHWPGARAAPEPWQTPVGSAVPPFLAKTFELVEDPATDAVISWGAARNSFVVWDPHAFAAGHLPRRFKHGNFSTFLRQLNTYVRNHISQFVINKHCNGFRKVSPDRWEFAHADFLAGQRHLLVNIRRRRGGVAGPTASPSSAGAGGDRDSELERLRRDREALARELTRLRREQEEARAQLLDMERRVRGTERRQEQCTAFLARAIRNPTFLDGLLARRCGAHVEAGRKRRLLDAAAAGPDPADVLDIEELAMVAGAEVGVASIPAVAAAQISNTANATDMIWYELLGEEQVEIDAEVHDLVVAAAAATDELAQPWAEMDEKEVAELVRQIDCLASPSP

SEQ ID NO: 5770 - DNA, 1187 bp, Zea mays subsp. mays
  misc_feature (1)..(1187): Ceres Seq. ID no. 12409333
  misc_feature: MA Experiment ID: 108526 Result: Up-regulated in Transcription
  misc_feature: MA Experiment 108526 PARAMETER Experiment Name: Zm_5mM_NO_P Parameter: Age (day) Value: 8
  misc_feature: MA Experiment 108526 PARAMETER Experiment Name: Zm_5mM_NO_P Parameter: Organism Value: Zea mays
  misc_feature: MA Experiment 108526 PARAMETER Experiment Name: Zm_5mM_NO_P Parameter: Plant Line Value: 35A19
  misc_feature: MA Experiment 108526 PARAMETER Experiment Name: Zm_5mM_NO_P Parameter: Timepoint (hr) Value: 1
  misc_feature: MA Experiment 108526 PARAMETER Experiment Name: Zm_5mM_NO_P Parameter: Tissue Value: Aerial
  misc_feature: MA Experiment 108526 PARAMETER Experiment Name: Zm_5mM_NO_P Parameter: Treatment Value: 5mM NO vs. No Treatment
  misc_feature: MA Experiment ID: 108527 Result: Up-regulated in Transcription
  misc_feature: MA Experiment 108527 PARAMETER Experiment Name: Zm_5mM_NO_P Parameter: Age (day) Value: 8
  misc_feature: MA Experiment 108527 PARAMETER Experiment Name: Zm_5mM_NO_P Parameter: Organism Value: Zea mays
  misc_feature: MA Experiment 108527 PARAMETER Experiment Name: Zm_5mM_NO_P Parameter: Plant Line Value: 35A19
  misc_feature: MA Experiment 108527 PARAMETER Experiment Name: Zm_5mM_NO_P Parameter: Timepoint (hr) Value: 6
  misc_feature: MA Experiment 108527 PARAMETER Experiment Name: Zm_5mM_NO_P Parameter: Tissue Value: Aerial
  misc_feature: MA Experiment 108527 PARAMETER Experiment Name: Zm_5mM_NO_P Parameter: Treatment Value: 5mM NO vs. No Treatment
  misc_feature: MA Experiment ID: 108543 Result: Down-regulated in Transcription
  misc_feature: MA Experiment ID: 20000108 Result: Down-regulated in Transcription
  misc_feature: MA Experiment 20000108 PARAMETER Experiment Name: Zm_Root-Tips_P Parameter: Age (day) Value: 12
  misc_feature: MA Experiment 20000108 PARAMETER Experiment Name: Zm_Root-Tips_P Parameter: Organism Value: Zea mays
  misc_feature: MA Experiment 20000108 PARAMETER Experiment Name: Zm_Root-Tips_P Parameter: Tissue Value: Root tips vs. Root mid region    35
  misc_feature: MA Experiment 20000108 PARAMETER Experiment Name: Zm_Root-Tips_P Parameter: Tissue Value: Root tips vs. Root mid region   Sequence Listing-Misc Features (4)
  misc_feature: MA Experiment ID: 20001608 Result: Down-regulated in Transcription
  misc_feature: MA Experiment 20001608 PARAMETER Experiment Name: Zm_50ppm_KNO3_L-to-H_P Parameter: Age (day) Value: 21
  misc_feature: MA Experiment 20001608 PARAMETER Experiment Name: Zm_50ppm_KNO3_L-to-H_P Parameter: Organism Value: Zea mays
  misc_feature: MA Experiment 20001608 PARAMETER Experiment Name: Zm_50ppm_KNO3_L-to-H_P Parameter: Plant Line Value: 35A19
  misc_feature: MA Experiment 20001608 PARAMETER Experiment Name: Zm_50ppm_KNO3_L-to-H_P Parameter: Timepoint (hr) Value: 48
  misc_feature: MA Experiment 20001608 PARAMETER Experiment Name: Zm_50ppm_KNO3_L-to-H_P Parameter: Tissue Value: Shoots
  misc_feature: MA Experiment 20001608 PARAMETER Experiment Name: Zm_50ppm_KNO3_L-to-H_P Parameter: Treatment Value: 50ppm KNO3 vs. 50ppm KCl
ccaacagcccgcatcgctcactccgtcactcactcggcgcggcgcccatccccgcggttctcacgagcgcgcgcgcctgcgtccggcgccgtccgccatggcgtcgtccaagcctttattccccttccccgtccccgcccccgacccgtccgacgaggtcgtgcgcgagttcggcccgctgctccgggtctacaagagcggccgcatcgagcggcccctggtggctccgcccgtggagcctggccacgacgccgccacgggggtccaatccaaggacgtccacctcggctcctactcggcccgcctctacctgccccccgtggccgacgccggtgccaagctgcccgtcgtcgtgttcgtgcacggcggcggcttcgtggccgagtccgccgcctcgcccaactaccacctcttcctcaacaggctcgccgccgcctgccccgcgctcgcggtctccgtcgactaccgcctggcgcccgagcacccgctcccggcggggtacgacgactgcctcgccgcgctcaagtgggtgctttccgccgccgacccctgggtcgccgcccacggggatctcgcgcgcgtcttcgtcgccggggacagcgccggcggcaacgtctgccactacctcgccatccacccggacgtcgtccaggcgcagcagcagggctgcccgccgccgctcaagggcgccgtgctcatccacccctggttctggggctccgaggccgtgggcgaggagcccagggaccccgccgtgcgcaccatgggcgccggactctggttcttcgcgtgccccgatgctaatagcatggaagacccgcggatgaaccccatggcgcccgccgcaccgggactccacacgctggcgtgtgagcgcgtcatggtgtgtaccgcggagggcgacttcctcaggtggcgcggccgcgcgtacgccgaggcggtggccgcggcgaggggaggccgcctggggcaggccgccggcgtcgagctgctggagaccatgggagagggccatgtcttcttcctcttcaaacccgactgcgacaaggccaaggagatgctggacaagatggcggctttcatcaatgcgccgtgaacgtgaacgtgatccgtgacgcgtgcgcccttgttcctttgtgtttgcgtgacaatgtggaaaataaaataatatatttcagctgttttgg

SEQ ID NO: 5771 - protein, 364 aa, Zea mays subsp. mays
  peptide (1)..(364): Ceres Seq. ID no. 12409334
  misc_feature (102)..(159): Pfam Name: Carboxylesterase Pfam Description: Carboxylesterase
  misc_feature (51)..(363): Homolog of NCBI NO: 38344841 NR Description: OSJNBa0064H22.22 [Oryza sativa (japonica
  misc_feature (52)..(362): Homolog of NCBI NO: 21536771 NR Description: unknown [Arabidopsis thaliana]
  misc_feature (52)..(362): Homolog of NCBI NO: 18401743 NR Description: expressed protein; protein id: At1g47480.1, by cDNA: 111056. [Arabidopsis thaliana] >gi|25405208|pir||A96515
  misc_feature (52)..(361): Homolog of NCBI NO: 18086341 NR Description: AT3g48690/T8P19_200 [Arabidopsis thaliana]
  misc_feature (52)..(361): Homolog of NCBI NO: 15228426 NR Description: putative protein; protein id: At3g48700.1
  misc_feature (52)..(361): Homolog of NCBI NO: 15228425 NR Description: putative protein; protein id: At3g48690.1, by cDNA: gi_18086340 [Arabidopsis thaliana]
  misc_feature (51)..(362): Homolog of NCBI NO: 15227669 NR Description: putative esterase; protein id: At2g03550.1
  misc_feature (59)..(362): Homolog of NCBI NO: 28393060 NR Description: putative esterase [Arabidopsis thaliana]
  misc_feature (50)..(364): Homolog of NCBI NO: 34393904 NR Description: putative cell death associated protein [Oryza
  misc_feature (59)..(364): Homolog of NCBI NO: 34393975 NR Description: putative PrMC3 [Oryza sativa (japonica
QQPASLTPSLTRRGAHPRGSHERARLRPAPSAMASSKPLFPFPVPAPDPSDEVVREFGPLLRVYKSGRIERPLVAPPVEPGHDAATGVQSKDVHLGSYSARLYLPPVADAGAKLPVVVFVHGGGFVAESAASPNYHLFLNRLAAACPALAVSVDYRLAPEHPLPAGYDDCLAALKWVLSAADPWVAAHGDLARVFVAGDSAGGNVCHYLAIHPDVVQAQQQGCPPPLKGAVLIHPWFWGSEAVGEEPRDPAVRTMGAGLWFFACPDANSMEDPRMNPMAPAAPGLHTLACERVMVCTAEGDFLRWRGRAYAEAVAAARGGRLGQAAGVELLETMGEGHVFFLFKPDCDKAKEMLDKMAAFINAP

SEQ ID NO: 5772 - protein, 332 aa, Zea mays subsp. mays
  peptide (1)..(332): Ceres Seq. ID no. 12409335
  misc_feature (70)..(127): Pfam Name: Carboxylesterase Pfam Description: Carboxylesterase
  misc_feature (19)..(331): Homolog of NCBI NO: 38344841 NR Description: OSJNBa0064H22.22 [Oryza sativa (japonica
  misc_feature (20)..(330): Homolog of NCBI NO: 21536771 NR Description: unknown [Arabidopsis thaliana]
  misc_feature (20)..(330): Homolog of NCBI NO: 18401743 NR Description: expressed protein; protein id: At1g47480.1, by cDNA: 111056. [Arabidopsis thaliana] >gi|25405208|pir||A96515
  misc_feature (20)..(329): Homolog of NCBI NO: 18086341 NR Description: AT3g48690/T8P19_200 [Arabidopsis thaliana]
  misc_feature (20)..(329): Homolog of NCBI NO: 15228426 NR Description: putative protein; protein id: At3g48700.1
  misc_feature (20)..(329): Homolog of NCBI NO: 15228425 NR Description: putative protein; protein id: At3g48690.1, by cDNA: gi_18086340 [Arabidopsis thaliana]
  misc_feature (19)..(330): Homolog of NCBI NO: 15227669 NR Description: putative esterase; protein id: At2g03550.1
  misc_feature (27)..(330): Homolog of NCBI NO: 28393060 NR Description: putative esterase [Arabidopsis thaliana]
  misc_feature (18)..(332): Homolog of NCBI NO: 34393904 NR Description: putative cell death associated protein [Oryza
  misc_feature (27)..(332): Homolog of NCBI NO: 34393975 NR Description: putative PrMC3 [Oryza sativa (japonica
MASSKPLFPFPVPAPDPSDEVVREFGPLLRVYKSGRIERPLVAPPVEPGHDAATGVQSKDVHLGSYSARLYLPPVADAGAKLPVVVFVHGGGFVAESAASPNYHLFLNRLAAACPALAVSVDYRLAPEHPLPAGYDDCLAALKWVLSAADPWVAAHGDLARVFVAGDSAGGNVCHYLAIHPDVVQAQQQGCPPPLKGAVLIHPWFWGSEAVGEEPRDPAVRTMGAGLWFFACPDANSMEDPRMNPMAPAAPGLHTLACERVMVCTAEGDFLRWRGRAYAEAVAAARGGRLGQAAGVELLETMGEGHVFFLFKPDCDKAKEMLDKMAAFINAP

SEQ ID NO: 5773 - protein, 274 aa, Zea mays subsp. mays
  peptide (1)..(274): Ceres Seq. ID no. 12409336
  misc_feature (42)..(229): Pfam Name: Equine herpesvirus glycoprotein gp2 Pfam Description: Equine herpesvirus glycoprotein gp2
  misc_feature (31)..(274): Homolog of NCBI NO: 23017082 NR Description: hypothetical protein [Thermobifida fusca]
  misc_feature (36)..(274): Homolog of NCBI NO: 13592175 NR Description: ppg3 [Leishmania major]
  misc_feature (13)..(274): Homolog of NCBI NO: 27375632 NR Description: blr0521 [Bradyrhizobium japonicum]
  misc_feature (36)..(274): Homolog of NCBI NO: 13592175 NR Description: ppg3 [Leishmania major]
  misc_feature (36)..(274): Homolog of NCBI NO: 13592175 NR Description: ppg3 [Leishmania major]
  misc_feature (14)..(264): Homolog of NCBI NO: 23017082 NR Description: hypothetical protein [Thermobifida fusca]
  misc_feature (36)..(274): Homolog of NCBI NO: 13592175 NR Description: ppg3 [Leishmania major]
  misc_feature (9)..(274): Homolog of NCBI NO: 27375632 NR Description: blr0521 [Bradyrhizobium japonicum]
  misc_feature (31)..(274): Homolog of NCBI NO: 188864 NR Description: mucin
  misc_feature (21)..(274): Homolog of NCBI NO: 28574039 NR Description: Salivary gland secretion 1 CG3047-PA
NSPHRSLRHSLGAAPIPAVLTSARACVRRRPPWRRPSLYSPSPSPPPTRPTRSCASSARCSGSTRAAASSGPWWLRPWSLATTPPRGSNPRTSTSAPTRPASTCPPWPTPVPSCPSSCSCTAAASWPSPPPRPTTTSSSTGSPPPAPRSRSPSTTAWRPSTRSRRGTTTASPRSSGCFPPPTPGSPPTGISRASSSPGTAPAATSATTSPSTRTSSRRSSRAARRRSRAPCSSTPGSGAPRPWARSPGTPPCAPWAPDSGSSRAPMLIAWKTRG

SEQ ID NO: 5774 - DNA, 1399 bp, Zea mays subsp. mays
  misc_feature (1)..(1399): Ceres Seq. ID no. 12349156
  misc_feature: MA Experiment ID: 20000492 Result: Up-regulated in Transcription
  misc_feature: MA Experiment 20000492 PARAMETER Experiment Name: Zm_Hybrid_Seed_Dev_P Parameter: DAP Value: 12
  misc_feature: MA Experiment 20000492 PARAMETER Experiment Name: Zm_Hybrid_Seed_Dev_P Parameter: Organism Value: Zea mays
  misc_feature: MA Experiment 20000492 PARAMETER Experiment Name: Zm_Hybrid_Seed_Dev_P Parameter: Plant Line Value: 35A19
  misc_feature: MA Experiment 20000492 PARAMETER Experiment Name: Zm_Hybrid_Seed_Dev_P Parameter: Tissue Value: Fert Kernel vs. Unfert Floret
acccgattcaaacggtttcaaaagcgcgaccccaccgcagcccgcagggtccacggctctcgtttccgcccgcgccacccgccatgtcgtccccgccgcgggggcagcccgccaccgccgccgtgccggcggtcgcggccgccacgtccccgcagttgcctgcggcgtcccacacgctcccccgcgcgttcctcgccacatcctctccccgtgccatagtggcagcaccggcgcccccgctattcaccggtcggccgctgaaccctaacccaccggcccacggctcctccgtgccccacggcatcctctaccccgtcctgaaatccgcctccacgtccaactccgcggccgcggccgtgacagcgcagctccgccgcgttcctcccatggccgtggggtaccctcggacccacgccgtcgccatccctattgcacagcagcagcagcccctggtgcacgcgcaaccccggtccttcgcggccgtgcctcgggcccttgtgactggcgtgtcgacggggtccgaacagcctccccgaggagttcctataggctcgcagcccaaggttaatccagtaccacctgttggcccatccaatgagcagagtaacccaaaagacagggaaaagagcagagaagaacctacagttgtggtgattaatgaccgcaaagttaacctgctggatagtgagtcgggatccttttatgctctctgtcgatcttgggttcgtaatggtgttccacatgaaagtcagccaagctttggaaatggtgaaccacttcttccaagacctttgcctgcttcagttgtagattctagaatatcagacaaggacgataatgatgttgcaggtgaagattcagatgaagagccacagaagaatgccaacggtgaatacaatacaagtgatttattgaagcagcatgtaaagcgtgcgaaaaggatacgtgctgggttgcaaaaggatcggcttcgtcggattgaaagatacaagcaacgccttgcacttcttttgtagaatcggcctgtgactgtataaagctgaaaccataggtgtttgtcttgcaggttttaacttccgtattggaatttgttaagatgttttattgactagcattgtatgttaggaccatctggatgttttattgccaacgttatctaataaaatgtgaaaaagcctttagctaagttggttggatgatctgagtagcactattaaagttttgagtatggtgccactgtgcatgggtgagacaaaggttcgaagttcgaaggttttctcgagctgcatgagaagatcttaaatgtaatgtaggtcttcttaaaggtaatgccgttgaggtggtcttaccatatatgtggattttttttatctagtgaaatgaaactgaaatcatagtc

SEQ ID NO: 5775 - protein, 337 aa, Zea mays subsp. mays
  peptide (1)..(337): Ceres Seq. ID no. 12349157
  misc_feature (10)..(204): Pfam Name: Atrophin-1 family Pfam Description: Atrophin-1 family
  misc_feature (5)..(337): Homolog of NCBI NO: 30685461 NR Description: proline-rich protein family [Arabidopsis >gi|26450185|dbj|BAC42211.1| unknown protein [Arabidopsis >gi|28827576|gb|AAO50632.1| unknown protein [Arabidopsis
  misc_feature (5)..(337): Homolog of NCBI NO: 7487298 NR Description: hypothetical protein At2g32840 [imported] - thaliana >gi|2702278|gb|AAB91981.1| hypothetical protein thaliana] >gi|20197061|gb|AAM14901.1| hypothetical protein
  misc_feature (13)..(337): Homolog of NCBI NO: 18390456 NR Description: expressed protein; protein id: At1g04930.1, by cDNA: 154031. [Arabidopsis thaliana] >gi|25372785|pir||G86182
  misc_feature (148)..(337): Homolog of NCBI NO: 20466692 NR Description: unknown protein [Arabidopsis thaliana]
PIQTVSKARPHRSPQGPRLSFPPAPPAMSSPPRGQPATAAVPAVAAATSPQLPAASHTLPRAFLATSSPRAIVAAPAPPLFTGRPLNPNPPAHGSSVPHGILYPVLKSASTSNSAAAAVTAQLRRVPPMAVGYPRTHAVAIPIAQQQQPLVHAQPRSFAAVPRALVTGVSTGSEQPPRGVPIGSQPKVNPVPPVGPSNEQSNPKDREKSREEPTVVVINDRKVNLLDSESGSFYALCRSWVRNGVPHESQPSFGNGEPLLPRPLPASVVDSRISDKDDNDVAGEDSDEEPQKNANGEYNTSDLLKQHVKRAKRIRAGLQKDRLRRIERYKQRLALLL

SEQ ID NO: 5776 - protein, 310 aa, Zea mays subsp. mays
  peptide (1)..(310): Ceres Seq. ID no. 12349158
  misc_feature (1)..(177): Pfam Name: Atrophin-1 family Pfam Description: Atrophin-1 family
  misc_feature (1)..(310): Homolog of NCBI NO: 30685461 NR Description: proline-rich protein family [Arabidopsis >gi|26450185|dbj|BAC42211.1| unknown protein [Arabidopsis >gi|28827576|gb|AAO50632.1| unknown protein [Arabidopsis
  misc_feature (1)..(310): Homolog of NCBI NO: 7487298 NR Description: hypothetical protein At2g32840 [imported] - thaliana >gi|2702278|gb|AAB91981.1| hypothetical protein thaliana] >gi|20197061|gb|AAM14901.1| hypothetical protein
  misc_feature (1)..(310): Homolog of NCBI NO: 18390456 NR Description: expressed protein; protein id: At1g04930.1, by cDNA: 154031. [Arabidopsis thaliana] >gi|25372785|pir||G86182
  misc_feature (121)..(310): Homolog of NCBI NO: 20466692 NR Description: unknown protein [Arabidopsis thaliana]
MSSPPRGQPATAAVPAVAAATSPQLPAASHTLPRAFLATSSPRAIVAAPAPPLFTGRPLNPNPPAHGSSVPHGILYPVLKSASTSNSAAAAVTAQLRRVPPMAVGYPRTHAVAIPIAQQQQPLVHAQPRSFAAVPRALVTGVSTGSEQPPRGVPIGSQPKVNPVPPVGPSNEQSNPKDREKSREEPTVVVINDRKVNLLDSESGSFYALCRSWVRNGVPHESQPSFGNGEPLLPRPLPASVVDSRISDKDDNDVAGEDSDEEPQKNANGEYNTSDLLKQHVKRAKRIRAGLQKDRLRRIERYKQRLALLL

SEQ ID NO: 5777 - protein, 209 aa, Zea mays subsp. mays
  peptide (1)..(209): Ceres Seq. ID no. 12349159
  misc_feature (1)..(76): Pfam Name: Atrophin-1 family Pfam Description: Atrophin-1 family
  misc_feature (1)..(209): Homolog of NCBI NO: 30685461 NR Description: proline-rich protein family [Arabidopsis >gi|26450185|dbj|BAC42211.1| unknown protein [Arabidopsis >gi|28827576|gb|AAO50632.1| unknown protein [Arabidopsis
  misc_feature (1)..(209): Homolog of NCBI NO: 7487298 NR Description: hypothetical protein At2g32840 [imported] - thaliana >gi|2702278|gb|AAB91981.1| hypothetical protein thaliana] >gi|20197061|gb|AAM14901.1| hypothetical protein
  misc_feature (1)..(209): Homolog of NCBI NO: 18390456 NR Description: expressed protein; protein id: At1g04930.1, by cDNA: 154031. [Arabidopsis thaliana] >gi|25372785|pir||G86182
  misc_feature (20)..(209): Homolog of NCBI NO: 20466692 NR Description: unknown protein [Arabidopsis thaliana]
MAVGYPRTHAVAIPIAQQQQPLVHAQPRSFAAVPRALVTGVSTGSEQPPRGVPIGSQPKVNPVPPVGPSNEQSNPKDREKSREEPTVVVINDRKVNLLDSESGSFYALCRSWVRNGVPHESQPSFGNGEPLLPRPLPASVVDSRISDKDDNDVAGEDSDEEPQKNANGEYNTSDLLKQHVKRAKRIRAGLQKDRLRRIERYKQRLALLL

SEQ ID NO: 5778 - DNA, 1177 bp, Zea mays subsp. mays
  misc_feature (1)..(1177): Ceres Seq. ID no. 12406908
  misc_feature: MA Experiment ID: 108523 Result: Down-regulated in Transcription
  misc_feature: MA Experiment 108523 PARAMETER Experiment Name: Zm_42deg_Heat_P Parameter: Age (day) Value: 8
  misc_feature: MA Experiment 108523 PARAMETER Experiment Name: Zm_42deg_Heat_P Parameter: Organism Value: Zea mays
  misc_feature: MA Experiment 108523 PARAMETER Experiment Name: Zm_42deg_Heat_P Parameter: Plant Line Value: 35A19
  misc_feature: MA Experiment 108523 PARAMETER Experiment Name: Zm_42deg_Heat_P Parameter: Temperature (deg C) Value: 42 vs. 22
  misc_feature: MA Experiment 108523 PARAMETER Experiment Name: Zm_42deg_Heat_P Parameter: Timepoint (hr) Value: 6
  misc_feature: MA Experiment 108523 PARAMETER Experiment Name: Zm_42deg_Heat_P Parameter: Tissue Value: Aerial
  misc_feature: MA Experiment ID: 108528 Result: Up-regulated in Transcription
  misc_feature: MA Experiment 108528 PARAMETER Experiment Name: Zm_Imbibed_Seeds_P Parameter: Age (day) Value: 5 vs. 2
  misc_feature: MA Experiment 108528 PARAMETER Experiment Name: Zm_Imbibed_Seeds_P Parameter: Organism Value: Zea mays
  misc_feature: MA Experiment 108528 PARAMETER Experiment Name: Zm_Imbibed_Seeds_P Parameter: Plant Line Value: 35A19
  misc_feature: MA Experiment 108528 PARAMETER Experiment Name: Zm_Imbibed_Seeds_P Parameter: Tissue Value: Aerial vs. Embryo
  misc_feature: MA Experiment ID: 108529 Result: Up-regulated in Transcription
  misc_feature: MA Experiment 108529 PARAMETER Experiment Name: Zm_Imbibed_Seeds_P Parameter: Age (day) Value: 5 vs. 2
  misc_feature: MA Experiment 108529 PARAMETER Experiment Name: Zm_Imbibed_Seeds_P Parameter: Organism Value: Zea mays
  misc_feature: MA Experiment 108529 PARAMETER Experiment Name: Zm_Imbibed_Seeds_P Parameter: Plant Line Value: 35A19
  misc_feature: MA Experiment 108529 PARAMETER Experiment Name: Zm_Imbibed_Seeds_P Parameter: Tissue Value: Roots vs. Embryo
  misc_feature: MA Experiment ID: 108530 Result: Up-regulated in Transcription
  misc_feature: MA Experiment 108530 PARAMETER Experiment Name: Zm_Imbibed_Seeds_P Parameter: Age (day) Value: 6 vs. 2
  misc_feature: MA Experiment 108530 PARAMETER Experiment Name: Zm_Imbibed_Seeds_P Parameter: Organism Value: Zea mays
  misc_feature: MA Experiment 108530 PARAMETER Experiment Name: Zm_Imbibed_Seeds_P Parameter: Plant Line Value: 35A19
  misc_feature: MA Experiment 108530 PARAMETER Experiment Name: Zm_Imbibed_Seeds_P Parameter: Tissue Value: Aerial vs. Embryo
  misc_feature: MA Experiment ID: 108534 Result: Up-regulated in Transcription
  misc_feature: MA Experiment 108534 PARAMETER Experiment Name: Zm_4deg_Cold_P Parameter: Age (hr) Value: 8
  misc_feature: MA Experiment 108534 PARAMETER Experiment Name: Zm_4deg_Cold_P Parameter: Organism Value: Zea mays
  misc_feature: MA Experiment 108534 PARAMETER Experiment Name: Zm_4deg_Cold_P Parameter: Plant Line Value: 35A19
  misc_feature: MA Experiment 108534 PARAMETER Experiment Name: Zm_4deg_Cold_P Parameter: Temperature (deg C) Value: 4 vs. 22
  misc_feature: MA Experiment 108534 PARAMETER Experiment Name: Zm_4deg_Cold_P Parameter: Timepoint (hr) Value: 6
  misc_feature: MA Experiment 108534 PARAMETER Experiment Name: Zm_4deg_Cold_P Parameter: Tissue Value: Aerial
  misc_feature: MA Experiment ID: 108536 Result: Down-regulated in Transcription
  misc_feature: MA Experiment 108536 PARAMETER Experiment Name: Zm_Meristem_P Parameter: Age (day) Value: 8
  misc_feature: MA Experiment 108536 PARAMETER Experiment Name: Zm_Meristem_P Parameter: Organism Value: Zea mays
  misc_feature: MA Experiment 108536 PARAMETER Experiment Name: Zm_Meristem_P Parameter: Plant Line Value: 35A19
  misc_feature: MA Experiment 108536 PARAMETER Experiment Name: Zm_Meristem_P Parameter: Tissue Value: Shoot Meristem vs. Above Shoot Meristem
  misc_feature: MA Experiment ID: 108545 Result: Up-regulated in Transcription
  misc_feature: MA Experiment 108545 PARAMETER Experiment Name: Zm_Imbibed_Seeds_P Parameter: Age (day) Value: 3 vs. 2
  misc_feature: MA Experiment 108545 PARAMETER Experiment Name: Zm_Imbibed_Seeds_P Parameter: Organism Value: Zea mays
  misc_feature: MA Experiment 108545 PARAMETER Experiment Name: Zm_Imbibed_Seeds_P Parameter: Plant Line Value: 35A19
  misc_feature: MA Experiment 108545 PARAMETER Experiment Name: Zm_Imbibed_Seeds_P Parameter: Tissue Value: Aerial vs. Embryo
  misc_feature: MA Experiment ID: 108547 Result: Up-regulated in Transcription
  misc_feature: MA Experiment 108547 PARAMETER Experiment Name: Zm_Imbibed_Seeds_P Parameter: Age (day) Value: 4 vs. 2
  misc_feature: MA Experiment 108547 PARAMETER Experiment Name: Zm_Imbibed_Seeds_P Parameter: Organism Value: Zea mays
  misc_feature: MA Experiment 108547 PARAMETER Experiment Name: Zm_Imbibed_Seeds_P Parameter: Plant Line Value: 35A19
  misc_feature: MA Experiment 108547 PARAMETER Experiment Name: Zm_Imbibed_Seeds_P Parameter: Tissue Value: Aerial vs. Embryo
  misc_feature: MA Experiment ID: 108687 Result: Down-regulated in Transcription
  misc_feature: MA Experiment 108687 PARAMETER Experiment Name: Zm_Embryos-Flowers__P Parameter: Tissue Value: Embryo vs. Aerial+
  misc_feature: MA Experiment ID: 108688 Result: Down-regulated in Transcription
  misc_feature: MA Experiment 108688 PARAMETER Experiment Name: Zm_Embryos-Flowers__P Parameter: Tissue Value: Immature Flowers vs. Aerial+
gcaacagacccccgcccacgaccacacgcaggcagcaagcagcagccgcgcgctcgcctaggactaccgactacgagtagtgctcagctagcctccatcctcagcgcgcgagtggctgctgcgcattcctctctttatccgtctctgtgcttgtttaatttgtgttcgttcgtgagtaggcggcccggcacatatggcagcgcagtccatgctcatgtcgaccagcgtcaacggcggccgcgcgctgccgtctcttcaggccgtccggccgggctccatacccgcggctaccgctgccgtcgtcgtcatcctcgtcaggctacaggcactccaagtccgtctccgtgaagacgctcgccctgttcggcaaatccaaggtcaagaccgcgccggcgaagaaggctgctgcgcccaagcccaagccgaaggttgaggatggtatcttcggcacgtccggcgggatcggtttcaccaaggagaacgagctgttcgtcggccgcgttgccatgcttggctttgccgcatcgctacttggagaggccattaccgggaagggcatccttgcccagctgaacctcgagacgggcatccccatctacgaggcggagcctctcctcctgttcttcatcctcttcaccctccttggcgccatcggcgctctcggggaccgcggccgcttcgtcgacgaggaggtcaccggcctcgacaaggccgtcatccaacctggcaagggcttccgcggcgccctcggcctcagcgagggagggccgctgttcgggttcaccaagtcgaacgagctgttcgtggggcggatggcgcagctgggcgtggccttctccatcatcggcgagatcatcacggggaagggcgcgctggcgcagctcaacatcgagacgggggtgcccatcaacgagatagagccgctcgtcatcttcaacgtcctcttcttcttcatcgccgccatcaaccccggcaatggcaggttcatcatcggcgaggaagaggaataggctgctggcctcggacatgagtcgtgtgcgtttacctttacctgtgactgtgagtgatcgatcgattgctgtgtatcaattactcgtgatgagacctcgaaggtagggtgtcgcgttgggttgtctgcttgtagaaacaagagcttatatataaattactactagct

SEQ ID NO: 5779 - protein, 167 aa, Zea mays subsp. mays
  peptide (1)..(167): Ceres Seq. ID no. 12406909
  misc_feature (1)..(116): Pfam Name: Chlorophyll A-B binding protein Pfam Description: Chlorophyll A-B binding protein
  misc_feature (1)..(167): Homolog of NCBI NO: 34908652 NR Description: putative photosystem II subunit (22KDa) precursor
  misc_feature (1)..(167): Homolog of NCBI NO: 18202913 NR Description: Photosystem II 22 kDa protein, chloroplast (CP22) >gi|12082782|gb|AAG48610.1|AF311720_1 photosystem II 22
  misc_feature (1)..(167): Homolog of NCBI NO: 1709846 NR Description: Photosystem II 22 kDa protein, chloroplast
  misc_feature (1)..(167): Homolog of NCBI NO: 18203444 NR Description: Photosystem II 22 kDa protein, chloroplast (CP22) >gi|6103011|emb|CAA59007.1| precursor of photosystem II
  misc_feature (1)..(167): Homolog of NCBI NO: 400890 NR Description: Photosystem II 22 kDa protein, chloroplast
  misc_feature (1)..(167): Homolog of NCBI NO: 38345525 NR Description: OSJNBa0039K24.28 [Oryza sativa (japonica
  misc_feature (1)..(167): Homolog of NCBI NO: 15219418 NR Description: photosystem II 22kDa protein, putative; protein At1g44575.1, supported by cDNA: gi_15294225, supported by cDNA: [Arabidopsis thaliana] >gi|17380270|sp|Q9XF91|PSBS_ARATH
  misc_feature (1)..(167): Homolog of NCBI NO: 15294226 NR Description: unknown protein [Arabidopsis thaliana]
  misc_feature (1)..(167): Homolog of NCBI NO: 7489520 NR Description: photosystem II 22-K chlorophyll-binding protein - >gi|1304215|dbj|BAA12337.1| 22 kDa protein of photosystem II
  misc_feature (14)..(167): Homolog of NCBI NO: 6006279 NR Description: photosystem II 22 kDa protein [Arabidopsis
MLGFAASLLGEAITGKGILAQLNLETGIPIYEAEPLLLFFILFTLLGAIGALGDRGRFVDEEVTGLDKAVIQPGKGFRGALGLSEGGPLFGFTKSNELFVGRMAQLGVAFSIIGEIITGKGALAQLNIETGVPINEIEPLVIFNVLFFFIAAINPGNGRFIIGEEEE

SEQ ID NO: 5780 - protein, 115 aa, Zea mays subsp. mays
  peptide (1)..(115): Ceres Seq. ID no. 12406910
  misc_feature (8)..(115): Homolog of NCBI NO: 13592175 NR Description: ppg3 [Leishmania major]
  misc_feature (8)..(115): Homolog of NCBI NO: 13592175 NR Description: ppg3 [Leishmania major]
  misc_feature (8)..(115): Homolog of NCBI NO: 13592175 NR Description: ppg3 [Leishmania major]
  misc_feature (8)..(115): Homolog of NCBI NO: 13592175 NR Description: ppg3 [Leishmania major]
  misc_feature (8)..(115): Homolog of NCBI NO: 13592175 NR Description: ppg3 [Leishmania major]
  misc_feature (8)..(115): Homolog of NCBI NO: 13592175 NR Description: ppg3 [Leishmania major]
  misc_feature (23)..(115): Homolog of NCBI NO: 13592175 NR Description: ppg3 [Leishmania major]
  misc_feature (79)..(115): Homolog of NCBI NO: 5420387 NR Description: proteophosphoglycan [Leishmania major]
  misc_feature (79)..(115): Homolog of NCBI NO: 13592175 NR Description: ppg3 [Leishmania major]
  misc_feature (73)..(115): Homolog of NCBI NO: 25143299 NR Description: pre-mRNA splicing SR protein related RSR-1 (68.2
ATDPRPRPHAGSKQQPRARLGLPTTSSAQLASILSARVAAAHSSLYPSLCLFNLCSFVSRRPGTYGSAVHAHVDQRQRRPRAAVSSGRPAGLHTRGYRCRRRHPRQATGTPSPSP

SEQ ID NO: 5781 - DNA, 1764 bp, Zea mays subsp. mays
  misc_feature (1)..(1764): Ceres Seq. ID no. 12349967
  misc_feature: MA Experiment ID: 108523 Result: Down-regulated in Transcription
  misc_feature: MA Experiment 108523 PARAMETER Experiment Name: Zm_42deg_Heat_P Parameter: Age (day) Value: 8
  misc_feature: MA Experiment 108523 PARAMETER Experiment Name: Zm_42deg_Heat_P Parameter: Organism Value: Zea mays
  misc_feature: MA Experiment 108523 PARAMETER Experiment Name: Zm_42deg_Heat_P Parameter: Plant Line Value: 35A19
  misc_feature: MA Experiment 108523 PARAMETER Experiment Name: Zm_42deg_Heat_P Parameter: Temperature (deg C) Value: 42 vs. 22
  misc_feature: MA Experiment 108523 PARAMETER Experiment Name: Zm_42deg_Heat_P Parameter: Timepoint (hr) Value: 6
  misc_feature: MA Experiment 108523 PARAMETER Experiment Name: Zm_42deg_Heat_P Parameter: Tissue Value: Aerial
  misc_feature: MA Experiment ID: 108529 Result: Down-regulated in Transcription
  misc_feature: MA Experiment 108529 PARAMETER Experiment Name: Zm_Imbibed_Seeds_P Parameter: Age (day) Value: 5 vs. 2
  misc_feature: MA Experiment 108529 PARAMETER Experiment Name: Zm_Imbibed_Seeds_P Parameter: Organism Value: Zea mays
  misc_feature: MA Experiment 108529 PARAMETER Experiment Name: Zm_Imbibed_Seeds_P Parameter: Plant Line Value: 35A19
  misc_feature: MA Experiment 108529 PARAMETER Experiment Name: Zm_Imbibed_Seeds_P Parameter: Tissue Value: Roots vs. Embryo
  misc_feature: MA Experiment ID: 108535 Result: Up-regulated in Transcription
  misc_feature: MA Experiment 108535 PARAMETER Experiment Name: Zm_Meristem_P Parameter: Age (day) Value: 8
  misc_feature: MA Experiment 108535 PARAMETER Experiment Name: Zm_Meristem_P Parameter: Organism Value: Zea mays
  misc_feature: MA Experiment 108535 PARAMETER Experiment Name: Zm_Meristem_P Parameter: Plant Line Value: 35A19
  misc_feature: MA Experiment 108535 PARAMETER Experiment Name: Zm_Meristem_P Parameter: Tissue Value: Root Meristem vs. Above Root Meristem
  misc_feature: MA Experiment ID: 108545 Result: Up-regulated in Transcription
  misc_feature: MA Experiment 108545 PARAMETER Experiment Name: Zm_Imbibed_Seeds_P Parameter: Age (day) Value: 3 vs. 2
  misc_feature: MA Experiment 108545 PARAMETER Experiment Name: Zm_Imbibed_Seeds_P Parameter: Organism Value: Zea mays
  misc_feature: MA Experiment 108545 PARAMETER Experiment Name: Zm_Imbibed_Seeds_P Parameter: Plant Line Value: 35A19
  misc_feature: MA Experiment 108545 PARAMETER Experiment Name: Zm_Imbibed_Seeds_P Parameter: Tissue Value: Aerial vs. Embryo
  misc_feature: MA Experiment ID: 108546 Result: Down-regulated in Transcription
  misc_feature: MA Experiment 108546 PARAMETER Experiment Name: Zm_Imbibed_Seeds_P Parameter: Age (day) Value: 3 vs. 2
  misc_feature: MA Experiment 108546 PARAMETER Experiment Name: Zm_Imbibed_Seeds_P Parameter: Organism Value: Zea mays
  misc_feature: MA Experiment 108546 PARAMETER Experiment Name: Zm_Imbibed_Seeds_P Parameter: Plant Line Value: 35A19
  misc_feature: MA Experiment 108546 PARAMETER Experiment Name: Zm_Imbibed_Seeds_P Parameter: Tissue Value: Roots vs. Embryo
  misc_feature: MA Experiment ID: 108556 Result: Down-regulated in Transcription
  misc_feature: MA Experiment 108556 PARAMETER Experiment Name: Zm_Drought_P Parameter: Age (day) Value: 9
  misc_feature: MA Experiment 108556 PARAMETER Experiment Name: Zm_Drought_P Parameter: Organism Value: Zea mays
  misc_feature: MA Experiment 108556 PARAMETER Experiment Name: Zm_Drought_P Parameter: Plant Line Value: 35A19
  misc_feature: MA Experiment 108556 PARAMETER Experiment Name: Zm_Drought_P Parameter: Timepoint (hr) Value: 24
  misc_feature: MA Experiment 108556 PARAMETER Experiment Name: Zm_Drought_P Parameter: Tissue Value: Aerial
  misc_feature: MA Experiment 108556 PARAMETER Experiment Name: Zm_Drought_P Parameter: Treatment Value: Drought vs. No Drought
  misc_feature: MA Experiment ID: 108597 Result: Down-regulated in Transcription
  misc_feature: MA Experiment 108597 PARAMETER Experiment Name: Zm_100uM_ABA_P Parameter: Age (day) Value: 9
  misc_feature: MA Experiment 108597 PARAMETER Experiment Name: Zm_100uM_ABA_P Parameter: Organism Value: Zea mays
  misc_feature: MA Experiment 108597 PARAMETER Experiment Name: Zm_100uM_ABA_P Parameter: Plant Line Value: 35A19
  misc_feature: MA Experiment 108597 PARAMETER Experiment Name: Zm_100uM_ABA_P Parameter: Timepoint (hr) Value: 24
  misc_feature: MA Experiment 108597 PARAMETER Experiment Name: Zm_100uM_ABA_P Parameter: Tissue Value: Aerial
  misc_feature: MA Experiment 108597 PARAMETER Experiment Name: Zm_100uM_ABA_P Parameter: Treatment Value: 100uM ABA vs. No Treatment
  misc_feature: MA Experiment ID: 20000477 Result: Down-regulated in Transcription
  misc_feature: MA Experiment 20000477 PARAMETER Experiment Name: Zm_5mM_SA_P Parameter: Age (day) Value: 10
  misc_feature: MA Experiment 20000477 PARAMETER Experiment Name: Zm_5mM_SA_P Parameter: Organism Value: Zea mays
  misc_feature: MA Experiment 20000477 PARAMETER Experiment Name: Zm_5mM_SA_P Parameter: Plant Line Value: 35A19
  misc_feature: MA Experiment 20000477 PARAMETER Experiment Name: Zm_5mM_SA_P Parameter: Timepoint (hr) Value: 48
  misc_feature: MA Experiment 20000477 PARAMETER Experiment Name: Zm_5mM_SA_P Parameter: Tissue Value: Aerial
  misc_feature: MA Experiment 20000477 PARAMETER Experiment Name: Zm_5mM_SA_P Parameter: Treatment Value: 5mM SA vs. No Treatment
  misc_feature: MA Experiment ID: 20000478 Result: Down-regulated in Transcription
  misc_feature: MA Experiment 20000478 PARAMETER Experiment Name: Zm_5mM_SA_P Parameter: Age (day) Value: 11
  misc_feature: MA Experiment 20000478 PARAMETER Experiment Name: Zm_5mM_SA_P Parameter: Organism Value: Zea mays
  misc_feature: MA Experiment 20000478 PARAMETER Experiment Name: Zm_5mM_SA_P Parameter: Plant Line Value: 35A19
  misc_feature: MA Experiment 20000478 PARAMETER Experiment Name: Zm_5mM_SA_P Parameter: Timepoint (hr) Value: 72
  misc_feature: MA Experiment 20000478 PARAMETER Experiment Name: Zm_5mM_SA_P Parameter: Tissue Value: Aerial
  misc_feature: MA Experiment 20000478 PARAMETER Experiment Name: Zm_5mM_SA_P Parameter: Treatment Value: 5mM SA vs. No Treatment
  misc_feature: MA Experiment ID: 20000479 Result: Down-regulated in Transcription
  misc_feature: MA Experiment 20000479 PARAMETER Experiment Name: Zm_Drought_P Parameter: Age (day) Value: 10
  misc_feature: MA Experiment 20000479 PARAMETER Experiment Name: Zm_Drought_P Parameter: Organism Value: Zea mays
  misc_feature: MA Experiment 20000479 PARAMETER Experiment Name: Zm_Drought_P Parameter: Plant Line Value: 35A19
  misc_feature: MA Experiment 20000479 PARAMETER Experiment Name: Zm_Drought_P Parameter: Timepoint (hr) Value: 48
  misc_feature: MA Experiment 20000479 PARAMETER Experiment Name: Zm_Drought_P Parameter: Tissue Value: Aerial
  misc_feature: MA Experiment 20000479 PARAMETER Experiment Name: Zm_Drought_P Parameter: Treatment Value: Drought vs. No Drought
  misc_feature: MA Experiment ID: 20000480 Result: Down-regulated in Transcription
  misc_feature: MA Experiment 20000480 PARAMETER Experiment Name: Zm_Drought_P Parameter: Age (day) Value: 11
  misc_feature: MA Experiment 20000480 PARAMETER Experiment Name: Zm_Drought_P Parameter: Organism Value: Zea mays
  misc_feature: MA Experiment 20000480 PARAMETER Experiment Name: Zm_Drought_P Parameter: Plant Line Value: 35A19
  misc_feature: MA Experiment 20000480 PARAMETER Experiment Name: Zm_Drought_P Parameter: Timepoint (hr) Value: 72
  misc_feature: MA Experiment 20000480 PARAMETER Experiment Name: Zm_Drought_P Parameter: Tissue Value: Aerial
  misc_feature: MA Experiment 20000480 PARAMETER Experiment Name: Zm_Drought_P Parameter: Treatment Value: Drought vs. No Drought
  misc_feature: MA Experiment ID: 20000487 Result: Down-regulated in Transcription
  misc_feature: MA Experiment 20000487 PARAMETER Experiment Name: Zm_50mM_NH4NO3_L_to_H_P Parameter: Organism Value: Zea mays
  misc_feature: MA Experiment 20000487 PARAMETER Experiment Name: Zm_50mM_NH4NO3_L_to_H_P Parameter: Timepoint (hr) Value: 4
  misc_feature: MA Experiment 20000487 PARAMETER Experiment Name: Zm_50mM_NH4NO3_L_to_H_P Parameter: Tissue Value: Leaves
  misc_feature: MA Experiment 20000487 PARAMETER Experiment Name: Zm_50mM_NH4NO3_L_to_H_P Parameter: Treatment Value: 50mM NH4NO3 vs. 100mM Mannitol
  misc_feature: MA Experiment ID: 20000488 Result: Down-regulated in Transcription
  misc_feature: MA Experiment 20000488 PARAMETER Experiment Name: Zm_50mM_NH4NO3_L_to_H_P Parameter: Organism Value: Zea mays
  misc_feature: MA Experiment 20000488 PARAMETER Experiment Name: Zm_50mM_NH4NO3_L_to_H_P Parameter: Timepoint (hr) Value: 8
  misc_feature: MA Experiment 20000488 PARAMETER Experiment Name: Zm_50mM_NH4NO3_L_to_H_P Parameter: Tissue Value: Leaves
  misc_feature: MA Experiment 20000488 PARAMETER Experiment Name: Zm_50mM_NH4NO3_L_to_H_P Parameter: Treatment Value: 50mM NH4NO3 vs. 100mM Mannitol
  misc_feature: MA Experiment ID: 20000532 Result: Down-regulated in Transcription
  misc_feature: MA Experiment 20000532 PARAMETER Experiment Name: Zm_0.001percent_MeJA_P Parameter: Age (day) Value: 10
  misc_feature: MA Experiment 20000532 PARAMETER Experiment Name: Zm_0.001percent_MeJA_P Parameter: Organism Value: Zea mays
  misc_feature: MA Experiment 20000532 PARAMETER Experiment Name: Zm_0.001percent_MeJA_P Parameter: Plant Line Value: 35A19
  misc_feature: MA Experiment 20000532 PARAMETER Experiment Name: Zm_0.001percent_MeJA_P Parameter: Timepoint (hr) Value: 48
  misc_feature: MA Experiment 20000532 PARAMETER Experiment Name: Zm_0.001percent_MeJA_P Parameter: Tissue Value: Aerial
  misc_feature: MA Experiment 20000532 PARAMETER Experiment Name: Zm_0.001percent_MeJA_P Parameter: Treatment Value: 0.001percent MeJA vs. No Treatment
  misc_feature: MA Experiment ID: 20000535 Result: Up-regulated in Transcription
  misc_feature: MA Experiment 20000535 PARAMETER Experiment Name: Zm_Hybrid_Seed_Dev_P Parameter: DAP Value: 30 vs. 12
  misc_feature: MA Experiment 20000535 PARAMETER Experiment Name: Zm_Hybrid_Seed_Dev_P Parameter: Organism Value: Zea mays
  misc_feature: MA Experiment 20000535 PARAMETER Experiment Name: Zm_Hybrid_Seed_Dev_P Parameter: Plant Line Value: 35A19
  misc_feature: MA Experiment 20000535 PARAMETER Experiment Name: Zm_Hybrid_Seed_Dev_P Parameter: Tissue Value: Embryo vs. Unfert Floret
  misc_feature: MA Experiment ID: 20000626 Result: Down-regulated in Transcription
  misc_feature: MA Experiment 20000626 PARAMETER Experiment Name: Zm_Herbicide-Treatments_P Parameter: Timepoint (hr) Value: 12
  misc_feature: MA Experiment 20000626 PARAMETER Experiment Name: Zm_Herbicide-Treatments_P Parameter: Tissue Value: Aerial
  misc_feature: MA Experiment 20000626 PARAMETER Experiment Name: Zm_Herbicide-Treatments_P Parameter: Treatment Value: Roundup vs. No Treatment
accgcccagctgcaccctgcagcgctcactcgctcactgactcactcccctcccctggcctcctcctctctctctctctctccactctctcccacagccgaaccaacatgcaggggcgcagcagggacgccgccaccgtcgctgcagcggtggtgtgcgcagctgcgctgctcctcggcgacgcctggaccgtctcggcgcaggcggcggcggaggaggacaagataagcgccctgccggggcagccgccggtgggcttcgcacagtactccggttacatcccggtggacgccgcggggaagcgctccctcttctactacttcgccgaggcggaggcggatccggcggccaagccgctcgtgctctggctcaatggagggcctgggtgctcatccgtgggagtgggggcgttctcagagaatgggccgttcaggcctagcggcaatgcgctgacgaggaacgagtacagctggaacaaagaggccaatatgctgtatctggagagccctgcaggggttggcttttcatactccactgatcctgccttctacgagggtgttggtgacagcatgacagccagagacaacttgaagttcttgcaaggctggttcgccaggttccctcagtacaagggcagggacctgtatatcacaggagagagctacgctggccactacgttccacagttagcccagcgcatggttgagttcaacaagaaggagaagctattcaacctgaaaggcattgctcttggcaaccctgtgctggagttctcgaccgacttcaactcgcgggcggagttcttctggtcgcacggcctgatatcggactccacctacaacatcttcacgacggtgtgcaactactcgcggtacgtgagcgagtactaccgcggctccctgagcacggcctgcgacagggtgatgagccaggtggcgagggagacgagccggttcgtcgacaagtacgacgtcaccctggacgtctgcatctcgtcggtgctcatgcagtcccaggtcctcgtccctcagcaagggagcagggagctggacgtgtgcgtggaggacgagacgatgcggtacctgaaccggaaggacgtgcagcaggccatgcacgcgcgcctcgacggcgtgcagaggtggacggtctgcagcagcgttctggagtacaagcagctggacctccagatcccgaccgtgaacaccgtgggcgcgctcgtgaaggcgggcatccccgcgctggtgtacagcggcgaccaggactcggtgatcccgctgacgggcagcaggacgctggtggggcggctggcggccaggctccggctcaactccacggcgccgtaccgtgcctggttccaggggaagcaggtgggcgggtggacgcaggtgttcggcggcggcgcgctgtccttcgccacggtgcgcggcgcgtcccacgaggcgcccttctcgcagcccgagcgctcgctcggcctcttcagggcgttcctcgccggacagcagctgccggaatcgttccagtgacgacggaacgtgcctcttccacgtctagtgtatgttcattgtaagcgtatgtacgtgcagctgaccgtctgtcgtcatcatccggccgctcgacactggcaaaacaacccaaatgggttcttctccaagtgtaatcaggacgaaaataatatcattggaacttggaagggatgagactgtgtgtcgtcggctttccatgttgtaggcttgtagtacaagtgtaatatgcatatgctggttc

SEQ ID NO: 5782 - protein, 506 aa, Zea mays subsp. mays
  peptide (1)..(506): Ceres Seq. ID no. 12349968
  misc_feature (79)..(498): Pfam Name: Serine carboxypeptidase Pfam Description: Serine carboxypeptidase
  misc_feature (49)..(502): Homolog of NCBI NO: 15224454 NR Description: putative serine carboxypeptidase II; protein id: [Arabidopsis thaliana] >gi|25289797|pir||D84503 probable serine
  misc_feature (48)..(506): Homolog of NCBI NO: 38347156 NR Description: OSJNBa0039C07.2 [Oryza sativa (japonica
  misc_feature (55)..(505): Homolog of NCBI NO: 25289785 NR Description: probable serine carboxypeptidase II [imported] - thaliana >gi|12322985|gb|AAG51475.1|AC069471_6 serine
  misc_feature (56)..(505): Homolog of NCBI NO: 25289793 NR Description: probable serine carboxypeptidase II [imported] - thaliana >gi|2459435|gb|AAB80670.1| putative serine
  misc_feature (48)..(504): Homolog of NCBI NO: 15238328 NR Description: serine carboxypeptidase II-like; protein id:
  misc_feature (64)..(502): Homolog of NCBI NO: 15238327 NR Description: serine carboxypeptidase-II like; protein id:
  misc_feature (66)..(502): Homolog of NCBI NO: 15218514 NR Description: serine carboxypeptidase II, putative; protein id:
  misc_feature (56)..(505): Homolog of NCBI NO: 30685740 NR Description: serine carboxypeptidase -related [Arabidopsis >gi|18377727|gb|AAL67013.1| putative serine carboxypeptidase II
  misc_feature (55)..(505): Homolog of NCBI NO: 18396647 NR Description: serine carboxypeptidase II, putative; protein id: supported by cDNA: gi_16648968 [Arabidopsis thaliana]
  misc_feature (49)..(336): Homolog of NCBI NO: 28393789 NR Description: putative serine carboxypeptidase II [Arabidopsis
RPAAPCSAHSLTDSLPSPGLLLSLSLSTLSHSRTNMQGRSRDAATVAAAVVCAAALLLGDAWTVSAQAAAEEDKISALPGQPPVGFAQYSGYIPVDAAGKRSLFYYFAEAEADPAAKPLVLWLNGGPGCSSVGVGAFSENGPFRPSGNALTRNEYSWNKEANMLYLESPAGVGFSYSTDPAFYEGVGDSMTARDNLKFLQGWFARFPQYKGRDLYITGESYAGHYVPQLAQRMVEFNKKEKLFNLKGIALGNPVLEFSTDFNSRAEFFWSHGLISDSTYNIFTTVCNYSRYVSEYYRGSLSTACDRVMSQVARETSRFVDKYDVTLDVCISSVLMQSQVLVPQQGSRELDVCVEDETMRYLNRKDVQQAMHARLDGVQRWTVCSSVLEYKQLDLQIPTVNTVGALVKAGIPALVYSGDQDSVIPLTGSRTLVGRLAARLRLNSTAPYRAWFQGKQVGGWTQVFGGGALSFATVRGASHEAPFSQPERSLGLFRAFLAGQQLPESFQ

SEQ ID NO: 5783 - protein, 471 aa, Zea mays subsp. mays
  peptide (1)..(471): Ceres Seq. ID no. 12349969
  misc_feature (44)..(463): Pfam Name: Serine carboxypeptidase Pfam Description: Serine carboxypeptidase
  misc_feature (13)..(471): Homolog of NCBI NO: 38347156 NR Description: OSJNBa0039C07.2 [Oryza sativa (japonica
  misc_feature (20)..(470): Homolog of NCBI NO: 18396647 NR Description: serine carboxypeptidase II, putative; protein id: supported by cDNA: gi_16648968 [Arabidopsis thaliana]
  misc_feature (20)..(470): Homolog of NCBI NO: 25289785 NR Description: probable serine carboxypeptidase II [imported] - thaliana >gi|12322985|gb|AAG51475.1|AC069471_6 serine
  misc_feature (21)..(470): Homolog of NCBI NO: 30685740 NR Description: serine carboxypeptidase -related [Arabidopsis >gi|18377727|gb|AAL67013.1| putative serine carboxypeptidase II
  misc_feature (21)..(470): Homolog of NCBI NO: 25289793 NR Description: probable serine carboxypeptidase II [imported] - thaliana >gi|2459435|gb|AAB80670.1| putative serine
  misc_feature (31)..(467): Homolog of NCBI NO: 15218514 NR Description: serine carboxypeptidase II, putative; protein id:
  misc_feature (13)..(469): Homolog of NCBI NO: 15238328 NR Description: serine carboxypeptidase II-like; protein id:
  misc_feature (29)..(467): Homolog of NCBI NO: 15238327 NR Description: serine carboxypeptidase-II like; protein id:
  misc_feature (14)..(467): Homolog of NCBI NO: 15224454 NR Description: putative serine carboxypeptidase II; protein id: [Arabidopsis thaliana] >gi|25289797|pir||D84503 probable serine
  misc_feature (14)..(301): Homolog of NCBI NO: 28393789 NR Description: putative serine carboxypeptidase II [Arabidopsis
MQGRSRDAATVAAAVVCAAALLLGDAWTVSAQAAAEEDKISALPGQPPVGFAQYSGYIPVDAAGKRSLFYYFAEAEADPAAKPLVLWLNGGPGCSSVGVGAFSENGPFRPSGNALTRNEYSWNKEANMLYLESPAGVGFSYSTDPAFYEGVGDSMTARDNLKFLQGWFARFPQYKGRDLYITGESYAGHYVPQLAQRMVEFNKKEKLFNLKGIALGNPVLEFSTDFNSRAEFFWSHGLISDSTYNIFTTVCNYSRYVSEYYRGSLSTACDRVMSQVARETSRFVDKYDVTLDVCISSVLMQSQVLVPQQGSRELDVCVEDETMRYLNRKDVQQAMHARLDGVQRWTVCSSVLEYKQLDLQIPTVNTVGALVKAGIPALVYSGDQDSVIPLTGSRTLVGRLAARLRLNSTAPYRAWFQGKQVGGWTQVFGGGALSFATVRGASHEAPFSQPERSLGLFRAFLAGQQLPESFQ

SEQ ID NO: 5784 - protein, 344 aa, Zea mays subsp. mays
  peptide (1)..(344): Ceres Seq. ID no. 12349970
  misc_feature (1)..(336): Pfam Name: Serine carboxypeptidase Pfam Description: Serine carboxypeptidase
  misc_feature (1)..(344): Homolog of NCBI NO: 38347156 NR Description: OSJNBa0039C07.2 [Oryza sativa (japonica
  misc_feature (1)..(343): Homolog of NCBI NO: 18396647 NR Description: serine carboxypeptidase II, putative; protein id: supported by cDNA: gi_16648968 [Arabidopsis thaliana]
  misc_feature (1)..(343): Homolog of NCBI NO: 25289785 NR Description: probable serine carboxypeptidase II [imported] - thaliana >gi|12322985|gb|AAG51475.1|AC069471_6 serine
  misc_feature (1)..(343): Homolog of NCBI NO: 30685740 NR Description: serine carboxypeptidase -related [Arabidopsis >gi|18377727|gb|AAL67013.1| putative serine carboxypeptidase II
  misc_feature (1)..(343): Homolog of NCBI NO: 25289793 NR Description: probable serine carboxypeptidase II [imported] - thaliana >gi|2459435|gb|AAB80670.1| putative serine
  misc_feature (1)..(340): Homolog of NCBI NO: 15218514 NR Description: serine carboxypeptidase II, putative; protein id:
  misc_feature (1)..(342): Homolog of NCBI NO: 15238328 NR Description: serine carboxypeptidase II-like; protein id:
  misc_feature (1)..(340): Homolog of NCBI NO: 15238327 NR Description: serine carboxypeptidase-II like; protein id:
  misc_feature (1)..(340): Homolog of NCBI NO: 15224454 NR Description: putative serine carboxypeptidase II; protein id: [Arabidopsis thaliana] >gi|25289797|pir||D84503 probable serine
  misc_feature (1)..(174): Homolog of NCBI NO: 28393789 NR Description: putative serine carboxypeptidase II [Arabidopsis
MLYLESPAGVGFSYSTDPAFYEGVGDSMTARDNLKFLQGWFARFPQYKGRDLYITGESYAGHYVPQLAQRMVEFNKKEKLFNLKGIALGNPVLEFSTDFNSRAEFFWSHGLISDSTYNIFTTVCNYSRYVSEYYRGSLSTACDRVMSQVARETSRFVDKYDVTLDVCISSVLMQSQVLVPQQGSRELDVCVEDETMRYLNRKDVQQAMHARLDGVQRWTVCSSVLEYKQLDLQIPTVNTVGALVKAGIPALVYSGDQDSVIPLTGSRTLVGRLAARLRLNSTAPYRAWFQGKQVGGWTQVFGGGALSFATVRGASHEAPFSQPERSLGLFRAFLAGQQLPESFQ

SEQ ID NO: 5785 - DNA, 1562 bp, Zea mays subsp. mays
  misc_feature (1)..(1562): Ceres Seq. ID no. 12405591
  misc_feature: MA Experiment ID: 108528 Result: Up-regulated in Transcription
  misc_feature: MA Experiment 108528 PARAMETER Experiment Name: Zm_Imbibed_Seeds_P Parameter: Age (day) Value: 5 vs. 2
  misc_feature: MA Experiment 108528 PARAMETER Experiment Name: Zm_Imbibed_Seeds_P Parameter: Organism Value: Zea mays
  misc_feature: MA Experiment 108528 PARAMETER Experiment Name: Zm_Imbibed_Seeds_P Parameter: Plant Line Value: 35A19
  misc_feature: MA Experiment 108528 PARAMETER Experiment Name: Zm_Imbibed_Seeds_P Parameter: Tissue Value: Aerial vs. Embryo
  misc_feature: MA Experiment ID: 108530 Result: Up-regulated in Transcription
  misc_feature: MA Experiment 108530 PARAMETER Experiment Name: Zm_Imbibed_Seeds_P Parameter: Age (day) Value: 6 vs. 2
  misc_feature: MA Experiment 108530 PARAMETER Experiment Name: Zm_Imbibed_Seeds_P Parameter: Organism Value: Zea mays
  misc_feature: MA Experiment 108530 PARAMETER Experiment Name: Zm_Imbibed_Seeds_P Parameter: Plant Line Value: 35A19
  misc_feature: MA Experiment 108530 PARAMETER Experiment Name: Zm_Imbibed_Seeds_P Parameter: Tissue Value: Aerial vs. Embryo
  misc_feature: MA Experiment ID: 108543 Result: Down-regulated in Transcription
  misc_feature: MA Experiment ID: 108689 Result: Up-regulated in Transcription
  misc_feature: MA Experiment 108689 PARAMETER Experiment Name: Zm_Drought_Roots_P Parameter: Age (day) Value: 9
  misc_feature: MA Experiment 108689 PARAMETER Experiment Name: Zm_Drought_Roots_P Parameter: Organism Value: Zea mays
  misc_feature: MA Experiment 108689 PARAMETER Experiment Name: Zm_Drought_Roots_P Parameter: Plant Line Value: 35A19
  misc_feature: MA Experiment 108689 PARAMETER Experiment Name: Zm_Drought_Roots_P Parameter: Timepoint (hr) Value: 24
  misc_feature: MA Experiment 108689 PARAMETER Experiment Name: Zm_Drought_Roots_P Parameter: Tissue Value: Roots
  misc_feature: MA Experiment 108689 PARAMETER Experiment Name: Zm_Drought_Roots_P Parameter: Treatment Value: Drought vs. No Drought
  misc_feature: MA Experiment ID: 20000492 Result: Down-regulated in Transcription
  misc_feature: MA Experiment 20000492 PARAMETER Experiment Name: Zm_Hybrid_Seed_Dev_P Parameter: DAP Value: 12
  misc_feature: MA Experiment 20000492 PARAMETER Experiment Name: Zm_Hybrid_Seed_Dev_P Parameter: Organism Value: Zea mays
  misc_feature: MA Experiment 20000492 PARAMETER Experiment Name: Zm_Hybrid_Seed_Dev_P Parameter: Plant Line Value: 35A19
  misc_feature: MA Experiment 20000492 PARAMETER Experiment Name: Zm_Hybrid_Seed_Dev_P Parameter: Tissue Value: Fert Kernel vs. Unfert Floret
gaatattatcaaaagaaaaaaaagatcgcagccgaaaggaaggggaaaaaaggaccaaataaacaatccactgtctcctacctccgcggaagcatcaaacaaatcaccctgccgatcgccatggacgaacagcaggcggaggagggcgaaagcgcgcgcgtcaagaggacgccggaggaggggtcgtcgccgctgtccgctctggcggatgacgtgctgctacagatcctgggacggctcgaggcggacccgcgggactgggcgcgggcctcctgcgcgtccccgcgcctcgccgctctgctccgggcggcctgcctcccgccgcgactgtcgcgggcgctccccgccgagctcctccccgcgccgtcaccggacggggcgcccgcggcctgggcggcgctccacaagctctccgtctgttgcccggggctcctccgcgccggggtgctcctcgagcccaccgacgatttcgggctcgatctcgacatcgggcctgacgtccccatctacgcccgcaccgacgcctcctccgccgaggggttcgaggccacggccacctcccgccacagcggaaccatcgtcgcggccgggagcgcgccccgcgccggcgaatctgccaacgtcgccgcgtggtcgctctacgacgacctgtacctggacgcggcatacgactgctcgtccgagctgcagatcccgcctgccgctgcggctgtggaacccgccccgcccgcgcccgtggcggcgatccgcgacgtggaggaagcaacgaccacaaatgctgtctcatgcggcgtcgcccggcgcggcgtggtggccgggagccgactgcatccgcggcggtggctgggcaccgtcggcgcgcacctggcatcggggtcctggacgctgagccgtgagcaggggaacaagctccttgccagccgcttccgcggcgaccggctatacctctgcgactggcccgggtgcgtgcacaaggaggagcgacgcaagtacatggtcttccgcggcgtgttccacaacttcgcccggtctcaggtccggcgcgcgctcagggacacgcgccgccccaccgtcgccatcgagtgcgccttctgcggctgcaaagagacctgggacctctactcggctttctgcctccgcagtttctacggctaccacgacgacggcgagcctgtggtgcgcgcctacgtctgcgagaacggccacgtcgcgggcgcctggaccgaccgcccactctactcctgatcttggagtggacactccgactgacatggtattgcatcaaagactgcaccctgccattgccagatgctcgctcctaccacttgagctgtttctagacataattatgcgtgcctgcatatagcaatccggattttcgtcatgttctgatacacgtgggatgtgtattctttatttctttcttcttgctgttgctgttgtttgtgagaatggttgagtagaataaggatgccggttgatttgcagcataggatataaagagatttgcttaaaattgtaaacctgatgctacgagaaattggaaccgctgttttattgcc

SEQ ID NO: 5786 - protein, 414 aa, Zea mays subsp. mays
  peptide (1)..(414): Ceres Seq. ID no. 12405592
  misc_feature (240)..(414): Homolog of NCBI NO: 21553661 NR Description: unknown [Arabidopsis thaliana]
  misc_feature (106)..(220): Homolog of NCBI NO: 21553661 NR Description: unknown [Arabidopsis thaliana]
  misc_feature (240)..(414): Homolog of NCBI NO: 15235367 NR Description: putative protein; protein id: At4g02440.1, by cDNA: 156170. [Arabidopsis thaliana] >gi|7487012|pir||T01306
  misc_feature (106)..(220): Homolog of NCBI NO: 15235367 NR Description: putative protein; protein id: At4g02440.1, by cDNA: 156170. [Arabidopsis thaliana] >gi|7487012|pir||T01306
EYYQKKKKIAAERKGKKGPNKQSTVSYLRGSIKQITLPIAMDEQQAEEGESARVKRTPEEGSSPLSALADDVLLQILGRLEADPRDWARASCASPRLAALLRAACLPPRLSRALPAELLPAPSPDGAPAAWAALHKLSVCCPGLLRAGVLLEPTDDFGLDLDIGPDVPIYARTDASSAEGFEATATSRHSGTIVAAGSAPRAGESANVAAWSLYDDLYLDAAYDCSSELQIPPAAAAVEPAPPAPVAAIRDVEEATTTNAVSCGVARRGVVAGSRLHPRRWLGTVGAHLASGSWTLSREQGNKLLASRFRGDRLYLCDWPGCVHKEERRKYMVFRGVFHNFARSQVRRALRDTRRPTVAIECAFCGCKETWDLYSAFCLRSFYGYHDDGEPVVRAYVCENGHVAGAWTDRPLYS

SEQ ID NO: 5787 - protein, 374 aa, Zea mays subsp. mays
  peptide (1)..(374): Ceres Seq. ID no. 12405593
  misc_feature (200)..(374): Homolog of NCBI NO: 21553661 NR Description: unknown [Arabidopsis thaliana]
  misc_feature (66)..(180): Homolog of NCBI NO: 21553661 NR Description: unknown [Arabidopsis thaliana]
  misc_feature (200)..(374): Homolog of NCBI NO: 15235367 NR Description: putative protein; protein id: At4g02440.1, by cDNA: 156170. [Arabidopsis thaliana] >gi|7487012|pir||T01306
  misc_feature (66)..(180): Homolog of NCBI NO: 15235367 NR Description: putative protein; protein id: At4g02440.1, by cDNA: 156170. [Arabidopsis thaliana] >gi|7487012|pir||T01306
MDEQQAEEGESARVKRTPEEGSSPLSALADDVLLQILGRLEADPRDWARASCASPRLAALLRAACLPPRLSRALPAELLPAPSPDGAPAAWAALHKLSVCCPGLLRAGVLLEPTDDFGLDLDIGPDVPIYARTDASSAEGFEATATSRHSGTIVAAGSAPRAGESANVAAWSLYDDLYLDAAYDCSSELQIPPAAAAVEPAPPAPVAAIRDVEEATTTNAVSCGVARRGVVAGSRLHPRRWLGTVGAHLASGSWTLSREQGNKLLASRFRGDRLYLCDWPGCVHKEERRKYMVFRGVFHNFARSQVRRALRDTRRPTVAIECAFCGCKETWDLYSAFCLRSFYGYHDDGEPVVRAYVCENGHVAGAWTDRPLYS

SEQ ID NO: 5788 - protein, 295 aa, Zea mays subsp. mays
  peptide (1)..(295): Ceres Seq. ID no. 12405594
  misc_feature (101)..(295): Pfam Name: Equine herpesvirus glycoprotein gp2 Pfam Description: Equine herpesvirus glycoprotein gp2
  misc_feature (76)..(295): Homolog of NCBI NO: 13592175 NR Description: ppg3 [Leishmania major]
  misc_feature (101)..(295): Homolog of NCBI NO: 17221114 NR Description: glycoprotein gp2 [Equine herpesvirus 1]
  misc_feature (80)..(295): Homolog of NCBI NO: 17221106 NR Description: glycoprotein gp2 [Equine herpesvirus 1]
  misc_feature (76)..(295): Homolog of NCBI NO: 13592175 NR Description: ppg3 [Leishmania major]
  misc_feature (80)..(295): Homolog of NCBI NO: 30313663 NR Description: sublingual apomucin [Mus musculus]
  misc_feature (83)..(295): Homolog of NCBI NO: 13592175 NR Description: ppg3 [Leishmania major]
  misc_feature (7)..(295): Homolog of NCBI NO: 18376167 NR Description: hypothetical protein [Neurospora crassa]
  misc_feature (80)..(227): Homolog of NCBI NO: 17384256 NR Description: mucin 5 [Homo sapiens]
  misc_feature (285)..(295): Homolog of NCBI NO: 17384256 NR Description: mucin 5 [Homo sapiens]
  misc_feature (80)..(221): Homolog of NCBI NO: 17384256 NR Description: mucin 5 [Homo sapiens]
NIIKRKKRSQPKGRGKKDQINNPLSPTSAEASNKSPCRSPWTNSRRRRAKARASRGRRRRGRRRCPLWRMTCCYRSWDGSRRTRGTGRGPPARPRASPLCSGRPASRRDCRGRSPPSSSPRRHRTGRPRPGRRSTSSPSVARGSSAPGCSSSPPTISGSISTSGLTSPSTPAPTPPPPRGSRPRPPPATAEPSSRPGARPAPANLPTSPRGRSTTTCTWTRHTTARPSCRSRLPLRLWNPPRPRPWRRSATWRKQRPQMLSHAASPGAAWWPGADCIRGGGWAPSARTWHRGPGR

SEQ ID NO: 5789 - DNA, 1268 bp, Zea mays subsp. mays
  misc_feature (1)..(1268): Ceres Seq. ID no. 12409325
  misc_feature: MA Experiment ID: 108543 Result: Down-regulated in Transcription
  misc_feature: MA Experiment ID: 20000488 Result: Down-regulated in Transcription
  misc_feature: MA Experiment 20000488 PARAMETER Experiment Name: Zm_50mM_NH4NO3_L_to_H_P Parameter: Organism Value: Zea mays
  misc_feature: MA Experiment 20000488 PARAMETER Experiment Name: Zm_50mM_NH4NO3_L_to_H_P Parameter: Timepoint (hr) Value: 8
  misc_feature: MA Experiment 20000488 PARAMETER Experiment Name: Zm_50mM_NH4NO3_L_to_H_P Parameter: Tissue Value: Leaves
  misc_feature: MA Experiment 20000488 PARAMETER Experiment Name: Zm_50mM_NH4NO3_L_to_H_P Parameter: Treatment Value: 50mM NH4NO3 vs. 100mM Mannitol
ctgggcccaccgtaactgactgggtgttctttacagacacgtgacgtcgcgcaccgggcccgtctatcgagtattcggtcccattcgtcagtgctcggacacctgactaataacaaaagaactcgctccattcagagattcagagaagacccgcctctcccgtgaggccgtgacgcgacgccggatcgtcctcgtctcctagctcgtggaatgaagggaggtggcgtcatcagggccgccggcggaggtgccggcggtgcgggtctgttgcgaacgcgactgcggcttcccgtggtgctcctctcctgctccctcttcttcctcgccggcttcttcggctcgctcctcttcacccaggatccggaggaggcggatatgccggtgccgagagagcggctgttggatgcggcgtggccggagatgccttacggcgagtccggcgaggctgcgccgtccttgatcccataccagattttgagctggcagcctcgtgctttgtactttccacaatttgcgacatcagaacagtgtgaaaatatagtaaaaacggcaaaggagagacttaagccatcaacattagccctgaggaaaggagaaaccgcagagagtacaaaaggaatcaggacaagttcgggaacattccttagtgctaatgaagacccaactgaaacccttgcggaaatcgagaagaagattgcaagggctaccatgttacccagaaatcatggggagccatttaatgtcctgcggtataatattggacaaaggtatgcttcacattatgacgcatttgacccagctcagtatggtccacaaaaaaatcaaagggtggcatctttcttgctttatctcacggatgtcgaagaagggggagaaactatgttcccatacgagaacagtgagaatatggatataggctatgactatgagaagtgcattggcctaaaggtaaaaccaaggaagggtgacggactcttgttttactcccttatggtaaatgggaccattgaccggacttcacttcatggtagctgccccgtcatcaaaggcgagaaatgggtcgccaccaaatggatcagagacaatatagtgtagaaatcgaaaggctcaggtgtcatgtgccctccaaaaaaatagatcatgcgcacatatactgaccatatacttcagtgtttgttcaattgccatggacagttggaccaacggaaggaaagtgtaaccaatctatttgcatcgtgtcaatatatagcctacaacttacatgtggc

SEQ ID NO: 5790 - protein, 294 aa, Zea mays subsp. mays
  peptide (1)..(294): Ceres Seq. ID no. 12409326
  misc_feature (172)..(291): Pfam Name: 2OG-Fe(II) oxygenase superfamily Pfam Description: 2OG-Fe(II) oxygenase superfamily
  misc_feature (1)..(291): Homolog of NCBI NO: 14488368 NR Description: putative dioxygenase [Oryza sativa (japonica group)] >gi|17027263|gb|AAL34117.1|AC090713_4 putative
  misc_feature (24)..(291): Homolog of NCBI NO: 40809925 NR Description: prolyl 4-hydroxylase [Nicotiana tabacum]
  misc_feature (21)..(291): Homolog of NCBI NO: 18418321 NR Description: putative protein; protein id: At4g33910.1, by cDNA: 2306., supported by cDNA: gi_17381225, supported by gi_20465826 [Arabidopsis thaliana] >gi|17381226|gb|AAL36425.1|
  misc_feature (71)..(270): Homolog of NCBI NO: 7485609 NR Description: hypothetical protein F17I5.100 - Arabidopsis >gi|3297815|emb|CAA19873.1| putative protein [Arabidopsis >gi|7270340|emb|CAB80108.1| putative protein [Arabidopsis
  misc_feature (23)..(291): Homolog of NCBI NO: 30681957 NR Description: oxidoreductase -related [Arabidopsis thaliana]
  misc_feature (89)..(289): Homolog of NCBI NO: 29150365 NR Description: putative oxidoreductase [Oryza sativa (japonica
  misc_feature (87)..(289): Homolog of NCBI NO: 21537370 NR Description: putative prolyl 4-hydroxylase, alpha subunit
  misc_feature (87)..(289): Homolog of NCBI NO: 18394842 NR Description: expressed protein; protein id: At1g20270.1,
  misc_feature (82)..(289): Homolog of NCBI NO: 30689216 NR Description: oxidoreductase, 2OG-Fe(II) oxygenase family
  misc_feature (90)..(289): Homolog of NCBI NO: 28393447 NR Description: putative prolyl 4-hydroxylase [Arabidopsis
MKGGGVIRAAGGGAGGAGLLRTRLRLPVVLLSCSLFFLAGFFGSLLFTQDPEEADMPVPRERLLDAAWPEMPYGESGEAAPSLIPYQILSWQPRALYFPQFATSEQCENIVKTAKERLKPSTLALRKGETAESTKGIRTSSGTFLSANEDPTETLAEIEKKIARATMLPRNHGEPFNVLRYNIGQRYASHYDAFDPAQYGPQKNQRVASFLLYLTDVEEGGETMFPYENSENMDIGYDYEKCIGLKVKPRKGDGLLFYSLMVNGTIDRTSLHGSCPVIKGEKWVATKWIRDNIV

SEQ ID NO: 5791 - protein, 239 aa, Zea mays subsp. mays
  peptide (1)..(239): Ceres Seq. ID no. 12409327
  misc_feature (117)..(236): Pfam Name: 2OG-Fe(II) oxygenase superfamily Pfam Description: 2OG-Fe(II) oxygenase superfamily
  misc_feature (1)..(236): Homolog of NCBI NO: 14488368 NR Description: putative dioxygenase [Oryza sativa (japonica group)] >gi|17027263|gb|AAL34117.1|AC090713_4 putative
  misc_feature (1)..(236): Homolog of NCBI NO: 40809925 NR Description: prolyl 4-hydroxylase [Nicotiana tabacum]
  misc_feature (1)..(236): Homolog of NCBI NO: 18418321 NR Description: putative protein; protein id: At4g33910.1, by cDNA: 2306., supported by cDNA: gi_17381225, supported by gi_20465826 [Arabidopsis thaliana] >gi|17381226|gb|AAL36425.1|
  misc_feature (16)..(215): Homolog of NCBI NO: 7485609 NR Description: hypothetical protein F17I5.100 - Arabidopsis >gi|3297815|emb|CAA19873.1| putative protein [Arabidopsis >gi|7270340|emb|CAB80108.1| putative protein [Arabidopsis
  misc_feature (1)..(236): Homolog of NCBI NO: 30681957 NR Description: oxidoreductase -related [Arabidopsis thaliana]
  misc_feature (34)..(234): Homolog of NCBI NO: 29150365 NR Description: putative oxidoreductase [Oryza sativa (japonica
  misc_feature (32)..(234): Homolog of NCBI NO: 21537370 NR Description: putative prolyl 4-hydroxylase, alpha subunit
  misc_feature (32)..(234): Homolog of NCBI NO: 18394842 NR Description: expressed protein; protein id: At1g20270.1,
  misc_feature (27)..(234): Homolog of NCBI NO: 30689216 NR Description: oxidoreductase, 2OG-Fe(II) oxygenase family
  misc_feature (35)..(234): Homolog of NCBI NO: 28393447 NR Description: putative prolyl 4-hydroxylase [Arabidopsis
MPVPRERLLDAAWPEMPYGESGEAAPSLIPYQILSWQPRALYFPQFATSEQCENIVKTAKERLKPSTLALRKGETAESTKGIRTSSGTFLSANEDPTETLAEIEKKIARATMLPRNHGEPFNVLRYNIGQRYASHYDAFDPAQYGPQKNQRVASFLLYLTDVEEGGETMFPYENSENMDIGYDYEKCIGLKVKPRKGDGLLFYSLMVNGTIDRTSLHGSCPVIKGEKWVATKWIRDNIV

SEQ ID NO: 5792 - protein, 224 aa, Zea mays subsp. mays
  peptide (1)..(224): Ceres Seq. ID no. 12409328
  misc_feature (102)..(221): Pfam Name: 2OG-Fe(II) oxygenase superfamily Pfam Description: 2OG-Fe(II) oxygenase superfamily
  misc_feature (1)..(221): Homolog of NCBI NO: 14488368 NR Description: putative dioxygenase [Oryza sativa (japonica group)] >gi|17027263|gb|AAL34117.1|AC090713_4 putative
  misc_feature (1)..(221): Homolog of NCBI NO: 40809925 NR Description: prolyl 4-hydroxylase [Nicotiana tabacum]
  misc_feature (1)..(221): Homolog of NCBI NO: 18418321 NR Description: putative protein; protein id: At4g33910.1, by cDNA: 2306., supported by cDNA: gi_17381225, supported by gi_20465826 [Arabidopsis thaliana] >gi|17381226|gb|AAL36425.1|
  misc_feature (1)..(200): Homolog of NCBI NO: 7485609 NR Description: hypothetical protein F17I5.100 - Arabidopsis >gi|3297815|emb|CAA19873.1| putative protein [Arabidopsis >gi|7270340|emb|CAB80108.1| putative protein [Arabidopsis
  misc_feature (1)..(221): Homolog of NCBI NO: 30681957 NR Description: oxidoreductase -related [Arabidopsis thaliana]
  misc_feature (19)..(219): Homolog of NCBI NO: 29150365 NR Description: putative oxidoreductase [Oryza sativa (japonica
  misc_feature (17)..(219): Homolog of NCBI NO: 21537370 NR Description: putative prolyl 4-hydroxylase, alpha subunit
  misc_feature (17)..(219): Homolog of NCBI NO: 18394842 NR Description: expressed protein; protein id: At1g20270.1,
  misc_feature (12)..(219): Homolog of NCBI NO: 30689216 NR Description: oxidoreductase, 2OG-Fe(II) oxygenase family
  misc_feature (20)..(219): Homolog of NCBI NO: 28393447 NR Description: putative prolyl 4-hydroxylase [Arabidopsis
MPYGESGEAAPSLIPYQILSWQPRALYFPQFATSEQCENIVKTAKERLKPSTLALRKGETAESTKGIRTSSGTFLSANEDPTETLAEIEKKIARATMLPRNHGEPFNVLRYNIGQRYASHYDAFDPAQYGPQKNQRVASFLLYLTDVEEGGETMFPYENSENMDIGYDYEKCIGLKVKPRKGDGLLFYSLMVNGTIDRTSLHGSCPVIKGEKWVATKWIRDNIV

SEQ ID NO: 5793 - DNA, 1100 bp, Zea mays subsp. mays
  misc_feature (1)..(1100): Ceres Seq. ID no. 12381112
  misc_feature: MA Experiment ID: 108527 Result: Up-regulated in Transcription
  misc_feature: MA Experiment 108527 PARAMETER Experiment Name: Zm_5mM_NO_P Parameter: Age (day) Value: 8
  misc_feature: MA Experiment 108527 PARAMETER Experiment Name: Zm_5mM_NO_P Parameter: Organism Value: Zea mays
  misc_feature: MA Experiment 108527 PARAMETER Experiment Name: Zm_5mM_NO_P Parameter: Plant Line Value: 35A19
  misc_feature: MA Experiment 108527 PARAMETER Experiment Name: Zm_5mM_NO_P Parameter: Timepoint (hr) Value: 6
  misc_feature: MA Experiment 108527 PARAMETER Experiment Name: Zm_5mM_NO_P Parameter: Tissue Value: Aerial
  misc_feature: MA Experiment 108527 PARAMETER Experiment Name: Zm_5mM_NO_P Parameter: Treatment Value: 5mM NO vs. No Treatment
  misc_feature: MA Experiment ID: 108528 Result: Down-regulated in Transcription
  misc_feature: MA Experiment 108528 PARAMETER Experiment Name: Zm_Imbibed_Seeds_P Parameter: Age (day) Value: 5 vs. 2
  misc_feature: MA Experiment 108528 PARAMETER Experiment Name: Zm_Imbibed_Seeds_P Parameter: Organism Value: Zea mays
  misc_feature: MA Experiment 108528 PARAMETER Experiment Name: Zm_Imbibed_Seeds_P Parameter: Plant Line Value: 35A19
  misc_feature: MA Experiment 108528 PARAMETER Experiment Name: Zm_Imbibed_Seeds_P Parameter: Tissue Value: Aerial vs. Embryo
  misc_feature: MA Experiment ID: 108529 Result: Up-regulated in Transcription
  misc_feature: MA Experiment 108529 PARAMETER Experiment Name: Zm_Imbibed_Seeds_P Parameter: Age (day) Value: 5 vs. 2
  misc_feature: MA Experiment 108529 PARAMETER Experiment Name: Zm_Imbibed_Seeds_P Parameter: Organism Value: Zea mays
  misc_feature: MA Experiment 108529 PARAMETER Experiment Name: Zm_Imbibed_Seeds_P Parameter: Plant Line Value: 35A19
  misc_feature: MA Experiment 108529 PARAMETER Experiment Name: Zm_Imbibed_Seeds_P Parameter: Tissue Value: Roots vs. Embryo
  misc_feature: MA Experiment ID: 108530 Result: Down-regulated in Transcription
  misc_feature: MA Experiment 108530 PARAMETER Experiment Name: Zm_Imbibed_Seeds_P Parameter: Age (day) Value: 6 vs. 2
  misc_feature: MA Experiment 108530 PARAMETER Experiment Name: Zm_Imbibed_Seeds_P Parameter: Organism Value: Zea mays
  misc_feature: MA Experiment 108530 PARAMETER Experiment Name: Zm_Imbibed_Seeds_P Parameter: Plant Line Value: 35A19
  misc_feature: MA Experiment 108530 PARAMETER Experiment Name: Zm_Imbibed_Seeds_P Parameter: Tissue Value: Aerial vs. Embryo
  misc_feature: MA Experiment ID: 108535 Result: Down-regulated in Transcription
  misc_feature: MA Experiment 108535 PARAMETER Experiment Name: Zm_Meristem_P Parameter: Age (day) Value: 8
  misc_feature: MA Experiment 108535 PARAMETER Experiment Name: Zm_Meristem_P Parameter: Organism Value: Zea mays
  misc_feature: MA Experiment 108535 PARAMETER Experiment Name: Zm_Meristem_P Parameter: Plant Line Value: 35A19
  misc_feature: MA Experiment 108535 PARAMETER Experiment Name: Zm_Meristem_P Parameter: Tissue Value: Root Meristem vs. Above Root Meristem
  misc_feature: MA Experiment ID: 108543 Result: Up-regulated in Transcription
  misc_feature: MA Experiment ID: 108544 Result: Down-regulated in Transcription
  misc_feature: MA Experiment ID: 108545 Result: Down-regulated in Transcription
  misc_feature: MA Experiment 108545 PARAMETER Experiment Name: Zm_Imbibed_Seeds_P Parameter: Age (day) Value: 3 vs. 2
  misc_feature: MA Experiment 108545 PARAMETER Experiment Name: Zm_Imbibed_Seeds_P Parameter: Organism Value: Zea mays
  misc_feature: MA Experiment 108545 PARAMETER Experiment Name: Zm_Imbibed_Seeds_P Parameter: Plant Line Value: 35A19
  misc_feature: MA Experiment 108545 PARAMETER Experiment Name: Zm_Imbibed_Seeds_P Parameter: Tissue Value: Aerial vs. Embryo
  misc_feature: MA Experiment ID: 108546 Result: Up-regulated in Transcription
  misc_feature: MA Experiment 108546 PARAMETER Experiment Name: Zm_Imbibed_Seeds_P Parameter: Age (day) Value: 3 vs. 2
  misc_feature: MA Experiment 108546 PARAMETER Experiment Name: Zm_Imbibed_Seeds_P Parameter: Organism Value: Zea mays
  misc_feature: MA Experiment 108546 PARAMETER Experiment Name: Zm_Imbibed_Seeds_P Parameter: Plant Line Value: 35A19
  misc_feature: MA Experiment 108546 PARAMETER Experiment Name: Zm_Imbibed_Seeds_P Parameter: Tissue Value: Roots vs. Embryo
  misc_feature: MA Experiment ID: 108547 Result: Down-regulated in Transcription
  misc_feature: MA Experiment 108547 PARAMETER Experiment Name: Zm_Imbibed_Seeds_P Parameter: Age (day) Value: 4 vs. 2
  misc_feature: MA Experiment 108547 PARAMETER Experiment Name: Zm_Imbibed_Seeds_P Parameter: Organism Value: Zea mays
  misc_feature: MA Experiment 108547 PARAMETER Experiment Name: Zm_Imbibed_Seeds_P Parameter: Plant Line Value: 35A19
  misc_feature: MA Experiment 108547 PARAMETER Experiment Name: Zm_Imbibed_Seeds_P Parameter: Tissue Value: Aerial vs. Embryo
  misc_feature: MA Experiment ID: 108559 Result: Up-regulated in Transcription
  misc_feature: MA Experiment 108559 PARAMETER Experiment Name: Zm_5mM_NO_P Parameter: Age (day) Value: 8
  misc_feature: MA Experiment 108559 PARAMETER Experiment Name: Zm_5mM_NO_P Parameter: Organism Value: Zea mays
  misc_feature: MA Experiment 108559 PARAMETER Experiment Name: Zm_5mM_NO_P Parameter: Plant Line Value: 35A19
  misc_feature: MA Experiment 108559 PARAMETER Experiment Name: Zm_5mM_NO_P Parameter: Timepoint (hr) Value: 12
  misc_feature: MA Experiment 108559 PARAMETER Experiment Name: Zm_5mM_NO_P Parameter: Tissue Value: Aerial
  misc_feature: MA Experiment 108559 PARAMETER Experiment Name: Zm_5mM_NO_P Parameter: Treatment Value: 5mM NO vs. No Treatment
  misc_feature: MA Experiment ID: 20000108 Result: Down-regulated in Transcription
  misc_feature: MA Experiment 20000108 PARAMETER Experiment Name: Zm_Root-Tips_P Parameter: Age (day) Value: 12
  misc_feature: MA Experiment 20000108 PARAMETER Experiment Name: Zm_Root-Tips_P Parameter: Organism Value: Zea mays
  misc_feature: MA Experiment 20000108 PARAMETER Experiment Name: Zm_Root-Tips_P Parameter: Tissue Value: Root tips vs. Root mid region    35
  misc_feature: MA Experiment 20000108 PARAMETER Experiment Name: Zm_Root-Tips_P Parameter: Tissue Value: Root tips vs. Root mid region   Sequence Listing-Misc Features (4)
  misc_feature: MA Experiment ID: 20000535 Result: Down-regulated in Transcription
  misc_feature: MA Experiment 20000535 PARAMETER Experiment Name: Zm_Hybrid_Seed_Dev_P Parameter: DAP Value: 30 vs. 12
  misc_feature: MA Experiment 20000535 PARAMETER Experiment Name: Zm_Hybrid_Seed_Dev_P Parameter: Organism Value: Zea mays
  misc_feature: MA Experiment 20000535 PARAMETER Experiment Name: Zm_Hybrid_Seed_Dev_P Parameter: Plant Line Value: 35A19
  misc_feature: MA Experiment 20000535 PARAMETER Experiment Name: Zm_Hybrid_Seed_Dev_P Parameter: Tissue Value: Embryo vs. Unfert Floret
atcttaacagccaggaagctggcgtcttgcttgtccttgttcttttcccacccggctacccccgtcgtcgccgccgctttccccgtggtttcagagctcgagtcggctagctaggccgcctggctaatctccctgccttctataagtacaggttcattgtgtgctgtgctcccagctccatcactgacacaagagagcacgctactactcatcactcgccaacgtgcagagatcagggaggcggcacactccatccactgaccgctcatggcgaaggtccacctctacgtcgccgcggcctgcgccgtcgtcctcgcgctcgccgccccggccctcgccggcgaccccgacatgctgcaggacgtctgcccggctgactacgcctccccggtgaagctgaacgggttcgcgtgcaaggcgaacttttcggcggacgacttcttcttcgacgggctgaggaaccccggcaacaccaacaacccggcgggctccgtggtgacggcggccaacgtggagaagttcccgggcgtgaacacgctgggcgtctccatggcgcgcatcgactacgcgccgggcggccagaacccgccgcacacgcacccgcgcgccaccgagatcatcttcgtcctcgagggcacgctcgaggtcggcttcatcaccaccgccaacgcgctcttcaccaagaccgtcaccaagggcgacgtcttcgtcttcccgcgcggcctcgtccacttccagcagaacaggggccacggccccgccgccgtcgtcgccgccttcaacagccagctccagggcacgcaggccatcgccatgacgctcttcggcgccgtgccgcccgtgccctccgacatcctcgccaaggccttccgcatcagcagcggcgaggtggaccacatcaaggccaacttcgcgcccaagtagagatccaatgtctgcattcccttgattttctcaataataaatccccgcggtgtgcagttcgatttgttcgtcttcggttggtttggttcgagacattgctgaccacgcttgttactgctaatttgtgcggagcggagttgcttgnnctccgataaataatcaattctatcgtcgtc

SEQ ID NO: 5794 - protein, 218 aa, Zea mays subsp. mays
  peptide (1)..(218): Ceres Seq. ID no. 12381113
  misc_feature (62)..(209): Pfam Name: Cupin Pfam Description: Cupin
  misc_feature (1)..(215): Homolog of NCBI NO: 34902528 NR Description: probable germin protein 4 [Oryza sativa (japonica
  misc_feature (1)..(217): Homolog of NCBI NO: 34906612 NR Description: germin(oxalate oxidase)-like protein [Oryza
  misc_feature (10)..(218): Homolog of NCBI NO: 34904670 NR Description: putative germin protein [Oryza sativa (japonica group)] >gi|5042461|gb|AAD38298.1| putative oxalate oxidase
  misc_feature (2)..(217): Homolog of NCBI NO: 27805638 NR Description: Nectarin 1 precursor (Superoxide dismutase [Mn])
  misc_feature (8)..(218): Homolog of NCBI NO: 18203442 NR Description: Rhicadhesin receptor precursor (Germin-like
  misc_feature (22)..(218): Homolog of NCBI NO: 7447345 NR Description: probable germin protein - tomato
  misc_feature (24)..(218): Homolog of NCBI NO: 15217561 NR Description: germin-like protein; protein id: At1g09560.1, by cDNA: gi_11908055, supported by cDNA: gi_12642871, supported cDNA: gi_13265455, supported by cDNA: gi_1755159, supported by
  misc_feature (24)..(217): Homolog of NCBI NO: 18203447 NR Description: Nectarin 1 precursor (Superoxide dismutase [Mn])
  misc_feature (15)..(218): Homolog of NCBI NO: 15228673 NR Description: germin-like protein (GLP10); protein id:
  misc_feature (23)..(218): Homolog of NCBI NO: 1934730 NR Description: germin-like protein [Arabidopsis thaliana]
MAKVHLYVAAACAVVLALAAPALAGDPDMLQDVCPADYASPVKLNGFACKANFSADDFFFDGLRNPGNTNNPAGSVVTAANVEKFPGVNTLGVSMARIDYAPGGQNPPHTHPRATEIIFVLEGTLEVGFITTANALFTKTVTKGDVFVFPRGLVHFQQNRGHGPAAVVAAFNSQLQGTQAIAMTLFGAVPPVPSDILAKAFRISSGEVDHIKANFAPK

SEQ ID NO: 5795 - protein, 190 aa, Zea mays subsp. mays
  peptide (1)..(190): Ceres Seq. ID no. 12381114
  misc_feature (34)..(181): Pfam Name: Cupin Pfam Description: Cupin
  misc_feature (1)..(187): Homolog of NCBI NO: 34902528 NR Description: probable germin protein 4 [Oryza sativa (japonica
  misc_feature (1)..(189): Homolog of NCBI NO: 34906612 NR Description: germin(oxalate oxidase)-like protein [Oryza
  misc_feature (1)..(190): Homolog of NCBI NO: 34904670 NR Description: putative germin protein [Oryza sativa (japonica group)] >gi|5042461|gb|AAD38298.1| putative oxalate oxidase
  misc_feature (1)..(189): Homolog of NCBI NO: 27805638 NR Description: Nectarin 1 precursor (Superoxide dismutase [Mn])
  misc_feature (1)..(190): Homolog of NCBI NO: 18203442 NR Description: Rhicadhesin receptor precursor (Germin-like
  misc_feature (1)..(190): Homolog of NCBI NO: 7447345 NR Description: probable germin protein - tomato
  misc_feature (1)..(190): Homolog of NCBI NO: 15217561 NR Description: germin-like protein; protein id: At1g09560.1, by cDNA: gi_11908055, supported by cDNA: gi_12642871, supported cDNA: gi_13265455, supported by cDNA: gi_1755159, supported by
  misc_feature (1)..(189): Homolog of NCBI NO: 18203447 NR Description: Nectarin 1 precursor (Superoxide dismutase [Mn])
  misc_feature (1)..(190): Homolog of NCBI NO: 15228673 NR Description: germin-like protein (GLP10); protein id:
  misc_feature (1)..(190): Homolog of NCBI NO: 1934730 NR Description: germin-like protein [Arabidopsis thaliana]
MLQDVCPADYASPVKLNGFACKANFSADDFFFDGLRNPGNTNNPAGSVVTAANVEKFPGVNTLGVSMARIDYAPGGQNPPHTHPRATEIIFVLEGTLEVGFITTANALFTKTVTKGDVFVFPRGLVHFQQNRGHGPAAVVAAFNSQLQGTQAIAMTLFGAVPPVPSDILAKAFRISSGEVDHIKANFAPK

SEQ ID NO: 5796 - protein, 124 aa, Zea mays subsp. mays
  peptide (1)..(124): Ceres Seq. ID no. 12381115
  misc_feature (1)..(115): Pfam Name: Cupin Pfam Description: Cupin
  misc_feature (1)..(121): Homolog of NCBI NO: 34902528 NR Description: probable germin protein 4 [Oryza sativa (japonica
  misc_feature (1)..(123): Homolog of NCBI NO: 34906612 NR Description: germin(oxalate oxidase)-like protein [Oryza
  misc_feature (1)..(124): Homolog of NCBI NO: 34904670 NR Description: putative germin protein [Oryza sativa (japonica group)] >gi|5042461|gb|AAD38298.1| putative oxalate oxidase
  misc_feature (1)..(123): Homolog of NCBI NO: 27805638 NR Description: Nectarin 1 precursor (Superoxide dismutase [Mn])
  misc_feature (1)..(124): Homolog of NCBI NO: 18203442 NR Description: Rhicadhesin receptor precursor (Germin-like
  misc_feature (1)..(124): Homolog of NCBI NO: 7447345 NR Description: probable germin protein - tomato
  misc_feature (1)..(124): Homolog of NCBI NO: 15217561 NR Description: germin-like protein; protein id: At1g09560.1, by cDNA: gi_11908055, supported by cDNA: gi_12642871, supported cDNA: gi_13265455, supported by cDNA: gi_1755159, supported by
  misc_feature (1)..(123): Homolog of NCBI NO: 18203447 NR Description: Nectarin 1 precursor (Superoxide dismutase [Mn])
  misc_feature (1)..(124): Homolog of NCBI NO: 15228673 NR Description: germin-like protein (GLP10); protein id:
  misc_feature (1)..(124): Homolog of NCBI NO: 1934730 NR Description: germin-like protein [Arabidopsis thaliana]
MARIDYAPGGQNPPHTHPRATEIIFVLEGTLEVGFITTANALFTKTVTKGDVFVFPRGLVHFQQNRGHGPAAVVAAFNSQLQGTQAIAMTLFGAVPPVPSDILAKAFRISSGEVDHIKANFAPK

SEQ ID NO: 5797 - DNA, 787 bp, Zea mays subsp. mays
  misc_feature (1)..(787): Ceres Seq. ID no. 12340788
  misc_feature: MA Experiment ID: 108522 Result: Up-regulated in Transcription
  misc_feature: MA Experiment 108522 PARAMETER Experiment Name: Zm_42deg_Heat_P Parameter: Age (day) Value: 8
  misc_feature: MA Experiment 108522 PARAMETER Experiment Name: Zm_42deg_Heat_P Parameter: Organism Value: Zea mays
  misc_feature: MA Experiment 108522 PARAMETER Experiment Name: Zm_42deg_Heat_P Parameter: Plant Line Value: 35A19
  misc_feature: MA Experiment 108522 PARAMETER Experiment Name: Zm_42deg_Heat_P Parameter: Temperature (deg C) Value: 42 vs. 22
  misc_feature: MA Experiment 108522 PARAMETER Experiment Name: Zm_42deg_Heat_P Parameter: Timepoint (hr) Value: 1
  misc_feature: MA Experiment 108522 PARAMETER Experiment Name: Zm_42deg_Heat_P Parameter: Tissue Value: Aerial
  misc_feature: MA Experiment ID: 108527 Result: Down-regulated in Transcription
  misc_feature: MA Experiment 108527 PARAMETER Experiment Name: Zm_5mM_NO_P Parameter: Age (day) Value: 8
  misc_feature: MA Experiment 108527 PARAMETER Experiment Name: Zm_5mM_NO_P Parameter: Organism Value: Zea mays
  misc_feature: MA Experiment 108527 PARAMETER Experiment Name: Zm_5mM_NO_P Parameter: Plant Line Value: 35A19
  misc_feature: MA Experiment 108527 PARAMETER Experiment Name: Zm_5mM_NO_P Parameter: Timepoint (hr) Value: 6
  misc_feature: MA Experiment 108527 PARAMETER Experiment Name: Zm_5mM_NO_P Parameter: Tissue Value: Aerial
  misc_feature: MA Experiment 108527 PARAMETER Experiment Name: Zm_5mM_NO_P Parameter: Treatment Value: 5mM NO vs. No Treatment
  misc_feature: MA Experiment ID: 108529 Result: Down-regulated in Transcription
  misc_feature: MA Experiment 108529 PARAMETER Experiment Name: Zm_Imbibed_Seeds_P Parameter: Age (day) Value: 5 vs. 2
  misc_feature: MA Experiment 108529 PARAMETER Experiment Name: Zm_Imbibed_Seeds_P Parameter: Organism Value: Zea mays
  misc_feature: MA Experiment 108529 PARAMETER Experiment Name: Zm_Imbibed_Seeds_P Parameter: Plant Line Value: 35A19
  misc_feature: MA Experiment 108529 PARAMETER Experiment Name: Zm_Imbibed_Seeds_P Parameter: Tissue Value: Roots vs. Embryo
  misc_feature: MA Experiment ID: 108535 Result: Up-regulated in Transcription
  misc_feature: MA Experiment 108535 PARAMETER Experiment Name: Zm_Meristem_P Parameter: Age (day) Value: 8
  misc_feature: MA Experiment 108535 PARAMETER Experiment Name: Zm_Meristem_P Parameter: Organism Value: Zea mays
  misc_feature: MA Experiment 108535 PARAMETER Experiment Name: Zm_Meristem_P Parameter: Plant Line Value: 35A19
  misc_feature: MA Experiment 108535 PARAMETER Experiment Name: Zm_Meristem_P Parameter: Tissue Value: Root Meristem vs. Above Root Meristem
  misc_feature: MA Experiment ID: 108543 Result: Down-regulated in Transcription
  misc_feature: MA Experiment ID: 108544 Result: Down-regulated in Transcription
  misc_feature: MA Experiment ID: 20000478 Result: Down-regulated in Transcription
  misc_feature: MA Experiment 20000478 PARAMETER Experiment Name: Zm_5mM_SA_P Parameter: Age (day) Value: 11
  misc_feature: MA Experiment 20000478 PARAMETER Experiment Name: Zm_5mM_SA_P Parameter: Organism Value: Zea mays
  misc_feature: MA Experiment 20000478 PARAMETER Experiment Name: Zm_5mM_SA_P Parameter: Plant Line Value: 35A19
  misc_feature: MA Experiment 20000478 PARAMETER Experiment Name: Zm_5mM_SA_P Parameter: Timepoint (hr) Value: 72
  misc_feature: MA Experiment 20000478 PARAMETER Experiment Name: Zm_5mM_SA_P Parameter: Tissue Value: Aerial
  misc_feature: MA Experiment 20000478 PARAMETER Experiment Name: Zm_5mM_SA_P Parameter: Treatment Value: 5mM SA vs. No Treatment
  misc_feature: MA Experiment ID: 20000488 Result: Down-regulated in Transcription
  misc_feature: MA Experiment 20000488 PARAMETER Experiment Name: Zm_50mM_NH4NO3_L_to_H_P Parameter: Organism Value: Zea mays
  misc_feature: MA Experiment 20000488 PARAMETER Experiment Name: Zm_50mM_NH4NO3_L_to_H_P Parameter: Timepoint (hr) Value: 8
  misc_feature: MA Experiment 20000488 PARAMETER Experiment Name: Zm_50mM_NH4NO3_L_to_H_P Parameter: Tissue Value: Leaves
  misc_feature: MA Experiment 20000488 PARAMETER Experiment Name: Zm_50mM_NH4NO3_L_to_H_P Parameter: Treatment Value: 50mM NH4NO3 vs. 100mM Mannitol
  misc_feature: MA Experiment ID: 20000492 Result: Up-regulated in Transcription
  misc_feature: MA Experiment 20000492 PARAMETER Experiment Name: Zm_Hybrid_Seed_Dev_P Parameter: DAP Value: 12
  misc_feature: MA Experiment 20000492 PARAMETER Experiment Name: Zm_Hybrid_Seed_Dev_P Parameter: Organism Value: Zea mays
  misc_feature: MA Experiment 20000492 PARAMETER Experiment Name: Zm_Hybrid_Seed_Dev_P Parameter: Plant Line Value: 35A19
  misc_feature: MA Experiment 20000492 PARAMETER Experiment Name: Zm_Hybrid_Seed_Dev_P Parameter: Tissue Value: Fert Kernel vs. Unfert Floret
  misc_feature: MA Experiment ID: 20000535 Result: Up-regulated in Transcription
  misc_feature: MA Experiment 20000535 PARAMETER Experiment Name: Zm_Hybrid_Seed_Dev_P Parameter: DAP Value: 30 vs. 12
  misc_feature: MA Experiment 20000535 PARAMETER Experiment Name: Zm_Hybrid_Seed_Dev_P Parameter: Organism Value: Zea mays
  misc_feature: MA Experiment 20000535 PARAMETER Experiment Name: Zm_Hybrid_Seed_Dev_P Parameter: Plant Line Value: 35A19
  misc_feature: MA Experiment 20000535 PARAMETER Experiment Name: Zm_Hybrid_Seed_Dev_P Parameter: Tissue Value: Embryo vs. Unfert Floret
gaccgaccaagaaccagcatgaagccactggtggcgcgcctgctcctctgctactccctgctctggctggcgcccgcggcagccccgctacgcctgcagcacgatcatgtccggggccacggccacggccacggccacgcccacccgcctccgtacgcgcgtaacgcgacggcgtacggcgtctcggcggcgctgtgcccgggctgcggcgcgtgggcggacgcgctggagttcctctactaccacaacctggtgcggctggcgtcgctggagccgccgctggcgtggtccccgcgcctggcgtcgtacgcgggctggtgggcggcgcagcgccgcggggactgcgcgctgcgccactccttccccgacggccagttcgcgctcggggagaacgtcttctggggcgggcccggcggcgcgtggcggccccgggacgccgtcgcggactgggccgccgagggcgccgactactcgtacgccgaccaacncgtgcgcgccaggccgggagtgcgcgcactacacccagatcgtgtggcgacgcaccaccgccgntcgtgcgcccgggtggcgtgcgacggcggcggggtgttcatcacctgcaactactacccgcccggcaacgtcgtcggcgagaggccgtactaactagctagcttagcagctcagtaccctcggcctcggggatttattacgtgacgtggcgaacggcctcgtgtagccgtgtcgtgtgtaaataatattcagcggtcgttccggtgaacatgatggtaattcactcgaggttttc

SEQ ID NO: 5798 - protein, 214 aa, Zea mays subsp. mays
  peptide (1)..(214): Ceres Seq. ID no. 12340789
  misc_feature (79)..(201): Pfam Name: SCP-like extracellular protein Pfam Description: SCP-like extracellular protein
  misc_feature (66)..(214): Homolog of NCBI NO: 15234704 NR Description: PR-1-like protein; protein id: At4g30320.1
  misc_feature (66)..(214): Homolog of NCBI NO: 34395063 NR Description: putative pathogenesis-related protein 1 [Oryza
  misc_feature (67)..(214): Homolog of NCBI NO: 22327916 NR Description: similar to putative pathogenesis-related protein; id: At5g57625.1 [Arabidopsis thaliana]
  misc_feature (61)..(214): Homolog of NCBI NO: 21304633 NR Description: pathogenesis-related protein 1 [Oryza sativa]
  misc_feature (56)..(214): Homolog of NCBI NO: 37531954 NR Description: putative type-1 pathogenesis-related protein
  misc_feature (77)..(214): Homolog of NCBI NO: 15235994 NR Description: putative pathogenesis-related protein; protein id:
  misc_feature (61)..(214): Homolog of NCBI NO: 34395126 NR Description: PR-1 type pathogenesis-related protein PR-1a
  misc_feature (61)..(214): Homolog of NCBI NO: 11277195 NR Description: acidic pathogenesis-related protein 1a precursor
  misc_feature (65)..(214): Homolog of NCBI NO: 15235992 NR Description: putative pathogenesis-related protein; protein id:
  misc_feature (51)..(214): Homolog of NCBI NO: 34395121 NR Description: putative pathogenesis-related protein [Oryza
  misc_feature (163)..(163): Xaa is any aa, unknown or other
  misc_feature (184)..(184): Xaa is any aa, unknown or other
DRPRTSMKPLVARLLLCYSLLWLAPAAAPLRLQHDHVRGHGHGHGHAHPPPYARNATAYGVSAALCPGCGAWADALEFLYYHNLVRLASLEPPLAWSPRLASYAGWWAAQRRGDCALRHSFPDGQFALGENVFWGGPGGAWRPRDAVADWAAEGADYSYADQXVRARPGVRALHPDRVATHHRXSCARVACDGGGVFITCNYYPPGNVVGERPY

SEQ ID NO: 5799 - protein, 208 aa, Zea mays subsp. mays
  peptide (1)..(208): Ceres Seq. ID no. 12340790
  misc_feature (73)..(195): Pfam Name: SCP-like extracellular protein Pfam Description: SCP-like extracellular protein
  misc_feature (59)..(208): Homolog of NCBI NO: 15235992 NR Description: putative pathogenesis-related protein; protein id:
  misc_feature (61)..(208): Homolog of NCBI NO: 22327916 NR Description: similar to putative pathogenesis-related protein; id: At5g57625.1 [Arabidopsis thaliana]
  misc_feature (55)..(208): Homolog of NCBI NO: 11277195 NR Description: acidic pathogenesis-related protein 1a precursor
  misc_feature (55)..(208): Homolog of NCBI NO: 21304633 NR Description: pathogenesis-related protein 1 [Oryza sativa]
  misc_feature (55)..(208): Homolog of NCBI NO: 34395126 NR Description: PR-1 type pathogenesis-related protein PR-1a
  misc_feature (50)..(208): Homolog of NCBI NO: 37531954 NR Description: putative type-1 pathogenesis-related protein
  misc_feature (71)..(208): Homolog of NCBI NO: 15235994 NR Description: putative pathogenesis-related protein; protein id:
  misc_feature (60)..(208): Homolog of NCBI NO: 15234704 NR Description: PR-1-like protein; protein id: At4g30320.1
  misc_feature (60)..(208): Homolog of NCBI NO: 34395063 NR Description: putative pathogenesis-related protein 1 [Oryza
  misc_feature (45)..(208): Homolog of NCBI NO: 34395121 NR Description: putative pathogenesis-related protein [Oryza
  misc_feature (157)..(157): Xaa is any aa, unknown or other
  misc_feature (178)..(178): Xaa is any aa, unknown or other
MKPLVARLLLCYSLLWLAPAAAPLRLQHDHVRGHGHGHGHAHPPPYARNATAYGVSAALCPGCGAWADALEFLYYHNLVRLASLEPPLAWSPRLASYAGWWAAQRRGDCALRHSFPDGQFALGENVFWGGPGGAWRPRDAVADWAAEGADYSYADQXVRARPGVRALHPDRVATHHRXSCARVACDGGGVFITCNYYPPGNVVGERPY

SEQ ID NO: 5800 - protein, 180 aa, Zea mays subsp. mays
  peptide (1)..(180): Ceres Seq. ID no. 12340791
  misc_feature (128)..(128): Xaa is any aa, unknown or other
  misc_feature (149)..(149): Xaa is any aa, unknown or other
MSGATATATATPTRLRTRVTRRRTASRRRCARAAARGRTRWSSSTTTTWCGWRRWSRRWRGPRAWRRTRAGGRRSAAGTARCATPSPTASSRSGRTSSGAGPAARGGPGTPSRTGPPRAPTTRTPTNXCAPGRECAHYTQIVWRRTTAXRAPGWRATAAGCSSPATTTRPATSSARGRTN

SEQ ID NO: 5801 - DNA, 1835 bp, Zea mays subsp. mays
  misc_feature (1)..(1835): Ceres Seq. ID no. 12409321
  misc_feature: MA Experiment ID: 108544 Result: Down-regulated in Transcription
  misc_feature: MA Experiment ID: 20000477 Result: Down-regulated in Transcription
  misc_feature: MA Experiment 20000477 PARAMETER Experiment Name: Zm_5mM_SA_P Parameter: Age (day) Value: 10
  misc_feature: MA Experiment 20000477 PARAMETER Experiment Name: Zm_5mM_SA_P Parameter: Organism Value: Zea mays
  misc_feature: MA Experiment 20000477 PARAMETER Experiment Name: Zm_5mM_SA_P Parameter: Plant Line Value: 35A19
  misc_feature: MA Experiment 20000477 PARAMETER Experiment Name: Zm_5mM_SA_P Parameter: Timepoint (hr) Value: 48
  misc_feature: MA Experiment 20000477 PARAMETER Experiment Name: Zm_5mM_SA_P Parameter: Tissue Value: Aerial
  misc_feature: MA Experiment 20000477 PARAMETER Experiment Name: Zm_5mM_SA_P Parameter: Treatment Value: 5mM SA vs. No Treatment
  misc_feature: MA Experiment ID: 20000492 Result: Up-regulated in Transcription
  misc_feature: MA Experiment 20000492 PARAMETER Experiment Name: Zm_Hybrid_Seed_Dev_P Parameter: DAP Value: 12
  misc_feature: MA Experiment 20000492 PARAMETER Experiment Name: Zm_Hybrid_Seed_Dev_P Parameter: Organism Value: Zea mays
  misc_feature: MA Experiment 20000492 PARAMETER Experiment Name: Zm_Hybrid_Seed_Dev_P Parameter: Plant Line Value: 35A19
  misc_feature: MA Experiment 20000492 PARAMETER Experiment Name: Zm_Hybrid_Seed_Dev_P Parameter: Tissue Value: Fert Kernel vs. Unfert Floret
  misc_feature: MA Experiment ID: 20000632 Result: Down-regulated in Transcription
  misc_feature: MA Experiment 20000632 PARAMETER Experiment Name: Zm_Herbicide-Treatments_P Parameter: Timepoint (hr) Value: 4
  misc_feature: MA Experiment 20000632 PARAMETER Experiment Name: Zm_Herbicide-Treatments_P Parameter: Tissue Value: Aerial
  misc_feature: MA Experiment 20000632 PARAMETER Experiment Name: Zm_Herbicide-Treatments_P Parameter: Treatment Value: Glean vs. No Treatment
gcacgagaccattacctagaacatcctaatcgaaaaaacccacccgcacggcaccaccaccaatccatccatccttacgcattagctacactccccggcgtcgagcccccgggaaccctagaccgccgccctcgcatctccgctcgtcgccgcggggtactccctccacccgtctggtgggagtcgcggcgggacgtccccgatccgagctctctccgccttagggtttttggggccggccatggactccatggagcagccggagcccaaaaccgcgggccactactacgcccttcaggttggctccgttttcctgacgggctactacaacgtcctgacgaaccagccgcacctggcgaaccagttctacacggacaacagcagtgttgttagactggactgcgagacgggtcggtggtcgtttggagagacggtggaggttatcaatgatatgatgatgtccatgaaactaagcaaggttgaggttaaaacagcgaatttcttagagtcatgggctggggcgattacgctgttggttactggcctagtgaaattgaagcactaccctgttcgcaagcgatttgctcagaatattgttcttgctccaaaggaagatagatattttatattcagtgacatctttaagctcatttgtgatgagtatgatgatcagtacccttttgctgattacaattgtgctgacaacatgccccaagtggaagcgtcttacacaatggctgaaatagggtctgattatttggatggagaacctgaggcacaggagactgttgatcctgctgaaaatcatgtgcagcaccaagattatttggaatataaggctggcaatgtgattgatgatgaaactcatttggaagagcatattcccccattccccagttcaacggatgttaaaagggattcacctcttgctcttccccaccctccatcacctaccctcgaagaacctgtggaagaagcacccaagacatatgcttcagtgttgcgaacgaaatcaaaggcaacgctggcgattacagagtcacagcaggctcaacagctggcccagcagccacagtctgcctcagtgcatgaaaagtctaacctggacaaccaccgggatgttagcgtccctgaggatgaagaagagtttctttcggtttatgttgggaatctttcgccatctacttcggtctttgatcttgagaaagtgttccaggcttttggaagaattaaacctgatggagttgctatccgaagccgcaaggaggctggagtattctttggctttgttgagttcgaagacatgtctggtattcagaatgctttaagtgcatctccagtagagttaaatggccgttttgttcatgttgaagagaggaggcctaactgcggattccctcgtggaagaagaggccgtggaagagctgatttctcaagggaccaagctggtgggagatacgacggggagtatgctactcgatcgaaaggaattgggcaccagaaaaaaactggacgccagtatgactactagttatgtacccgctctgctggtaaatggccgtgtaccattggtattctctacttggtgctgttctggccataattttgctaaaagtcacaatgatgtcgggactagtatttctgctttgttgacattcggcggagtcttttttgggggatgggcatctgttaccattttgttgcgtcacagtagtttttggttctcagttaccgtgaccacttacaaatggatcatgctaccgtcggtgtcaaactttttaagcaatacctaggttgtacttgtaccgatgttaatagttggtattcttagattg

SEQ ID NO: 5802 - protein, 429 aa, Zea mays subsp. mays
  peptide (1)..(429): Ceres Seq. ID no. 12409322
  misc_feature (20)..(134): Pfam Name: Nuclear transport factor 2 (NTF2) domain Pfam Description: Nuclear transport factor 2 (NTF2) domain
  misc_feature (20)..(418): Homolog of NCBI NO: 30697455 NR Description: NTF2-containing RNA-binding protein, putative
  misc_feature (20)..(418): Homolog of NCBI NO: 30697452 NR Description: NTF2-containing RNA-binding protein, putative
  misc_feature (20)..(418): Homolog of NCBI NO: 21553535 NR Description: ras-GTPase-activating protein SH3-domain binding
  misc_feature (18)..(424): Homolog of NCBI NO: 9294171 NR Description: RNA-binding protein-like [Arabidopsis thaliana]
  misc_feature (20)..(424): Homolog of NCBI NO: 30687772 NR Description: NTF2-containing RNA-binding protein, putative thaliana] >gi|17979475|gb|AAL50074.1| AT3g25150/MJL12_9 thaliana] >gi|21360395|gb|AAM47313.1| AT3g25150/MJL12_9
  misc_feature (20)..(419): Homolog of NCBI NO: 31126693 NR Description: putative GAP SH3 binding protein [Oryza sativa
  misc_feature (17)..(276): Homolog of NCBI NO: 15240057 NR Description: NTF2-containing RNA-binding protein, putative; id: At5g43960.1, supported by cDNA: gi_19347888, supported by gi_21281086 [Arabidopsis thaliana] >gi|9758555|dbj|BAB09056.1|
  misc_feature (157)..(420): Homolog of NCBI NO: 15240057 NR Description: NTF2-containing RNA-binding protein, putative; id: At5g43960.1, supported by cDNA: gi_19347888, supported by gi_21281086 [Arabidopsis thaliana] >gi|9758555|dbj|BAB09056.1|
  misc_feature (18)..(259): Homolog of NCBI NO: 10177355 NR Description: RNA-binding protein-like [Arabidopsis thaliana]
  misc_feature (229)..(424): Homolog of NCBI NO: 10177355 NR Description: RNA-binding protein-like [Arabidopsis thaliana]
MDSMEQPEPKTAGHYYALQVGSVFLTGYYNVLTNQPHLANQFYTDNSSVVRLDCETGRWSFGETVEVINDMMMSMKLSKVEVKTANFLESWAGAITLLVTGLVKLKHYPVRKRFAQNIVLAPKEDRYFIFSDIFKLICDEYDDQYPFADYNCADNMPQVEASYTMAEIGSDYLDGEPEAQETVDPAENHVQHQDYLEYKAGNVIDDETHLEEHIPPFPSSTDVKRDSPLALPHPPSPTLEEPVEEAPKTYASVLRTKSKATLAITESQQAQQLAQQPQSASVHEKSNLDNHRDVSVPEDEEEFLSVYVGNLSPSTSVFDLEKVFQAFGRIKPDGVAIRSRKEAGVFFGFVEFEDMSGIQNALSASPVELNGRFVHVEERRPNCGFPRGRRGRGRADFSRDQAGGRYDGEYATRSKGIGHQKKTGRQYDY

SEQ ID NO: 5803 - protein, 426 aa, Zea mays subsp. mays
  peptide (1)..(426): Ceres Seq. ID no. 12409323
  misc_feature (17)..(131): Pfam Name: Nuclear transport factor 2 (NTF2) domain Pfam Description: Nuclear transport factor 2 (NTF2) domain
  misc_feature (17)..(415): Homolog of NCBI NO: 30697455 NR Description: NTF2-containing RNA-binding protein, putative
  misc_feature (17)..(415): Homolog of NCBI NO: 30697452 NR Description: NTF2-containing RNA-binding protein, putative
  misc_feature (17)..(415): Homolog of NCBI NO: 21553535 NR Description: ras-GTPase-activating protein SH3-domain binding
  misc_feature (15)..(421): Homolog of NCBI NO: 9294171 NR Description: RNA-binding protein-like [Arabidopsis thaliana]
  misc_feature (17)..(421): Homolog of NCBI NO: 30687772 NR Description: NTF2-containing RNA-binding protein, putative thaliana] >gi|17979475|gb|AAL50074.1| AT3g25150/MJL12_9 thaliana] >gi|21360395|gb|AAM47313.1| AT3g25150/MJL12_9
  misc_feature (17)..(416): Homolog of NCBI NO: 31126693 NR Description: putative GAP SH3 binding protein [Oryza sativa
  misc_feature (14)..(273): Homolog of NCBI NO: 15240057 NR Description: NTF2-containing RNA-binding protein, putative; id: At5g43960.1, supported by cDNA: gi_19347888, supported by gi_21281086 [Arabidopsis thaliana] >gi|9758555|dbj|BAB09056.1|
  misc_feature (154)..(417): Homolog of NCBI NO: 15240057 NR Description: NTF2-containing RNA-binding protein, putative; id: At5g43960.1, supported by cDNA: gi_19347888, supported by gi_21281086 [Arabidopsis thaliana] >gi|9758555|dbj|BAB09056.1|
  misc_feature (15)..(256): Homolog of NCBI NO: 10177355 NR Description: RNA-binding protein-like [Arabidopsis thaliana]
  misc_feature (226)..(421): Homolog of NCBI NO: 10177355 NR Description: RNA-binding protein-like [Arabidopsis thaliana]
MEQPEPKTAGHYYALQVGSVFLTGYYNVLTNQPHLANQFYTDNSSVVRLDCETGRWSFGETVEVINDMMMSMKLSKVEVKTANFLESWAGAITLLVTGLVKLKHYPVRKRFAQNIVLAPKEDRYFIFSDIFKLICDEYDDQYPFADYNCADNMPQVEASYTMAEIGSDYLDGEPEAQETVDPAENHVQHQDYLEYKAGNVIDDETHLEEHIPPFPSSTDVKRDSPLALPHPPSPTLEEPVEEAPKTYASVLRTKSKATLAITESQQAQQLAQQPQSASVHEKSNLDNHRDVSVPEDEEEFLSVYVGNLSPSTSVFDLEKVFQAFGRIKPDGVAIRSRKEAGVFFGFVEFEDMSGIQNALSASPVELNGRFVHVEERRPNCGFPRGRRGRGRADFSRDQAGGRYDGEYATRSKGIGHQKKTGRQYDY

SEQ ID NO: 5804 - protein, 359 aa, Zea mays subsp. mays
  peptide (1)..(359): Ceres Seq. ID no. 12409324
  misc_feature (1)..(64): Pfam Name: Nuclear transport factor 2 (NTF2) domain Pfam Description: Nuclear transport factor 2 (NTF2) domain
  misc_feature (1)..(348): Homolog of NCBI NO: 30697455 NR Description: NTF2-containing RNA-binding protein, putative
  misc_feature (1)..(348): Homolog of NCBI NO: 30697452 NR Description: NTF2-containing RNA-binding protein, putative
  misc_feature (1)..(348): Homolog of NCBI NO: 21553535 NR Description: ras-GTPase-activating protein SH3-domain binding
  misc_feature (1)..(354): Homolog of NCBI NO: 9294171 NR Description: RNA-binding protein-like [Arabidopsis thaliana]
  misc_feature (1)..(354): Homolog of NCBI NO: 30687772 NR Description: NTF2-containing RNA-binding protein, putative thaliana] >gi|17979475|gb|AAL50074.1| AT3g25150/MJL12_9 thaliana] >gi|21360395|gb|AAM47313.1| AT3g25150/MJL12_9
  misc_feature (1)..(349): Homolog of NCBI NO: 31126693 NR Description: putative GAP SH3 binding protein [Oryza sativa
  misc_feature (1)..(206): Homolog of NCBI NO: 15240057 NR Description: NTF2-containing RNA-binding protein, putative; id: At5g43960.1, supported by cDNA: gi_19347888, supported by gi_21281086 [Arabidopsis thaliana] >gi|9758555|dbj|BAB09056.1|
  misc_feature (87)..(350): Homolog of NCBI NO: 15240057 NR Description: NTF2-containing RNA-binding protein, putative; id: At5g43960.1, supported by cDNA: gi_19347888, supported by gi_21281086 [Arabidopsis thaliana] >gi|9758555|dbj|BAB09056.1|
  misc_feature (1)..(189): Homolog of NCBI NO: 10177355 NR Description: RNA-binding protein-like [Arabidopsis thaliana]
  misc_feature (159)..(354): Homolog of NCBI NO: 10177355 NR Description: RNA-binding protein-like [Arabidopsis thaliana]
MMMSMKLSKVEVKTANFLESWAGAITLLVTGLVKLKHYPVRKRFAQNIVLAPKEDRYFIFSDIFKLICDEYDDQYPFADYNCADNMPQVEASYTMAEIGSDYLDGEPEAQETVDPAENHVQHQDYLEYKAGNVIDDETHLEEHIPPFPSSTDVKRDSPLALPHPPSPTLEEPVEEAPKTYASVLRTKSKATLAITESQQAQQLAQQPQSASVHEKSNLDNHRDVSVPEDEEEFLSVYVGNLSPSTSVFDLEKVFQAFGRIKPDGVAIRSRKEAGVFFGFVEFEDMSGIQNALSASPVELNGRFVHVEERRPNCGFPRGRRGRGRADFSRDQAGGRYDGEYATRSKGIGHQKKTGRQYDY

SEQ ID NO: 5805 - DNA, 1519 bp, Zea mays subsp. mays; identical to SEQ ID NO: 3353
  misc_feature (1)..(1519): Ceres Seq. ID no. 13577756
  misc_feature: MA Experiment ID: 108523 Result: Down-regulated in Transcription
  misc_feature: MA Experiment 108523 PARAMETER Experiment Name: Zm_42deg_Heat_P Parameter: Age (day) Value: 8
  misc_feature: MA Experiment 108523 PARAMETER Experiment Name: Zm_42deg_Heat_P Parameter: Organism Value: Zea mays
  misc_feature: MA Experiment 108523 PARAMETER Experiment Name: Zm_42deg_Heat_P Parameter: Plant Line Value: 35A19
  misc_feature: MA Experiment 108523 PARAMETER Experiment Name: Zm_42deg_Heat_P Parameter: Temperature (deg C) Value: 42 vs. 22
  misc_feature: MA Experiment 108523 PARAMETER Experiment Name: Zm_42deg_Heat_P Parameter: Timepoint (hr) Value: 6
  misc_feature: MA Experiment 108523 PARAMETER Experiment Name: Zm_42deg_Heat_P Parameter: Tissue Value: Aerial
  misc_feature: MA Experiment ID: 108527 Result: Down-regulated in Transcription
  misc_feature: MA Experiment 108527 PARAMETER Experiment Name: Zm_5mM_NO_P Parameter: Age (day) Value: 8
  misc_feature: MA Experiment 108527 PARAMETER Experiment Name: Zm_5mM_NO_P Parameter: Organism Value: Zea mays
  misc_feature: MA Experiment 108527 PARAMETER Experiment Name: Zm_5mM_NO_P Parameter: Plant Line Value: 35A19
  misc_feature: MA Experiment 108527 PARAMETER Experiment Name: Zm_5mM_NO_P Parameter: Timepoint (hr) Value: 6
  misc_feature: MA Experiment 108527 PARAMETER Experiment Name: Zm_5mM_NO_P Parameter: Tissue Value: Aerial
  misc_feature: MA Experiment 108527 PARAMETER Experiment Name: Zm_5mM_NO_P Parameter: Treatment Value: 5mM NO vs. No Treatment
  misc_feature: MA Experiment ID: 108689 Result: Up-regulated in Transcription
  misc_feature: MA Experiment 108689 PARAMETER Experiment Name: Zm_Drought_Roots_P Parameter: Age (day) Value: 9
  misc_feature: MA Experiment 108689 PARAMETER Experiment Name: Zm_Drought_Roots_P Parameter: Organism Value: Zea mays
  misc_feature: MA Experiment 108689 PARAMETER Experiment Name: Zm_Drought_Roots_P Parameter: Plant Line Value: 35A19
  misc_feature: MA Experiment 108689 PARAMETER Experiment Name: Zm_Drought_Roots_P Parameter: Timepoint (hr) Value: 24
  misc_feature: MA Experiment 108689 PARAMETER Experiment Name: Zm_Drought_Roots_P Parameter: Tissue Value: Roots
  misc_feature: MA Experiment 108689 PARAMETER Experiment Name: Zm_Drought_Roots_P Parameter: Treatment Value: Drought vs. No Drought

SEQ ID NO: 5806 - protein, 273 aa, Zea mays subsp. mays; identical to SEQ ID NO: 3354
  peptide (1)..(273): Ceres Seq. ID no. 13577757
  misc_feature (1)..(179): Pfam Name: Sodium Bile acid symporter family Pfam Description: Sodium Bile acid symporter family
  misc_feature (1)..(271): Homolog of NCBI NO: 18416020 NR Description: bile acid:sodium symporter family [Arabidopsis >gi|17529350|gb|AAL38902.1| unknown protein [Arabidopsis >gi|21436155|gb|AAM51324.1| unknown protein [Arabidopsis
  misc_feature (1)..(271): Homolog of NCBI NO: 7486890 NR Description: hypothetical protein T12H17.230 - Arabidopsis >gi|2827561|emb|CAA16569.1| predicted protein [Arabidopsis >gi|3292809|emb|CAA19799.1| putative protein [Arabidopsis
  misc_feature (1)..(272): Homolog of NCBI NO: 18413732 NR Description: bile acid:sodium symporter family [Arabidopsis >gi|15215839|gb|AAK91464.1| AT4g12030/F16J13_100 [Arabidopsis >gi|20453271|gb|AAM19874.1| AT3g20560/K10D20_9 [Arabidopsis
  misc_feature (1)..(253): Homolog of NCBI NO: 7485566 NR Description: hypothetical protein F16J13.100 - Arabidopsis >gi|4586108|emb|CAB40944.1| putative transport protein thaliana] >gi|7267904|emb|CAB78246.1| putative transport protein
  misc_feature (1)..(267): Homolog of NCBI NO: 18404505 NR Description: bile acid:sodium symporter family [Arabidopsis >gi|19698909|gb|AAL91190.1| unknown protein [Arabidopsis >gi|22136206|gb|AAM91181.1| unknown protein [Arabidopsis
  misc_feature (1)..(267): Homolog of NCBI NO: 21554890 NR Description: unknown [Arabidopsis thaliana]
  misc_feature (1)..(255): Homolog of NCBI NO: 9279722 NR Description: contains similarity to transporter
  misc_feature (1)..(267): Homolog of NCBI NO: 20269901 NR Description: putative sodium-dependent bile acid symporter
  misc_feature (1)..(267): Homolog of NCBI NO: 30683305 NR Description: bile acid:sodium symporter family [Arabidopsis
  misc_feature (1)..(270): Homolog of NCBI NO: 34911708 NR Description: P0707D10.18 [Oryza sativa (japonica

SEQ ID NO: 5807 - protein, 214 aa, Zea mays subsp. mays; identical to SEQ ID NO: 3355
  peptide (1)..(214): Ceres Seq. ID no. 13577758
  misc_feature (1)..(120): Pfam Name: Sodium Bile acid symporter family Pfam Description: Sodium Bile acid symporter family
  misc_feature (1)..(212): Homolog of NCBI NO: 18416020 NR Description: bile acid:sodium symporter family [Arabidopsis >gi|17529350|gb|AAL38902.1| unknown protein [Arabidopsis >gi|21436155|gb|AAM51324.1| unknown protein [Arabidopsis
  misc_feature (1)..(212): Homolog of NCBI NO: 7486890 NR Description: hypothetical protein T12H17.230 - Arabidopsis >gi|2827561|emb|CAA16569.1| predicted protein [Arabidopsis >gi|3292809|emb|CAA19799.1| putative protein [Arabidopsis
  misc_feature (1)..(213): Homolog of NCBI NO: 18413732 NR Description: bile acid:sodium symporter family [Arabidopsis >gi|15215839|gb|AAK91464.1| AT4g12030/F16J13_100 [Arabidopsis >gi|20453271|gb|AAM19874.1| AT3g20560/K10D20_9 [Arabidopsis
  misc_feature (1)..(194): Homolog of NCBI NO: 7485566 NR Description: hypothetical protein F16J13.100 - Arabidopsis >gi|4586108|emb|CAB40944.1| putative transport protein thaliana] >gi|7267904|emb|CAB78246.1| putative transport protein
  misc_feature (1)..(208): Homolog of NCBI NO: 18404505 NR Description: bile acid:sodium symporter family [Arabidopsis >gi|19698909|gb|AAL91190.1| unknown protein [Arabidopsis >gi|22136206|gb|AAM91181.1| unknown protein [Arabidopsis
  misc_feature (1)..(208): Homolog of NCBI NO: 21554890 NR Description: unknown [Arabidopsis thaliana]
  misc_feature (1)..(196): Homolog of NCBI NO: 9279722 NR Description: contains similarity to transporter
  misc_feature (1)..(208): Homolog of NCBI NO: 20269901 NR Description: putative sodium-dependent bile acid symporter
  misc_feature (1)..(208): Homolog of NCBI NO: 30683305 NR Description: bile acid:sodium symporter family [Arabidopsis
  misc_feature (1)..(211): Homolog of NCBI NO: 34911708 NR Description: P0707D10.18 [Oryza sativa (japonica

SEQ ID NO: 5808 - protein, 192 aa, Zea mays subsp. mays; identical to SEQ ID NO: 3356
  peptide (1)..(192): Ceres Seq. ID no. 13577759
  misc_feature (1)..(98): Pfam Name: Sodium Bile acid symporter family Pfam Description: Sodium Bile acid symporter family
  misc_feature (1)..(190): Homolog of NCBI NO: 18416020 NR Description: bile acid:sodium symporter family [Arabidopsis >gi|17529350|gb|AAL38902.1| unknown protein [Arabidopsis >gi|21436155|gb|AAM51324.1| unknown protein [Arabidopsis
  misc_feature (1)..(190): Homolog of NCBI NO: 7486890 NR Description: hypothetical protein T12H17.230 - Arabidopsis >gi|2827561|emb|CAA16569.1| predicted protein [Arabidopsis >gi|3292809|emb|CAA19799.1| putative protein [Arabidopsis
  misc_feature (1)..(191): Homolog of NCBI NO: 18413732 NR Description: bile acid:sodium symporter family [Arabidopsis >gi|15215839|gb|AAK91464.1| AT4g12030/F16J13_100 [Arabidopsis >gi|20453271|gb|AAM19874.1| AT3g20560/K10D20_9 [Arabidopsis
  misc_feature (1)..(172): Homolog of NCBI NO: 7485566 NR Description: hypothetical protein F16J13.100 - Arabidopsis >gi|4586108|emb|CAB40944.1| putative transport protein thaliana] >gi|7267904|emb|CAB78246.1| putative transport protein
  misc_feature (1)..(186): Homolog of NCBI NO: 18404505 NR Description: bile acid:sodium symporter family [Arabidopsis >gi|19698909|gb|AAL91190.1| unknown protein [Arabidopsis >gi|22136206|gb|AAM91181.1| unknown protein [Arabidopsis
  misc_feature (1)..(186): Homolog of NCBI NO: 21554890 NR Description: unknown [Arabidopsis thaliana]
  misc_feature (1)..(174): Homolog of NCBI NO: 9279722 NR Description: contains similarity to transporter
  misc_feature (1)..(186): Homolog of NCBI NO: 20269901 NR Description: putative sodium-dependent bile acid symporter
  misc_feature (1)..(186): Homolog of NCBI NO: 30683305 NR Description: bile acid:sodium symporter family [Arabidopsis
  misc_feature (1)..(189): Homolog of NCBI NO: 34911708 NR Description: P0707D10.18 [Oryza sativa (japonica

SEQ ID NO: 5809 - DNA, 1418 bp, Zea mays subsp. mays
  misc_feature (1)..(1418): Ceres Seq. ID no. 13564606
  misc_feature: MA Experiment ID: 108543 Result: Down-regulated in Transcription
  misc_feature: MA Experiment ID: 108689 Result: Up-regulated in Transcription
  misc_feature: MA Experiment 108689 PARAMETER Experiment Name: Zm_Drought_Roots_P Parameter: Age (day) Value: 9
  misc_feature: MA Experiment 108689 PARAMETER Experiment Name: Zm_Drought_Roots_P Parameter: Organism Value: Zea mays
  misc_feature: MA Experiment 108689 PARAMETER Experiment Name: Zm_Drought_Roots_P Parameter: Plant Line Value: 35A19
  misc_feature: MA Experiment 108689 PARAMETER Experiment Name: Zm_Drought_Roots_P Parameter: Timepoint (hr) Value: 24
  misc_feature: MA Experiment 108689 PARAMETER Experiment Name: Zm_Drought_Roots_P Parameter: Tissue Value: Roots
  misc_feature: MA Experiment 108689 PARAMETER Experiment Name: Zm_Drought_Roots_P Parameter: Treatment Value: Drought vs. No Drought
gcacgagaccattacctagaacatcytaatcgaaaaacaagagtagggagtggtgcgagaaatcaatccgccccatgcccacatccgtcgccacccacgcaaccctcctcatcaaagccgcagccgccaagcccttcttctcsccccgcccggcggcccggatccccgccccttctcctcaccctcctcccccgcccgccggccgccgcctgccgaacacggcggccgctctcgccgccgcagcccgtcggttccggtggccgtcggcggccgcgtcggcgcgggggctgtgcgcgccgccgcattccggcggcgaggggatgggatctgatgcgggggcgggggccaggaagaggcgggacccggccgtgaacgggctcgccaaggacgtgccgccagtgaacgggatgatgatgcccaaggaggagccggcgaccgcgccgcccaggttgctcacgctgcccaccgtgctcaccattggccgcgtcgctgctgtgccgcttctgatcagcactttctacatggagggtccatgggcagctacggccacaacaggcatctttcttgctgctgcagtcactgattggctagatggttatatcgctagaaagatgcagctaggaacaccttttggtgcatttcttgatcctgtggctgacaagcttatggtagccgcaacattagttttactatgcaccaaacctttggaaacatcactgctcaatgatgggccatggcttctaacagtcccttccattgctatcattgggagagagattacaatgtcagctgtgagagaatgggccgcatctcagaatagtgaagctcttgaggctgttgcagttaacaacttagggaagtggaagacagcaacgcagatgacagcattgactctgcttctcgccagcagagacccaagtgtacctgcgcaaggtgctctagttgcccccggtgttgctctactttacatttccgctggactcgccatatggtccctagtggtgtacatgagaaagatatggcggatacttctaaaatagtattagcacaatatatatagtgtagtagaagaaacagaagcaaggcgaggttctattcgtgatcgtacgatttttggaaggctgcttagttgattggtggactgggacctagagctgcttgtgatcctcattcctcagtaacttgtgcgtcatctatttttgccgccaaatttgctgaagtatgccaggattctagacatgatgtgaccctgcgtgcttaaggagacataagtctgcaatgcagaagattgtaacccaatacaaacacaaaacccggaggtttgtgcatgtggagttctatcattgtaatctgcacataatatcatatgccaggagcatgcaattattcttttcagtggggacgatatccctgtctcc

SEQ ID NO: 5810 - protein, 321 aa, Zea mays subsp. mays
  peptide (1)..(321): Ceres Seq. ID no. 15222577
  misc_feature (160)..(314): Pfam Name: CDP-alcohol phosphatidyltransferase Pfam Description: CDP-alcohol phosphatidyltransferase
  misc_feature (160)..(314): Pfam Name: CDP-alcohol phosphatidyltransferase Pfam Description: CDP-alcohol phosphatidyltransferase
  misc_feature (1)..(321): Homolog of NCBI NO: 24796824 NR Description: putative phosphatidylglycerolphosphate synthase
  misc_feature (119)..(321): Homolog of NCBI NO: 15225064 NR Description: phosphatidylglycerolphosphate synthase (PGS1)
  misc_feature (101)..(321): Homolog of NCBI NO: 15233163 NR Description: phosphatidylglycerolphosphate synthase (PGS1), [Arabidopsis thaliana] >gi|11358616|pir||T47642
  misc_feature (127)..(316): Homolog of NCBI NO: 23061902 NR Description: hypothetical protein [Pseudomonas fluorescens
  misc_feature (127)..(316): Homolog of NCBI NO: 23472904 NR Description: hypothetical protein [Pseudomonas syringae pv.
  misc_feature (119)..(321): Homolog of NCBI NO: 15225064 NR Description: phosphatidylglycerolphosphate synthase (PGS1)
  misc_feature (127)..(316): Homolog of NCBI NO: 23061902 NR Description: hypothetical protein [Pseudomonas fluorescens
  misc_feature (127)..(316): Homolog of NCBI NO: 15597780 NR Description: CDP-diacylglycerol--glycerol-3-phosphate 3-
  misc_feature (127)..(316): Homolog of NCBI NO: 23104171 NR Description: hypothetical protein [Azotobacter vinelandii]
  misc_feature (127)..(316): Homolog of NCBI NO: 26990792 NR Description: CDP-diacylglycerol--glycerol-3-phosphate 3-
  misc_feature (127)..(316): Homolog of NCBI NO: 28870198 NR Description: CDP-diacylglycerol--glycerol-3-phosphate 3-
  misc_feature (127)..(316): Homolog of NCBI NO: 27753591 NR Description: CDP-diacylglycerol-glycerol-3-phosphate
  misc_feature (127)..(316): Homolog of NCBI NO: 23472904 NR Description: hypothetical protein [Pseudomonas syringae pv.
  misc_feature (101)..(321): Homolog of NCBI NO: 15233163 NR Description: phosphatidylglycerolphosphate synthase (PGS1), [Arabidopsis thaliana] >gi|11358616|pir||T47642
  misc_feature (1)..(321): Homolog of NCBI NO: 24796824 NR Description: putative phosphatidylglycerolphosphate synthase
  misc_feature (127)..(316): Homolog of NCBI NO: 27753591 NR Description: CDP-diacylglycerol-glycerol-3-phosphate
  misc_feature (127)..(316): Homolog of NCBI NO: 28870198 NR Description: CDP-diacylglycerol--glycerol-3-phosphate 3-
  misc_feature (127)..(316): Homolog of NCBI NO: 26990792 NR Description: CDP-diacylglycerol--glycerol-3-phosphate 3-
  misc_feature (127)..(316): Homolog of NCBI NO: 23104171 NR Description: hypothetical protein [Azotobacter vinelandii]
  misc_feature (127)..(316): Homolog of NCBI NO: 15597780 NR Description: CDP-diacylglycerol--glycerol-3-phosphate 3-
  misc_feature (23)..(23): Xaa is any aa, unknown or other
MPTSVATHATLLIKAAAAKPFFXPRPAARIPAPSPHPPPPPAGRRLPNTAAALAAAARRFRWPSAAASARGLCAPPHSGGEGMGSDAGAGARKRRDPAVNGLAKDVPPVNGMMMPKEEPATAPPRLLTLPTVLTIGRVAAVPLLISTFYMEGPWAATATTGIFLAAAVTDWLDGYIARKMQLGTPFGAFLDPVADKLMVAATLVLLCTKPLETSLLNDGPWLLTVPSIAIIGREITMSAVREWAASQNSEALEAVAVNNLGKWKTATQMTALTLLLASRDPSVPAQGALVAPGVALLYISAGLAIWSLVVYMRKIWRILLK

SEQ ID NO: 5811 - protein, 239 aa, Zea mays subsp. mays
  peptide (1)..(239): Ceres Seq. ID no. 15222578
  misc_feature (78)..(232): Pfam Name: CDP-alcohol phosphatidyltransferase Pfam Description: CDP-alcohol phosphatidyltransferase
  misc_feature (78)..(232): Pfam Name: CDP-alcohol phosphatidyltransferase Pfam Description: CDP-alcohol phosphatidyltransferase
  misc_feature (1)..(239): Homolog of NCBI NO: 24796824 NR Description: putative phosphatidylglycerolphosphate synthase
  misc_feature (37)..(239): Homolog of NCBI NO: 15225064 NR Description: phosphatidylglycerolphosphate synthase (PGS1)
  misc_feature (19)..(239): Homolog of NCBI NO: 15233163 NR Description: phosphatidylglycerolphosphate synthase (PGS1), [Arabidopsis thaliana] >gi|11358616|pir||T47642
  misc_feature (45)..(234): Homolog of NCBI NO: 23061902 NR Description: hypothetical protein [Pseudomonas fluorescens
  misc_feature (45)..(234): Homolog of NCBI NO: 23472904 NR Description: hypothetical protein [Pseudomonas syringae pv.
  misc_feature (37)..(239): Homolog of NCBI NO: 15225064 NR Description: phosphatidylglycerolphosphate synthase (PGS1)
  misc_feature (45)..(234): Homolog of NCBI NO: 23061902 NR Description: hypothetical protein [Pseudomonas fluorescens
  misc_feature (45)..(234): Homolog of NCBI NO: 15597780 NR Description: CDP-diacylglycerol--glycerol-3-phosphate 3-
  misc_feature (45)..(234): Homolog of NCBI NO: 23104171 NR Description: hypothetical protein [Azotobacter vinelandii]
  misc_feature (45)..(234): Homolog of NCBI NO: 26990792 NR Description: CDP-diacylglycerol--glycerol-3-phosphate 3-
  misc_feature (45)..(234): Homolog of NCBI NO: 28870198 NR Description: CDP-diacylglycerol--glycerol-3-phosphate 3-
  misc_feature (45)..(234): Homolog of NCBI NO: 27753591 NR Description: CDP-diacylglycerol-glycerol-3-phosphate
  misc_feature (45)..(234): Homolog of NCBI NO: 23472904 NR Description: hypothetical protein [Pseudomonas syringae pv.
  misc_feature (19)..(239): Homolog of NCBI NO: 15233163 NR Description: phosphatidylglycerolphosphate synthase (PGS1), [Arabidopsis thaliana] >gi|11358616|pir||T47642
  misc_feature (1)..(239): Homolog of NCBI NO: 24796824 NR Description: putative phosphatidylglycerolphosphate synthase
  misc_feature (45)..(234): Homolog of NCBI NO: 27753591 NR Description: CDP-diacylglycerol-glycerol-3-phosphate
  misc_feature (45)..(234): Homolog of NCBI NO: 28870198 NR Description: CDP-diacylglycerol--glycerol-3-phosphate 3-
  misc_feature (45)..(234): Homolog of NCBI NO: 26990792 NR Description: CDP-diacylglycerol--glycerol-3-phosphate 3-
  misc_feature (45)..(234): Homolog of NCBI NO: 23104171 NR Description: hypothetical protein [Azotobacter vinelandii]
  misc_feature (45)..(234): Homolog of NCBI NO: 15597780 NR Description: CDP-diacylglycerol--glycerol-3-phosphate 3-
MGSDAGAGARKRRDPAVNGLAKDVPPVNGMMMPKEEPATAPPRLLTLPTVLTIGRVAAVPLLISTFYMEGPWAATATTGIFLAAAVTDWLDGYIARKMQLGTPFGAFLDPVADKLMVAATLVLLCTKPLETSLLNDGPWLLTVPSIAIIGREITMSAVREWAASQNSEALEAVAVNNLGKWKTATQMTALTLLLASRDPSVPAQGALVAPGVALLYISAGLAIWSLVVYMRKIWRILLK

SEQ ID NO: 5812 - protein, 210 aa, Zea mays subsp. mays
  peptide (1)..(210): Ceres Seq. ID no. 15222579
  misc_feature (49)..(203): Pfam Name: CDP-alcohol phosphatidyltransferase Pfam Description: CDP-alcohol phosphatidyltransferase
  misc_feature (49)..(203): Pfam Name: CDP-alcohol phosphatidyltransferase Pfam Description: CDP-alcohol phosphatidyltransferase
  misc_feature (8)..(210): Homolog of NCBI NO: 15225064 NR Description: phosphatidylglycerolphosphate synthase (PGS1)
  misc_feature (1)..(210): Homolog of NCBI NO: 15233163 NR Description: phosphatidylglycerolphosphate synthase (PGS1), [Arabidopsis thaliana] >gi|11358616|pir||T47642
  misc_feature (16)..(205): Homolog of NCBI NO: 23061902 NR Description: hypothetical protein [Pseudomonas fluorescens
  misc_feature (16)..(205): Homolog of NCBI NO: 23472904 NR Description: hypothetical protein [Pseudomonas syringae pv.
  misc_feature (16)..(205): Homolog of NCBI NO: 27753591 NR Description: CDP-diacylglycerol-glycerol-3-phosphate
  misc_feature (16)..(205): Homolog of NCBI NO: 23061902 NR Description: hypothetical protein [Pseudomonas fluorescens
  misc_feature (16)..(205): Homolog of NCBI NO: 27753591 NR Description: CDP-diacylglycerol-glycerol-3-phosphate
  misc_feature (16)..(205): Homolog of NCBI NO: 26990792 NR Description: CDP-diacylglycerol--glycerol-3-phosphate 3-
  misc_feature (1)..(210): Homolog of NCBI NO: 15233163 NR Description: phosphatidylglycerolphosphate synthase (PGS1), [Arabidopsis thaliana] >gi|11358616|pir||T47642
  misc_feature (8)..(210): Homolog of NCBI NO: 15225064 NR Description: phosphatidylglycerolphosphate synthase (PGS1)
  misc_feature (1)..(210): Homolog of NCBI NO: 24796824 NR Description: putative phosphatidylglycerolphosphate synthase
  misc_feature (16)..(205): Homolog of NCBI NO: 15597780 NR Description: CDP-diacylglycerol--glycerol-3-phosphate 3-
  misc_feature (16)..(205): Homolog of NCBI NO: 23104171 NR Description: hypothetical protein [Azotobacter vinelandii]
  misc_feature (16)..(205): Homolog of NCBI NO: 28870198 NR Description: CDP-diacylglycerol--glycerol-3-phosphate 3-
  misc_feature (16)..(205): Homolog of NCBI NO: 23472904 NR Description: hypothetical protein [Pseudomonas syringae pv.
  misc_feature (1)..(210): Homolog of NCBI NO: 24796824 NR Description: putative phosphatidylglycerolphosphate synthase
  misc_feature (16)..(205): Homolog of NCBI NO: 28870198 NR Description: CDP-diacylglycerol--glycerol-3-phosphate 3-
  misc_feature (16)..(205): Homolog of NCBI NO: 26990792 NR Description: CDP-diacylglycerol--glycerol-3-phosphate 3-
  misc_feature (16)..(205): Homolog of NCBI NO: 23104171 NR Description: hypothetical protein [Azotobacter vinelandii]
  misc_feature (16)..(205): Homolog of NCBI NO: 15597780 NR Description: CDP-diacylglycerol--glycerol-3-phosphate 3-
MMMPKEEPATAPPRLLTLPTVLTIGRVAAVPLLISTFYMEGPWAATATTGIFLAAAVTDWLDGYIARKMQLGTPFGAFLDPVADKLMVAATLVLLCTKPLETSLLNDGPWLLTVPSIAIIGREITMSAVREWAASQNSEALEAVAVNNLGKWKTATQMTALTLLLASRDPSVPAQGALVAPGVALLYISAGLAIWSLVVYMRKIWRILLK

SEQ ID NO: 5813 - DNA, 1140 bp, Zea mays subsp. mays
  misc_feature (1)..(1140): Ceres Seq. ID no. 12409319
  misc_feature: MA Experiment ID: 108504 Result: Up-regulated in Transcription
  misc_feature: MA Experiment 108504 PARAMETER Experiment Name: Zm_Drought_P Parameter: Age (day) Value: 8
  misc_feature: MA Experiment 108504 PARAMETER Experiment Name: Zm_Drought_P Parameter: Organism Value: Zea mays
  misc_feature: MA Experiment 108504 PARAMETER Experiment Name: Zm_Drought_P Parameter: Plant Line Value: 35A19
  misc_feature: MA Experiment 108504 PARAMETER Experiment Name: Zm_Drought_P Parameter: Timepoint (hr) Value: 12
  misc_feature: MA Experiment 108504 PARAMETER Experiment Name: Zm_Drought_P Parameter: Tissue Value: Aerial
  misc_feature: MA Experiment 108504 PARAMETER Experiment Name: Zm_Drought_P Parameter: Treatment Value: Drought vs. No Drought
  misc_feature: MA Experiment ID: 108540 Result: Up-regulated in Transcription
  misc_feature: MA Experiment 108540 PARAMETER Experiment Name: Zm_20percent_PEG_P Parameter: Age (day) Value: 8
  misc_feature: MA Experiment 108540 PARAMETER Experiment Name: Zm_20percent_PEG_P Parameter: Organism Value: Zea mays
  misc_feature: MA Experiment 108540 PARAMETER Experiment Name: Zm_20percent_PEG_P Parameter: Plant Line Value: 35A19
  misc_feature: MA Experiment 108540 PARAMETER Experiment Name: Zm_20percent_PEG_P Parameter: Timepoint (hr) Value: 6
  misc_feature: MA Experiment 108540 PARAMETER Experiment Name: Zm_20percent_PEG_P Parameter: Tissue Value: Aerial
  misc_feature: MA Experiment 108540 PARAMETER Experiment Name: Zm_20percent_PEG_P Parameter: Treatment Value: 20percent PEG vs. No Treatment
  misc_feature: MA Experiment ID: 108556 Result: Up-regulated in Transcription
  misc_feature: MA Experiment 108556 PARAMETER Experiment Name: Zm_Drought_P Parameter: Age (day) Value: 9
  misc_feature: MA Experiment 108556 PARAMETER Experiment Name: Zm_Drought_P Parameter: Organism Value: Zea mays
  misc_feature: MA Experiment 108556 PARAMETER Experiment Name: Zm_Drought_P Parameter: Plant Line Value: 35A19
  misc_feature: MA Experiment 108556 PARAMETER Experiment Name: Zm_Drought_P Parameter: Timepoint (hr) Value: 24
  misc_feature: MA Experiment 108556 PARAMETER Experiment Name: Zm_Drought_P Parameter: Tissue Value: Aerial
  misc_feature: MA Experiment 108556 PARAMETER Experiment Name: Zm_Drought_P Parameter: Treatment Value: Drought vs. No Drought
  misc_feature: MA Experiment ID: 108597 Result: Up-regulated in Transcription
  misc_feature: MA Experiment 108597 PARAMETER Experiment Name: Zm_100uM_ABA_P Parameter: Age (day) Value: 9
  misc_feature: MA Experiment 108597 PARAMETER Experiment Name: Zm_100uM_ABA_P Parameter: Organism Value: Zea mays
  misc_feature: MA Experiment 108597 PARAMETER Experiment Name: Zm_100uM_ABA_P Parameter: Plant Line Value: 35A19
  misc_feature: MA Experiment 108597 PARAMETER Experiment Name: Zm_100uM_ABA_P Parameter: Timepoint (hr) Value: 24
  misc_feature: MA Experiment 108597 PARAMETER Experiment Name: Zm_100uM_ABA_P Parameter: Tissue Value: Aerial
  misc_feature: MA Experiment 108597 PARAMETER Experiment Name: Zm_100uM_ABA_P Parameter: Treatment Value: 100uM ABA vs. No Treatment
  misc_feature: MA Experiment ID: 108689 Result: Up-regulated in Transcription
  misc_feature: MA Experiment 108689 PARAMETER Experiment Name: Zm_Drought_Roots_P Parameter: Age (day) Value: 9
  misc_feature: MA Experiment 108689 PARAMETER Experiment Name: Zm_Drought_Roots_P Parameter: Organism Value: Zea mays
  misc_feature: MA Experiment 108689 PARAMETER Experiment Name: Zm_Drought_Roots_P Parameter: Plant Line Value: 35A19
  misc_feature: MA Experiment 108689 PARAMETER Experiment Name: Zm_Drought_Roots_P Parameter: Timepoint (hr) Value: 24
  misc_feature: MA Experiment 108689 PARAMETER Experiment Name: Zm_Drought_Roots_P Parameter: Tissue Value: Roots
  misc_feature: MA Experiment 108689 PARAMETER Experiment Name: Zm_Drought_Roots_P Parameter: Treatment Value: Drought vs. No Drought
  misc_feature: MA Experiment ID: 20000478 Result: Up-regulated in Transcription
  misc_feature: MA Experiment 20000478 PARAMETER Experiment Name: Zm_5mM_SA_P Parameter: Age (day) Value: 11
  misc_feature: MA Experiment 20000478 PARAMETER Experiment Name: Zm_5mM_SA_P Parameter: Organism Value: Zea mays
  misc_feature: MA Experiment 20000478 PARAMETER Experiment Name: Zm_5mM_SA_P Parameter: Plant Line Value: 35A19
  misc_feature: MA Experiment 20000478 PARAMETER Experiment Name: Zm_5mM_SA_P Parameter: Timepoint (hr) Value: 72
  misc_feature: MA Experiment 20000478 PARAMETER Experiment Name: Zm_5mM_SA_P Parameter: Tissue Value: Aerial
  misc_feature: MA Experiment 20000478 PARAMETER Experiment Name: Zm_5mM_SA_P Parameter: Treatment Value: 5mM SA vs. No Treatment
  misc_feature: MA Experiment ID: 20000479 Result: Up-regulated in Transcription
  misc_feature: MA Experiment 20000479 PARAMETER Experiment Name: Zm_Drought_P Parameter: Age (day) Value: 10
  misc_feature: MA Experiment 20000479 PARAMETER Experiment Name: Zm_Drought_P Parameter: Organism Value: Zea mays
  misc_feature: MA Experiment 20000479 PARAMETER Experiment Name: Zm_Drought_P Parameter: Plant Line Value: 35A19
  misc_feature: MA Experiment 20000479 PARAMETER Experiment Name: Zm_Drought_P Parameter: Timepoint (hr) Value: 48
  misc_feature: MA Experiment 20000479 PARAMETER Experiment Name: Zm_Drought_P Parameter: Tissue Value: Aerial
  misc_feature: MA Experiment 20000479 PARAMETER Experiment Name: Zm_Drought_P Parameter: Treatment Value: Drought vs. No Drought
  misc_feature: MA Experiment ID: 20000480 Result: Up-regulated in Transcription
  misc_feature: MA Experiment 20000480 PARAMETER Experiment Name: Zm_Drought_P Parameter: Age (day) Value: 11
  misc_feature: MA Experiment 20000480 PARAMETER Experiment Name: Zm_Drought_P Parameter: Organism Value: Zea mays
  misc_feature: MA Experiment 20000480 PARAMETER Experiment Name: Zm_Drought_P Parameter: Plant Line Value: 35A19
  misc_feature: MA Experiment 20000480 PARAMETER Experiment Name: Zm_Drought_P Parameter: Timepoint (hr) Value: 72
  misc_feature: MA Experiment 20000480 PARAMETER Experiment Name: Zm_Drought_P Parameter: Tissue Value: Aerial
  misc_feature: MA Experiment 20000480 PARAMETER Experiment Name: Zm_Drought_P Parameter: Treatment Value: Drought vs. No Drought
agtcccagacgaaacaagcctggtggtagtgggtaccttgccgttgcccggcctggccggctggccctcgtgtgcgttcctcgctcgatctccctccttcggtcaaaagccaacatgacaacacacgagtctgggtagctgtcccccgcgcggctcgccccctcgctcctcggcgccgctgccggcccgcgcctgcgcctgcggctcgcgccctctatacctccgcccgcccgtccccctcgtgccgctctgcctgccccccgcattccgcgccgcctcgccaccgaactgggaggaatctgcggggaagggggatatggggtcgccgggtgcggggagcagcggcggccacgagtgctccttcaagttcctcctcatcggggactcgggcgtcggcaagagcagcctcctcgtcagcttcgtcgccgcctcctacctcgacggcgacatcgcccccaccatcggtgtggattttaaaatcaagttccttacagttggtggaaagaaactaaagttgacaatatgggatactgctggccaggagaggtttaggacaattactagttcttactacagaggtgctcagggaattattctagtatatgatgtcacaaagagagaaagtttctcaaatttggctgatgtttggactaaggaaatagaagcaaactcaacaaacaaagactgcataaaaatgcttgttggaaacaaagttgacaaggatgatgaaagaatggtcacaaaagaggaaggtcttgcttttgctgaagaatatggatgtctgtttcttgagagcagtgcaaaaacacgagaaaacgttgagaaatgttttgaggaacttgcattgaagattcttgaggtgcctagtctcctagaggaagggtcttcttcggttgtcaagaggaacatcctgaaacagaagcaggaaagtgatgcaaagaacggtagtggatgctgtcaatagatgtatgtgctgatccacaccacacggttggctttcttcgtgtgagctgccctgattgtctgctgtacatgttcttgtgagtaagaagggcgagcataattgatttgtacaaaggacatgtcagtttggtgtcatagttttcctcatctccagtttagtatagcaattttgttgtc

SEQ ID NO: 5814 - protein, 215 aa, Zea mays subsp. mays
  peptide (1)..(215): Ceres Seq. ID no. 12409320
  misc_feature (17)..(181): Pfam Name: Ras family Pfam Description: Ras family
  misc_feature (1)..(215): Homolog of NCBI NO: 37534998 NR Description: putative GTP-binding protein [Oryza sativa
  misc_feature (9)..(215): Homolog of NCBI NO: 15451614 NR Description: Putative GTP-binding protein [Oryza sativa]
  misc_feature (6)..(214): Homolog of NCBI NO: 1370172 NR Description: RAB1X [Lotus japonicus]
  misc_feature (1)..(214): Homolog of NCBI NO: 18414255 NR Description: putative protein; protein id: At5g03530.1,
  misc_feature (7)..(214): Homolog of NCBI NO: 15218575 NR Description: GTP-binding protein(RAB1Y), putative; protein id: supported by cDNA: 2898., supported by cDNA: gi_17104730, by cDNA: gi_2231311 [Arabidopsis thaliana]
  misc_feature (16)..(214): Homolog of NCBI NO: 1370174 NR Description: RAB1Y [Lotus japonicus]
  misc_feature (1)..(214): Homolog of NCBI NO: 15232785 NR Description: GTP-binding protein, putative; protein id:
  misc_feature (73)..(214): Homolog of NCBI NO: 25294118 NR Description: protein F9C16.3 [imported] - Arabidopsis thaliana
  misc_feature (7)..(72): Homolog of NCBI NO: 25294118 NR Description: protein F9C16.3 [imported] - Arabidopsis thaliana
  misc_feature (15)..(212): Homolog of NCBI NO: 40807131 NR Description: Unknown (protein for MGC:77145) [Danio rerio]
MGSPGAGSSGGHECSFKFLLIGDSGVGKSSLLVSFVAASYLDGDIAPTIGVDFKIKFLTVGGKKLKLTIWDTAGQERFRTITSSYYRGAQGIILVYDVTKRESFSNLADVWTKEIEANSTNKDCIKMLVGNKVDKDDERMVTKEEGLAFAEEYGCLFLESSAKTRENVEKCFEELALKILEVPSLLEEGSSSVVKRNILKQKQESDAKNGSGCCQ

SEQ ID NO: 5815 - DNA, 1968 bp, Zea mays subsp. mays
  misc_feature (1)..(1968): Ceres Seq. ID no. 12362596
  misc_feature: MA Experiment ID: 108523 Result: Up-regulated in Transcription
  misc_feature: MA Experiment 108523 PARAMETER Experiment Name: Zm_42deg_Heat_P Parameter: Age (day) Value: 8
  misc_feature: MA Experiment 108523 PARAMETER Experiment Name: Zm_42deg_Heat_P Parameter: Organism Value: Zea mays
  misc_feature: MA Experiment 108523 PARAMETER Experiment Name: Zm_42deg_Heat_P Parameter: Plant Line Value: 35A19
  misc_feature: MA Experiment 108523 PARAMETER Experiment Name: Zm_42deg_Heat_P Parameter: Temperature (deg C) Value: 42 vs. 22
  misc_feature: MA Experiment 108523 PARAMETER Experiment Name: Zm_42deg_Heat_P Parameter: Timepoint (hr) Value: 6
  misc_feature: MA Experiment 108523 PARAMETER Experiment Name: Zm_42deg_Heat_P Parameter: Tissue Value: Aerial
  misc_feature: MA Experiment ID: 108543 Result: Down-regulated in Transcription
  misc_feature: MA Experiment ID: 20000479 Result: Up-regulated in Transcription
  misc_feature: MA Experiment 20000479 PARAMETER Experiment Name: Zm_Drought_P Parameter: Age (day) Value: 10
  misc_feature: MA Experiment 20000479 PARAMETER Experiment Name: Zm_Drought_P Parameter: Organism Value: Zea mays
  misc_feature: MA Experiment 20000479 PARAMETER Experiment Name: Zm_Drought_P Parameter: Plant Line Value: 35A19
  misc_feature: MA Experiment 20000479 PARAMETER Experiment Name: Zm_Drought_P Parameter: Timepoint (hr) Value: 48
  misc_feature: MA Experiment 20000479 PARAMETER Experiment Name: Zm_Drought_P Parameter: Tissue Value: Aerial
  misc_feature: MA Experiment 20000479 PARAMETER Experiment Name: Zm_Drought_P Parameter: Treatment Value: Drought vs. No Drought
  misc_feature: MA Experiment ID: 20000480 Result: Up-regulated in Transcription
  misc_feature: MA Experiment 20000480 PARAMETER Experiment Name: Zm_Drought_P Parameter: Age (day) Value: 11
  misc_feature: MA Experiment 20000480 PARAMETER Experiment Name: Zm_Drought_P Parameter: Organism Value: Zea mays
  misc_feature: MA Experiment 20000480 PARAMETER Experiment Name: Zm_Drought_P Parameter: Plant Line Value: 35A19
  misc_feature: MA Experiment 20000480 PARAMETER Experiment Name: Zm_Drought_P Parameter: Timepoint (hr) Value: 72
  misc_feature: MA Experiment 20000480 PARAMETER Experiment Name: Zm_Drought_P Parameter: Tissue Value: Aerial
  misc_feature: MA Experiment 20000480 PARAMETER Experiment Name: Zm_Drought_P Parameter: Treatment Value: Drought vs. No Drought
  misc_feature: MA Experiment ID: 20000535 Result: Up-regulated in Transcription
  misc_feature: MA Experiment 20000535 PARAMETER Experiment Name: Zm_Hybrid_Seed_Dev_P Parameter: DAP Value: 30 vs. 12
  misc_feature: MA Experiment 20000535 PARAMETER Experiment Name: Zm_Hybrid_Seed_Dev_P Parameter: Organism Value: Zea mays
  misc_feature: MA Experiment 20000535 PARAMETER Experiment Name: Zm_Hybrid_Seed_Dev_P Parameter: Plant Line Value: 35A19
  misc_feature: MA Experiment 20000535 PARAMETER Experiment Name: Zm_Hybrid_Seed_Dev_P Parameter: Tissue Value: Embryo vs. Unfert Floret
gcacgagaccattacctagaacatcctaatcaaaacccgactccctcggctgcctcccgcagccgcccgctgctccggtccttccgaacgctggcctgttcttccctgcctttggcccattcgtcaggcggcccctccgcaggcgacgcaggcgcggtcacgacggcgcgtggccccgactacgtagacagctaaccggtctccgcctccggcccttctcctgtcgcccgattgagtcgctgctgcaactgccaacttcacccccggcgagctcaccacagtcttccggaaaggtgctatcaatttggaagatggcagatgaggagcaggccccaagctctaggaaaagggttgcaggtactcaaatcaacaaggataatccggaacctgatgatgaaggaacagaacaagagatgggtacatttaagaaagctactgaagaagttatggcaacacggaggattgtaaaggttcggcgccagcagacgtcatcagcttcttctaaccctttctctgcaatcagatttgcccccactgattctagtgctcaaacaagtgctcctgtcccagaggtccaaccttcagatgtcaaagttgacgagggaagcaatggtagcgggaaagatactttgtctctgcccgacaagactgctggctctggggtaaatacggactctagtgcctcaactgaagcaccacctcagcctgttgaaaccagtgacaaggcagaagacacaaaggacgaatctagtggagacaaagtggtagttggagaacccaatgaaggcagttgcatgccatctgaagttgagggcaaaacaaaagagggagatgctgaagaaaaggaaaggacagatgaagctggaaatatcgataaaattagcaaggatgacactgggaagaaagatggagatgacactgagaagaaagatggaggtgatgatactggaggtgaatcagagcagaaagggcaaacaccatcagcaacaccccttttctcgtttaagaatctgtcaagtggtcaaaatgctttcacaggtctgaccggaactggattttcaagcacatcattctcgtttggctcagcctctaaagatggctcaagtgctggtcccctatttgggctgaaagctgatggttcttcgttcccttcttttaatcttggtgctgccaccaatgggggttctgccacagctcttgctacttcagcagaggcacccaagatgtttgctatgacagagggccctgtcgaaaccggtgaagaaaatgagaaggctgtattcagcgctgattctgctttgtacgagtacttagatgggggctggaaagaaagaggaaaaggtgaactgaagctgaacgtccccgtatctgggggcgagcgagcccggcctcgtcatgaggacaaaaggcaactaccggctggtcctgaatgcaagcctctacaacgacatgtcgctcaaggacatggacaagaagggcgtgacatttgcctgtatgaacagcattggggagtcgccgagcagcctcgctacatttgctctgaagttcaaggacacggccaccagggaggaattcaaggatgcggtggagtctcacaagacaagcaaggcacaggaactgccgctgaagacgcccgagaactctccgaaggcagcagaagtctgaagccgcacccgagtcacgcttgctcgtgtcttttgtacgtgtccaggaaggaaggaactgagagagtttctgttgttgcggagtttttaagaatgtcgcgtcatgacatatgatgtcctgagttgtattttgcgtacgggttccctggtgctgtttttgggaacttaccattactacaggcgcataatcttgggatcctggacaagggactcgttttatctatttgctcgtcttgtgctccgttatgttctatcggttaagttgcgcgtgacgctattatgtcatgaataaatgtatgcaatt

SEQ ID NO: 5816 - protein, 488 aa, Zea mays subsp. mays
  peptide (1)..(488): Ceres Seq. ID no. 12362597
  misc_feature (1)..(359): Homolog of NCBI NO: 18400970 NR Description: expressed protein; protein id: At3g15970.1, by cDNA: 108414. [Arabidopsis thaliana]
  misc_feature (1)..(359): Homolog of NCBI NO: 21536684 NR Description: unknown [Arabidopsis thaliana]
  misc_feature (197)..(359): Homolog of NCBI NO: 22655290 NR Description: unknown protein [Arabidopsis thaliana]
  misc_feature (1)..(310): Homolog of NCBI NO: 18403992 NR Description: expressed protein; protein id: At1g52380.1, by cDNA: 25703., supported by cDNA: gi_14335001, supported by gi_16323321 [Arabidopsis thaliana] >gi|25405545|pir||A96564
  misc_feature (117)..(359): Homolog of NCBI NO: 18403992 NR Description: expressed protein; protein id: At1g52380.1, by cDNA: 25703., supported by cDNA: gi_14335001, supported by gi_16323321 [Arabidopsis thaliana] >gi|25405545|pir||A96564
  misc_feature (1)..(360): Homolog of NCBI NO: 40747404 NR Description: hypothetical protein AN0461.2 [Aspergillus
MADEEQAPSSRKRVAGTQINKDNPEPDDEGTEQEMGTFKKATEEVMATRRIVKVRRQQTSSASSNPFSAIRFAPTDSSAQTSAPVPEVQPSDVKVDEGSNGSGKDTLSLPDKTAGSGVNTDSSASTEAPPQPVETSDKAEDTKDESSGDKVVVGEPNEGSCMPSEVEGKTKEGDAEEKERTDEAGNIDKISKDDTGKKDGDDTEKKDGGDDTGGESEQKGQTPSATPLFSFKNLSSGQNAFTGLTGTGFSSTSFSFGSASKDGSSAGPLFGLKADGSSFPSFNLGAATNGGSATALATSAEAPKMFAMTEGPVETGEENEKAVFSADSALYEYLDGGWKERGKGELKLNVPVSGGERARPRHEDKRQLPAGPECKPLQRHVAQGHGQEGRDICLYEQHWGVAEQPRYICSEVQGHGHQGGIQGCGGVSQDKQGTGTAAEDARELSEGSRSLKPHPSHACSCLLYVSRKEGTERVSVVAEFLRMSRHDI

SEQ ID NO: 5817 - protein, 454 aa, Zea mays subsp. mays
  peptide (1)..(454): Ceres Seq. ID no. 12362598
  misc_feature (1)..(325): Homolog of NCBI NO: 18400970 NR Description: expressed protein; protein id: At3g15970.1, by cDNA: 108414. [Arabidopsis thaliana]
  misc_feature (1)..(325): Homolog of NCBI NO: 21536684 NR Description: unknown [Arabidopsis thaliana]
  misc_feature (163)..(325): Homolog of NCBI NO: 22655290 NR Description: unknown protein [Arabidopsis thaliana]
  misc_feature (1)..(276): Homolog of NCBI NO: 18403992 NR Description: expressed protein; protein id: At1g52380.1, by cDNA: 25703., supported by cDNA: gi_14335001, supported by gi_16323321 [Arabidopsis thaliana] >gi|25405545|pir||A96564
  misc_feature (83)..(325): Homolog of NCBI NO: 18403992 NR Description: expressed protein; protein id: At1g52380.1, by cDNA: 25703., supported by cDNA: gi_14335001, supported by gi_16323321 [Arabidopsis thaliana] >gi|25405545|pir||A96564
  misc_feature (1)..(326): Homolog of NCBI NO: 40747404 NR Description: hypothetical protein AN0461.2 [Aspergillus
MGTFKKATEEVMATRRIVKVRRQQTSSASSNPFSAIRFAPTDSSAQTSAPVPEVQPSDVKVDEGSNGSGKDTLSLPDKTAGSGVNTDSSASTEAPPQPVETSDKAEDTKDESSGDKVVVGEPNEGSCMPSEVEGKTKEGDAEEKERTDEAGNIDKISKDDTGKKDGDDTEKKDGGDDTGGESEQKGQTPSATPLFSFKNLSSGQNAFTGLTGTGFSSTSFSFGSASKDGSSAGPLFGLKADGSSFPSFNLGAATNGGSATALATSAEAPKMFAMTEGPVETGEENEKAVFSADSALYEYLDGGWKERGKGELKLNVPVSGGERARPRHEDKRQLPAGPECKPLQRHVAQGHGQEGRDICLYEQHWGVAEQPRYICSEVQGHGHQGGIQGCGGVSQDKQGTGTAAEDARELSEGSRSLKPHPSHACSCLLYVSRKEGTERVSVVAEFLRMSRHDI

SEQ ID NO: 5818 - protein, 443 aa, Zea mays subsp. mays
  peptide (1)..(443): Ceres Seq. ID no. 12362599
  misc_feature (1)..(314): Homolog of NCBI NO: 18400970 NR Description: expressed protein; protein id: At3g15970.1, by cDNA: 108414. [Arabidopsis thaliana]
  misc_feature (1)..(314): Homolog of NCBI NO: 21536684 NR Description: unknown [Arabidopsis thaliana]
  misc_feature (152)..(314): Homolog of NCBI NO: 22655290 NR Description: unknown protein [Arabidopsis thaliana]
  misc_feature (1)..(265): Homolog of NCBI NO: 18403992 NR Description: expressed protein; protein id: At1g52380.1, by cDNA: 25703., supported by cDNA: gi_14335001, supported by gi_16323321 [Arabidopsis thaliana] >gi|25405545|pir||A96564
  misc_feature (72)..(314): Homolog of NCBI NO: 18403992 NR Description: expressed protein; protein id: At1g52380.1, by cDNA: 25703., supported by cDNA: gi_14335001, supported by gi_16323321 [Arabidopsis thaliana] >gi|25405545|pir||A96564
  misc_feature (1)..(315): Homolog of NCBI NO: 40747404 NR Description: hypothetical protein AN0461.2 [Aspergillus
MATRRIVKVRRQQTSSASSNPFSAIRFAPTDSSAQTSAPVPEVQPSDVKVDEGSNGSGKDTLSLPDKTAGSGVNTDSSASTEAPPQPVETSDKAEDTKDESSGDKVVVGEPNEGSCMPSEVEGKTKEGDAEEKERTDEAGNIDKISKDDTGKKDGDDTEKKDGGDDTGGESEQKGQTPSATPLFSFKNLSSGQNAFTGLTGTGFSSTSFSFGSASKDGSSAGPLFGLKADGSSFPSFNLGAATNGGSATALATSAEAPKMFAMTEGPVETGEENEKAVFSADSALYEYLDGGWKERGKGELKLNVPVSGGERARPRHEDKRQLPAGPECKPLQRHVAQGHGQEGRDICLYEQHWGVAEQPRYICSEVQGHGHQGGIQGCGGVSQDKQGTGTAAEDARELSEGSRSLKPHPSHACSCLLYVSRKEGTERVSVVAEFLRMSRHDI

SEQ ID NO: 5819 - DNA, 1366 bp, Zea mays subsp. mays
  misc_feature (1)..(1366): Ceres Seq. ID no. 12435021
  misc_feature: MA Experiment ID: 108504 Result: Down-regulated in Transcription
  misc_feature: MA Experiment 108504 PARAMETER Experiment Name: Zm_Drought_P Parameter: Age (day) Value: 8
  misc_feature: MA Experiment 108504 PARAMETER Experiment Name: Zm_Drought_P Parameter: Organism Value: Zea mays
  misc_feature: MA Experiment 108504 PARAMETER Experiment Name: Zm_Drought_P Parameter: Plant Line Value: 35A19
  misc_feature: MA Experiment 108504 PARAMETER Experiment Name: Zm_Drought_P Parameter: Timepoint (hr) Value: 12
  misc_feature: MA Experiment 108504 PARAMETER Experiment Name: Zm_Drought_P Parameter: Tissue Value: Aerial
  misc_feature: MA Experiment 108504 PARAMETER Experiment Name: Zm_Drought_P Parameter: Treatment Value: Drought vs. No Drought
  misc_feature: MA Experiment ID: 108528 Result: Down-regulated in Transcription
  misc_feature: MA Experiment 108528 PARAMETER Experiment Name: Zm_Imbibed_Seeds_P Parameter: Age (day) Value: 5 vs. 2
  misc_feature: MA Experiment 108528 PARAMETER Experiment Name: Zm_Imbibed_Seeds_P Parameter: Organism Value: Zea mays
  misc_feature: MA Experiment 108528 PARAMETER Experiment Name: Zm_Imbibed_Seeds_P Parameter: Plant Line Value: 35A19
  misc_feature: MA Experiment 108528 PARAMETER Experiment Name: Zm_Imbibed_Seeds_P Parameter: Tissue Value: Aerial vs. Embryo
  misc_feature: MA Experiment ID: 108530 Result: Down-regulated in Transcription
  misc_feature: MA Experiment 108530 PARAMETER Experiment Name: Zm_Imbibed_Seeds_P Parameter: Age (day) Value: 6 vs. 2
  misc_feature: MA Experiment 108530 PARAMETER Experiment Name: Zm_Imbibed_Seeds_P Parameter: Organism Value: Zea mays
  misc_feature: MA Experiment 108530 PARAMETER Experiment Name: Zm_Imbibed_Seeds_P Parameter: Plant Line Value: 35A19
  misc_feature: MA Experiment 108530 PARAMETER Experiment Name: Zm_Imbibed_Seeds_P Parameter: Tissue Value: Aerial vs. Embryo
  misc_feature: MA Experiment ID: 108535 Result: Up-regulated in Transcription
  misc_feature: MA Experiment 108535 PARAMETER Experiment Name: Zm_Meristem_P Parameter: Age (day) Value: 8
  misc_feature: MA Experiment 108535 PARAMETER Experiment Name: Zm_Meristem_P Parameter: Organism Value: Zea mays
  misc_feature: MA Experiment 108535 PARAMETER Experiment Name: Zm_Meristem_P Parameter: Plant Line Value: 35A19
  misc_feature: MA Experiment 108535 PARAMETER Experiment Name: Zm_Meristem_P Parameter: Tissue Value: Root Meristem vs. Above Root Meristem
  misc_feature: MA Experiment ID: 108544 Result: Down-regulated in Transcription
  misc_feature: MA Experiment ID: 108545 Result: Down-regulated in Transcription
  misc_feature: MA Experiment 108545 PARAMETER Experiment Name: Zm_Imbibed_Seeds_P Parameter: Age (day) Value: 3 vs. 2
  misc_feature: MA Experiment 108545 PARAMETER Experiment Name: Zm_Imbibed_Seeds_P Parameter: Organism Value: Zea mays
  misc_feature: MA Experiment 108545 PARAMETER Experiment Name: Zm_Imbibed_Seeds_P Parameter: Plant Line Value: 35A19
  misc_feature: MA Experiment 108545 PARAMETER Experiment Name: Zm_Imbibed_Seeds_P Parameter: Tissue Value: Aerial vs. Embryo
  misc_feature: MA Experiment ID: 108547 Result: Down-regulated in Transcription
  misc_feature: MA Experiment 108547 PARAMETER Experiment Name: Zm_Imbibed_Seeds_P Parameter: Age (day) Value: 4 vs. 2
  misc_feature: MA Experiment 108547 PARAMETER Experiment Name: Zm_Imbibed_Seeds_P Parameter: Organism Value: Zea mays
  misc_feature: MA Experiment 108547 PARAMETER Experiment Name: Zm_Imbibed_Seeds_P Parameter: Plant Line Value: 35A19
  misc_feature: MA Experiment 108547 PARAMETER Experiment Name: Zm_Imbibed_Seeds_P Parameter: Tissue Value: Aerial vs. Embryo
  misc_feature: MA Experiment ID: 108597 Result: Down-regulated in Transcription
  misc_feature: MA Experiment 108597 PARAMETER Experiment Name: Zm_100uM_ABA_P Parameter: Age (day) Value: 9
  misc_feature: MA Experiment 108597 PARAMETER Experiment Name: Zm_100uM_ABA_P Parameter: Organism Value: Zea mays
  misc_feature: MA Experiment 108597 PARAMETER Experiment Name: Zm_100uM_ABA_P Parameter: Plant Line Value: 35A19
  misc_feature: MA Experiment 108597 PARAMETER Experiment Name: Zm_100uM_ABA_P Parameter: Timepoint (hr) Value: 24
  misc_feature: MA Experiment 108597 PARAMETER Experiment Name: Zm_100uM_ABA_P Parameter: Tissue Value: Aerial
  misc_feature: MA Experiment 108597 PARAMETER Experiment Name: Zm_100uM_ABA_P Parameter: Treatment Value: 100uM ABA vs. No Treatment
  misc_feature: MA Experiment ID: 20000108 Result: Up-regulated in Transcription
  misc_feature: MA Experiment 20000108 PARAMETER Experiment Name: Zm_Root-Tips_P Parameter: Age (day) Value: 12
  misc_feature: MA Experiment 20000108 PARAMETER Experiment Name: Zm_Root-Tips_P Parameter: Organism Value: Zea mays
  misc_feature: MA Experiment 20000108 PARAMETER Experiment Name: Zm_Root-Tips_P Parameter: Tissue Value: Root tips vs. Root mid region    35
  misc_feature: MA Experiment 20000108 PARAMETER Experiment Name: Zm_Root-Tips_P Parameter: Tissue Value: Root tips vs. Root mid region   Sequence Listing-Misc Features (4)
  misc_feature: MA Experiment ID: 20000478 Result: Down-regulated in Transcription
  misc_feature: MA Experiment 20000478 PARAMETER Experiment Name: Zm_5mM_SA_P Parameter: Age (day) Value: 11
  misc_feature: MA Experiment 20000478 PARAMETER Experiment Name: Zm_5mM_SA_P Parameter: Organism Value: Zea mays
  misc_feature: MA Experiment 20000478 PARAMETER Experiment Name: Zm_5mM_SA_P Parameter: Plant Line Value: 35A19
  misc_feature: MA Experiment 20000478 PARAMETER Experiment Name: Zm_5mM_SA_P Parameter: Timepoint (hr) Value: 72
  misc_feature: MA Experiment 20000478 PARAMETER Experiment Name: Zm_5mM_SA_P Parameter: Tissue Value: Aerial
  misc_feature: MA Experiment 20000478 PARAMETER Experiment Name: Zm_5mM_SA_P Parameter: Treatment Value: 5mM SA vs. No Treatment
  misc_feature: MA Experiment ID: 20000480 Result: Down-regulated in Transcription
  misc_feature: MA Experiment 20000480 PARAMETER Experiment Name: Zm_Drought_P Parameter: Age (day) Value: 11
  misc_feature: MA Experiment 20000480 PARAMETER Experiment Name: Zm_Drought_P Parameter: Organism Value: Zea mays
  misc_feature: MA Experiment 20000480 PARAMETER Experiment Name: Zm_Drought_P Parameter: Plant Line Value: 35A19
  misc_feature: MA Experiment 20000480 PARAMETER Experiment Name: Zm_Drought_P Parameter: Timepoint (hr) Value: 72
  misc_feature: MA Experiment 20000480 PARAMETER Experiment Name: Zm_Drought_P Parameter: Tissue Value: Aerial
  misc_feature: MA Experiment 20000480 PARAMETER Experiment Name: Zm_Drought_P Parameter: Treatment Value: Drought vs. No Drought
  misc_feature: MA Experiment ID: 20000487 Result: Down-regulated in Transcription
  misc_feature: MA Experiment 20000487 PARAMETER Experiment Name: Zm_50mM_NH4NO3_L_to_H_P Parameter: Organism Value: Zea mays
  misc_feature: MA Experiment 20000487 PARAMETER Experiment Name: Zm_50mM_NH4NO3_L_to_H_P Parameter: Timepoint (hr) Value: 4
  misc_feature: MA Experiment 20000487 PARAMETER Experiment Name: Zm_50mM_NH4NO3_L_to_H_P Parameter: Tissue Value: Leaves
  misc_feature: MA Experiment 20000487 PARAMETER Experiment Name: Zm_50mM_NH4NO3_L_to_H_P Parameter: Treatment Value: 50mM NH4NO3 vs. 100mM Mannitol
  misc_feature: MA Experiment ID: 20000626 Result: Down-regulated in Transcription
  misc_feature: MA Experiment 20000626 PARAMETER Experiment Name: Zm_Herbicide-Treatments_P Parameter: Timepoint (hr) Value: 12
  misc_feature: MA Experiment 20000626 PARAMETER Experiment Name: Zm_Herbicide-Treatments_P Parameter: Tissue Value: Aerial
  misc_feature: MA Experiment 20000626 PARAMETER Experiment Name: Zm_Herbicide-Treatments_P Parameter: Treatment Value: Roundup vs. No Treatment
cttcttctcgccgggcgtcctcagtgctgccctgtccaaggcgctcgtccgcttctaccccctcgccggccggctcgcgcaggacggcgccggccgcccgcagatccactgcaccggagaaggcgcgctcctcgtcaccgcgcgcgccgacgctaccctccaggacacccccggcgggttcgccccgtcggatgagctgcggcagatgcttgtcccctcggctgccgacggcgaagaccgcgccggcatcttggccatgttccaggtgacgtccttcaagtgcggcggggtgtgcgtgggcgcggcgatccaccacacggcggcggacggcctagcggcgctcgacttcgtcaacacgtgggccgccatcgcgagcaagggcgtcgacgaggccgcgccggcgccgcgcccgtggctggaccgcacgctgctccgcgcgcgctcccctcccgacgtgcgcttcgaccacagcgagtactccccgcggggcggcggcggtccaaagacggcgagggtcccgttcgactccgccatcctacccatgtccaagacccaggtggacgcgctcagggccggcaagaaggtgtccacgttcaaggccgtggtcgcccacgtgtggcggtgcgcgtgcatagcgcgcgggctcgcgggagacgaggacacccgtctgtacatgaccgccgacgcgcgctcccgcgtccgcccgccgctcccggaaggctacctcggcaacgccatcttccgcgcgtcagcggtggccacggcgggcgacgtcgtctccgagcagctcgacgccgttgcgggtagggtgtccggcgccaccgcccggctggacgacgagtacgtccgatcgctggtggactacctggagcaggtggtgggcgatgtggcggggctccgcaagggggagtgggtgatgccggagaccgacctgtgggtgataagctggcaggggctgcccatctacgacgccgacttcggctggggacggccggcgttcatgggccgcgcgtgcctccagttcagcggcctcgtgtacctcgtcccgggcccggacggcgacggccgcctcgacgtcgtcgtggccatggagcccaagagcctggccagattcaaggagctgttgtacgagctcaaaggtgcaggtgttccgtgcacggcagactgagctgctgcattccgtgcaggttccttagcttgctaccggctggcaaaacgaaaacctgtttgccggattgttccttgcattgcgtatctacttcgacctttactgcagtactcctagttttctactcgttgcttttgatggcaatctggtgagtactgtactctatatgcatttacatggctatctatattcggagcg

SEQ ID NO: 5820 - protein, 388 aa, Zea mays subsp. mays
  peptide (1)..(388): Ceres Seq. ID no. 12435022
  misc_feature (1)..(377): Pfam Name: Transferase family Pfam Description: Transferase family
  misc_feature (1)..(377): Homolog of NCBI NO: 6469032 NR Description: N-hydroxycinnamoyl/benzoyltransferase [Ipomoea
  misc_feature (1)..(377): Homolog of NCBI NO: 27475616 NR Description: hydroxycinnamoyl transferase [Nicotiana tabacum]
  misc_feature (1)..(377): Homolog of NCBI NO: 40644899 NR Description: hydroxycinnamoyl CoA quinate transferase
  misc_feature (1)..(378): Homolog of NCBI NO: 40644084 NR Description: hydroxycinnamoyl CoA quinate transferase
  misc_feature (1)..(378): Homolog of NCBI NO: 15239747 NR Description: anthranilate N-benzoyltransferase; protein id: supported by cDNA: 114130. [Arabidopsis thaliana]
  misc_feature (1)..(378): Homolog of NCBI NO: 21536883 NR Description: anthranilate N-benzoyltransferase [Arabidopsis
  misc_feature (1)..(378): Homolog of NCBI NO: 38345030 NR Description: OSJNBa0029H02.14 [Oryza sativa (japonica
  misc_feature (1)..(377): Homolog of NCBI NO: 7484689 NR Description: anthranilate N-benzoyltransferase (EC 2.3.1.144)
  misc_feature (1)..(377): Homolog of NCBI NO: 7484690 NR Description: anthranilate N-benzoyltransferase (EC 2.3.1.144)
  misc_feature (1)..(377): Homolog of NCBI NO: 7484692 NR Description: anthranilate N-benzoyltransferase (EC 2.3.1.144)
FFSPGVLSAALSKALVRFYPLAGRLAQDGAGRPQIHCTGEGALLVTARADATLQDTPGGFAPSDELRQMLVPSAADGEDRAGILAMFQVTSFKCGGVCVGAAIHHTAADGLAALDFVNTWAAIASKGVDEAAPAPRPWLDRTLLRARSPPDVRFDHSEYSPRGGGGPKTARVPFDSAILPMSKTQVDALRAGKKVSTFKAVVAHVWRCACIARGLAGDEDTRLYMTADARSRVRPPLPEGYLGNAIFRASAVATAGDVVSEQLDAVAGRVSGATARLDDEYVRSLVDYLEQVVGDVAGLRKGEWVMPETDLWVISWQGLPIYDADFGWGRPAFMGRACLQFSGLVYLVPGPDGDGRLDVVVAMEPKSLARFKELLYELKGAGVPCTAD

SEQ ID NO: 5821 - protein, 320 aa, Zea mays subsp. mays
  peptide (1)..(320): Ceres Seq. ID no. 12435023
  misc_feature (1)..(309): Pfam Name: Transferase family Pfam Description: Transferase family
  misc_feature (1)..(309): Homolog of NCBI NO: 6469032 NR Description: N-hydroxycinnamoyl/benzoyltransferase [Ipomoea
  misc_feature (1)..(309): Homolog of NCBI NO: 27475616 NR Description: hydroxycinnamoyl transferase [Nicotiana tabacum]
  misc_feature (1)..(309): Homolog of NCBI NO: 40644899 NR Description: hydroxycinnamoyl CoA quinate transferase
  misc_feature (1)..(310): Homolog of NCBI NO: 40644084 NR Description: hydroxycinnamoyl CoA quinate transferase
  misc_feature (1)..(310): Homolog of NCBI NO: 15239747 NR Description: anthranilate N-benzoyltransferase; protein id: supported by cDNA: 114130. [Arabidopsis thaliana]
  misc_feature (1)..(310): Homolog of NCBI NO: 21536883 NR Description: anthranilate N-benzoyltransferase [Arabidopsis
  misc_feature (1)..(310): Homolog of NCBI NO: 38345030 NR Description: OSJNBa0029H02.14 [Oryza sativa (japonica
  misc_feature (1)..(309): Homolog of NCBI NO: 7484689 NR Description: anthranilate N-benzoyltransferase (EC 2.3.1.144)
  misc_feature (1)..(309): Homolog of NCBI NO: 7484690 NR Description: anthranilate N-benzoyltransferase (EC 2.3.1.144)
  misc_feature (1)..(309): Homolog of NCBI NO: 7484692 NR Description: anthranilate N-benzoyltransferase (EC 2.3.1.144)
MLVPSAADGEDRAGILAMFQVTSFKCGGVCVGAAIHHTAADGLAALDFVNTWAAIASKGVDEAAPAPRPWLDRTLLRARSPPDVRFDHSEYSPRGGGGPKTARVPFDSAILPMSKTQVDALRAGKKVSTFKAVVAHVWRCACIARGLAGDEDTRLYMTADARSRVRPPLPEGYLGNAIFRASAVATAGDVVSEQLDAVAGRVSGATARLDDEYVRSLVDYLEQVVGDVAGLRKGEWVMPETDLWVISWQGLPIYDADFGWGRPAFMGRACLQFSGLVYLVPGPDGDGRLDVVVAMEPKSLARFKELLYELKGAGVPCTAD

SEQ ID NO: 5822 - protein, 303 aa, Zea mays subsp. mays
  peptide (1)..(303): Ceres Seq. ID no. 12435024
  misc_feature (1)..(292): Pfam Name: Transferase family Pfam Description: Transferase family
  misc_feature (1)..(292): Homolog of NCBI NO: 6469032 NR Description: N-hydroxycinnamoyl/benzoyltransferase [Ipomoea
  misc_feature (1)..(292): Homolog of NCBI NO: 27475616 NR Description: hydroxycinnamoyl transferase [Nicotiana tabacum]
  misc_feature (1)..(292): Homolog of NCBI NO: 40644899 NR Description: hydroxycinnamoyl CoA quinate transferase
  misc_feature (1)..(293): Homolog of NCBI NO: 40644084 NR Description: hydroxycinnamoyl CoA quinate transferase
  misc_feature (1)..(293): Homolog of NCBI NO: 15239747 NR Description: anthranilate N-benzoyltransferase; protein id: supported by cDNA: 114130. [Arabidopsis thaliana]
  misc_feature (1)..(293): Homolog of NCBI NO: 21536883 NR Description: anthranilate N-benzoyltransferase [Arabidopsis
  misc_feature (1)..(293): Homolog of NCBI NO: 38345030 NR Description: OSJNBa0029H02.14 [Oryza sativa (japonica
  misc_feature (1)..(292): Homolog of NCBI NO: 7484689 NR Description: anthranilate N-benzoyltransferase (EC 2.3.1.144)
  misc_feature (1)..(292): Homolog of NCBI NO: 7484690 NR Description: anthranilate N-benzoyltransferase (EC 2.3.1.144)
  misc_feature (1)..(292): Homolog of NCBI NO: 7484692 NR Description: anthranilate N-benzoyltransferase (EC 2.3.1.144)
MFQVTSFKCGGVCVGAAIHHTAADGLAALDFVNTWAAIASKGVDEAAPAPRPWLDRTLLRARSPPDVRFDHSEYSPRGGGGPKTARVPFDSAILPMSKTQVDALRAGKKVSTFKAVVAHVWRCACIARGLAGDEDTRLYMTADARSRVRPPLPEGYLGNAIFRASAVATAGDVVSEQLDAVAGRVSGATARLDDEYVRSLVDYLEQVVGDVAGLRKGEWVMPETDLWVISWQGLPIYDADFGWGRPAFMGRACLQFSGLVYLVPGPDGDGRLDVVVAMEPKSLARFKELLYELKGAGVPCTAD

SEQ ID NO: 5823 - DNA, 1034 bp, Zea mays subsp. mays
  misc_feature (1)..(1034): Ceres Seq. ID no. 12349099
  misc_feature: MA Experiment ID: 108522 Result: Up-regulated in Transcription
  misc_feature: MA Experiment 108522 PARAMETER Experiment Name: Zm_42deg_Heat_P Parameter: Age (day) Value: 8
  misc_feature: MA Experiment 108522 PARAMETER Experiment Name: Zm_42deg_Heat_P Parameter: Organism Value: Zea mays
  misc_feature: MA Experiment 108522 PARAMETER Experiment Name: Zm_42deg_Heat_P Parameter: Plant Line Value: 35A19
  misc_feature: MA Experiment 108522 PARAMETER Experiment Name: Zm_42deg_Heat_P Parameter: Temperature (deg C) Value: 42 vs. 22
  misc_feature: MA Experiment 108522 PARAMETER Experiment Name: Zm_42deg_Heat_P Parameter: Timepoint (hr) Value: 1
  misc_feature: MA Experiment 108522 PARAMETER Experiment Name: Zm_42deg_Heat_P Parameter: Tissue Value: Aerial
  misc_feature: MA Experiment ID: 108523 Result: Up-regulated in Transcription
  misc_feature: MA Experiment 108523 PARAMETER Experiment Name: Zm_42deg_Heat_P Parameter: Age (day) Value: 8
  misc_feature: MA Experiment 108523 PARAMETER Experiment Name: Zm_42deg_Heat_P Parameter: Organism Value: Zea mays
  misc_feature: MA Experiment 108523 PARAMETER Experiment Name: Zm_42deg_Heat_P Parameter: Plant Line Value: 35A19
  misc_feature: MA Experiment 108523 PARAMETER Experiment Name: Zm_42deg_Heat_P Parameter: Temperature (deg C) Value: 42 vs. 22
  misc_feature: MA Experiment 108523 PARAMETER Experiment Name: Zm_42deg_Heat_P Parameter: Timepoint (hr) Value: 6
  misc_feature: MA Experiment 108523 PARAMETER Experiment Name: Zm_42deg_Heat_P Parameter: Tissue Value: Aerial
  misc_feature: MA Experiment ID: 108527 Result: Up-regulated in Transcription
  misc_feature: MA Experiment 108527 PARAMETER Experiment Name: Zm_5mM_NO_P Parameter: Age (day) Value: 8
  misc_feature: MA Experiment 108527 PARAMETER Experiment Name: Zm_5mM_NO_P Parameter: Organism Value: Zea mays
  misc_feature: MA Experiment 108527 PARAMETER Experiment Name: Zm_5mM_NO_P Parameter: Plant Line Value: 35A19
  misc_feature: MA Experiment 108527 PARAMETER Experiment Name: Zm_5mM_NO_P Parameter: Timepoint (hr) Value: 6
  misc_feature: MA Experiment 108527 PARAMETER Experiment Name: Zm_5mM_NO_P Parameter: Tissue Value: Aerial
  misc_feature: MA Experiment 108527 PARAMETER Experiment Name: Zm_5mM_NO_P Parameter: Treatment Value: 5mM NO vs. No Treatment
  misc_feature: MA Experiment ID: 108559 Result: Up-regulated in Transcription
  misc_feature: MA Experiment 108559 PARAMETER Experiment Name: Zm_5mM_NO_P Parameter: Age (day) Value: 8
  misc_feature: MA Experiment 108559 PARAMETER Experiment Name: Zm_5mM_NO_P Parameter: Organism Value: Zea mays
  misc_feature: MA Experiment 108559 PARAMETER Experiment Name: Zm_5mM_NO_P Parameter: Plant Line Value: 35A19
  misc_feature: MA Experiment 108559 PARAMETER Experiment Name: Zm_5mM_NO_P Parameter: Timepoint (hr) Value: 12
  misc_feature: MA Experiment 108559 PARAMETER Experiment Name: Zm_5mM_NO_P Parameter: Tissue Value: Aerial
  misc_feature: MA Experiment 108559 PARAMETER Experiment Name: Zm_5mM_NO_P Parameter: Treatment Value: 5mM NO vs. No Treatment
  misc_feature: MA Experiment ID: 20000534 Result: Down-regulated in Transcription
  misc_feature: MA Experiment 20000534 PARAMETER Experiment Name: Zm_Hybrid_Pollen_P Parameter: Age (day) Value: 8
  misc_feature: MA Experiment 20000534 PARAMETER Experiment Name: Zm_Hybrid_Pollen_P Parameter: Organism Value: Zea mays
  misc_feature: MA Experiment 20000534 PARAMETER Experiment Name: Zm_Hybrid_Pollen_P Parameter: Plant Line Value: 35A19
  misc_feature: MA Experiment 20000534 PARAMETER Experiment Name: Zm_Hybrid_Pollen_P Parameter: Tissue Value: Pollen vs. Aerial
tccttcccccttccccgcttcgacaagtctcgtcccccgcccccttattccattacgagcaactccgccgccgccgccgtaaagccatctcccccatccgccgccgccgccaccgctgctggtgggacgggccgtgcgcccgttccagcgaagaggatcagcgggtcggaggagccgccggcgaggtcgggccgcgggggatcgagatggtgctgtgggagctcacggccatcaccgcctacttcctcgggctgaggcgcacctaccgcctcgcgctccgcatccagcgccgcctcatcccgcccaaccaccccaggatccgggacttcgtctacaggcgcacacgggatgtcttcaacgtcgcagtgtcggtccacaagaacattcagcagagagacatagaggtcggccggaacctcggaaacgcgatccttcgctggcttgatcgcatgaagccatcagcggagatccgcccccgtcttccaggcccaccaaacggcagcacggccgagcagttcagacatgtatcgagcgcgagcaggggcgcgggggcacagaagacctcctcctcctccaaagcttcgccccacgactccagcgggaagatgctgttctcgcgcctcaacattgggcccaagcacttcccggttctgcccacgctagcacagcccaacaggatcagcgcgagcagccagtgcaggcgcttctcctactcctacgccccgttcccgtcggtcactgccaggaggaagggtgtcttccgcgaggacattgcacagctgatggtgtaaggatctaaaatacttgccagcgatctcgtgtactgtttttttgtttttggaacactggacttagtgatttgcccagatcagatgtctgatgtgtcttggtttaataataaagaagcgagcgagcgcaggggaaattgtcactgctgctgcggtttaggccattagatttgtaaccaaatgctcagatgaacagcatttcgtgtttggtaatgaacaccagaacatgtgcactcgtttatgtgc

SEQ ID NO: 5824 - protein, 262 aa, Zea mays subsp. mays
  peptide (1)..(262): Ceres Seq. ID no. 12349100
  misc_feature (69)..(261): Homolog of NCBI NO: 15222623 NR Description: hypothetical protein; protein id: At1g32260.1
  misc_feature (69)..(262): Homolog of NCBI NO: 30686423 NR Description: expressed protein [Arabidopsis thaliana] unknown protein [Arabidopsis thaliana]
  misc_feature (113)..(262): Homolog of NCBI NO: 25370789 NR Description: hypothetical protein At2g35480 [imported] - thaliana >gi|3608140|gb|AAC36173.1| unknown protein [Arabidopsis
LPPSPLRQVSSPAPLFHYEQLRRRRRKAISPIRRRRHRCWWDGPCARSSEEDQRVGGAAGEVGPRGIEMVLWELTAITAYFLGLRRTYRLALRIQRRLIPPNHPRIRDFVYRRTRDVFNVAVSVHKNIQQRDIEVGRNLGNAILRWLDRMKPSAEIRPRLPGPPNGSTAEQFRHVSSASRGAGAQKTSSSSKASPHDSSGKMLFSRLNIGPKHFPVLPTLAQPNRISASSQCRRFSYSYAPFPSVTARRKGVFREDIAQLMV

SEQ ID NO: 5825 - protein, 194 aa, Zea mays subsp. mays
  peptide (1)..(194): Ceres Seq. ID no. 12349101
  misc_feature (1)..(193): Homolog of NCBI NO: 15222623 NR Description: hypothetical protein; protein id: At1g32260.1
  misc_feature (1)..(194): Homolog of NCBI NO: 30686423 NR Description: expressed protein [Arabidopsis thaliana] unknown protein [Arabidopsis thaliana]
  misc_feature (45)..(194): Homolog of NCBI NO: 25370789 NR Description: hypothetical protein At2g35480 [imported] - thaliana >gi|3608140|gb|AAC36173.1| unknown protein [Arabidopsis
MVLWELTAITAYFLGLRRTYRLALRIQRRLIPPNHPRIRDFVYRRTRDVFNVAVSVHKNIQQRDIEVGRNLGNAILRWLDRMKPSAEIRPRLPGPPNGSTAEQFRHVSSASRGAGAQKTSSSSKASPHDSSGKMLFSRLNIGPKHFPVLPTLAQPNRISASSQCRRFSYSYAPFPSVTARRKGVFREDIAQLMV

SEQ ID NO: 5826 - DNA, 1462 bp, Zea mays subsp. mays
  misc_feature (1)..(1462): Ceres Seq. ID no. 12344135
  misc_feature: MA Experiment ID: 108529 Result: Up-regulated in Transcription
  misc_feature: MA Experiment 108529 PARAMETER Experiment Name: Zm_Imbibed_Seeds_P Parameter: Age (day) Value: 5 vs. 2
  misc_feature: MA Experiment 108529 PARAMETER Experiment Name: Zm_Imbibed_Seeds_P Parameter: Organism Value: Zea mays
  misc_feature: MA Experiment 108529 PARAMETER Experiment Name: Zm_Imbibed_Seeds_P Parameter: Plant Line Value: 35A19
  misc_feature: MA Experiment 108529 PARAMETER Experiment Name: Zm_Imbibed_Seeds_P Parameter: Tissue Value: Roots vs. Embryo
  misc_feature: MA Experiment ID: 108546 Result: Up-regulated in Transcription
  misc_feature: MA Experiment 108546 PARAMETER Experiment Name: Zm_Imbibed_Seeds_P Parameter: Age (day) Value: 3 vs. 2
  misc_feature: MA Experiment 108546 PARAMETER Experiment Name: Zm_Imbibed_Seeds_P Parameter: Organism Value: Zea mays
  misc_feature: MA Experiment 108546 PARAMETER Experiment Name: Zm_Imbibed_Seeds_P Parameter: Plant Line Value: 35A19
  misc_feature: MA Experiment 108546 PARAMETER Experiment Name: Zm_Imbibed_Seeds_P Parameter: Tissue Value: Roots vs. Embryo
tttttctcagccctctcagtctcacacaccacaccagagcagcgcagccgagcatgcactcatcacatcagctcctcgtctcctagctttcctattcctgccttgataattggccaattgttcgatctccttctttactaccccctttgctttcgttgctgctactactactgttccatctcctaggtttcgttgttgtccctgcaggccgccactgagtgatttgttagcagataagatttagatctcccagataaaaaaaagaggttgagaggagagctagcactaggcactagcaagcctgctgtgaggtgaatatggatccagtcgcagcatccatacacggtcatcatcttcctccaccgttcaacacccgggacttccatcaccatctccagcaacagcagcagcagctcaagaccgaggacgaccacggcagcggcgcgccaggactgttcggcagccgcggcaccaagggcgaccacgagaataatgaccagaacagtggaaacagcaacggaagtggcggaggaggaggcgacgagctggcgctggttccaccatccggcgccgggccagagggtggagagcccaccctacgccgcccgaaaggccggccggcggggtccaagaacaagccgaagccgcccatcatcatcacgagggacagcgccaacacgctccggacgcacgtcatggaggtggccagcggctgcgacatctccgagagcatcacggccttcgcgcgccgcaggcagcgcggggtctgcgtcctcagcggcgccggcaccgtgaccaacgtcaccctgcggcagccggcctcccagggcgcggtcgtcgccctccacggccttcgagatcctgtccctctccggctcctttctcccgccgcccgcgccgcccgaagccacggggctcaccgtctaccttgccggcggccaggggcaggtggtgggcggcagcgtcgtcggcgcgctgacagcagccggggccggtggtgataatggcggcatctttcgccaacgcggtgtacgagcggttgccgttggaggaggatgacatgctcgctgcgcaagcacaggccgacagtgcaggaattctcgcgggtgcgcagctcgccggcgctgtggatccaagcctcttccagggactgccaccgaacctgatgtgcaacgtgcagatgccgccagaagcagcctacggatggagcccgggcgccgccggtggccgtccggcgccgttctaataactgataagagcgcgcacgcggcttagatatggttaagtgatttagctttcttcttcgatcttttgcttgaatttttatcgtggagaatttccgtgggaattgcatatgatttcgcatgttaattagtaagctatcttaatactgtttcagaatatgtagctcgatttctgccatttcgtttcgctattccttgtgtcgtcgtaactcttgttc

SEQ ID NO: 5827 - protein, 227 aa, Zea mays subsp. mays
  peptide (1)..(227): Ceres Seq. ID no. 12344136
  misc_feature (1)..(178): Homolog of NCBI NO: 15235815 NR Description: putative DNA binding protein; protein id:
  misc_feature (22)..(178): Homolog of NCBI NO: 15234404 NR Description: putative DNA-binding protein; protein id:
  misc_feature (1)..(197): Homolog of NCBI NO: 15225475 NR Description: putative AT-hook DNA-binding protein; protein id:
  misc_feature (20)..(178): Homolog of NCBI NO: 15236657 NR Description: hypothetical protein; protein id: At4g17800.1, by cDNA: gi_17933298, supported by cDNA: gi_20453386 [Arabidopsis
  misc_feature (25)..(178): Homolog of NCBI NO: 38346718 NR Description: OSJNBa0086O06.16 [Oryza sativa (japonica
  misc_feature (60)..(185): Homolog of NCBI NO: 30690333 NR Description: expressed protein [Arabidopsis thaliana]
  misc_feature (81)..(185): Homolog of NCBI NO: 7486025 NR Description: hypothetical protein F23E12.50 - Arabidopsis >gi|3080411|emb|CAA18730.1| putative protein [Arabidopsis >gi|7270491|emb|CAB80256.1| putative protein [Arabidopsis
  misc_feature (36)..(178): Homolog of NCBI NO: 15226945 NR Description: putative AT-hook DNA-binding protein; protein id:
  misc_feature (41)..(178): Homolog of NCBI NO: 18414224 NR Description: Expressed protein; protein id: At4g14465.1, by cDNA: 36844. [Arabidopsis thaliana]
  misc_feature (41)..(178): Homolog of NCBI NO: 21593180 NR Description: putative DNA-binding protein [Arabidopsis
MDPVAASIHGHHLPPPFNTRDFHHHLQQQQQQLKTEDDHGSGAPGLFGSRGTKGDHENNDQNSGNSNGSGGGGGDELALVPPSGAGPEGGEPTLRRPKGRPAGSKNKPKPPIIITRDSANTLRTHVMEVASGCDISESITAFARRRQRGVCVLSGAGTVTNVTLRQPASQGAVVALHGLRDPVPLRLLSPAARAARSHGAHRLPCRRPGAGGGRQRRRRADSSRGRW

SEQ ID NO: 5828 - DNA, 1703 bp, Zea mays subsp. mays
  misc_feature (1)..(1703): Ceres Seq. ID no. 12405583
  misc_feature: MA Experiment ID: 20000492 Result: Up-regulated in Transcription
  misc_feature: MA Experiment 20000492 PARAMETER Experiment Name: Zm_Hybrid_Seed_Dev_P Parameter: DAP Value: 12
  misc_feature: MA Experiment 20000492 PARAMETER Experiment Name: Zm_Hybrid_Seed_Dev_P Parameter: Organism Value: Zea mays
  misc_feature: MA Experiment 20000492 PARAMETER Experiment Name: Zm_Hybrid_Seed_Dev_P Parameter: Plant Line Value: 35A19
  misc_feature: MA Experiment 20000492 PARAMETER Experiment Name: Zm_Hybrid_Seed_Dev_P Parameter: Tissue Value: Fert Kernel vs. Unfert Floret
atcacaagcaatcgatcaagctagcatggcggtgaaggtgtgggtgttcgccgtggcactgatgatgtgcgctggtgtagggcttggagctgacgacgacggcggcagccgccttattagccgctgtcgtctgagctcgcccaactaccgcggcgccctggcaaaggccatcctcttcttcgaggggcagcggtcggggcggctgccggcaaaccagagagtcaggtggcgcggggactcggcgctcaccgagcggccaacccgaaaacgtgaacttgacgggtggctactacgacgccggagacaacgtcaagttcgggtttccccgatggcgttcagcgtcaccctcctgagctggagcgccgtcgagtaccgcgacgaggtggcggcggcgggtcagctccgccacctccggtccgccatccagtggggcgccgacttccttctccgtgcccacaccacgccgaccaccctctacactcaggttggcgacggcaacgccgaccaccaatgctgggagcggccagaggacatggacacgccgcggacgctgtacaagatcacccggagctcgcccgggtccgaggccgccggcgaggcggcggcagcgctcgccgccgcgtacctggtgttcagggacgaccgggacaagaccttagccacgcagctcctggccgcgtccagatccctcttcgacttcgcaaacgactacaggggatcctaccagttgtcctgcccattctactgctcctactcaggctaccaggacgagctccagtgggcgtcggcatggctctaccgggcaaccaaggacagcaagtacctcgacttcctgcagaacaaccagggcggcagcgccaccgagttcagctgggacaacaagtatcccggagctcagctgcttgcaacacaggagtacttggctggaaggacagcagctggaaggctacaagaggggcctggactcgttcgtctgcgccgtgatgcccaacagcggcaacacgcagatccgcaccacccctggagggcttctcttcacccgcgactccgttaacctgcagtacacaaccaccgccaccctgctgctgtcgatctacgcgaaggccctcctcgcttctgcagcaggagcagtccagtgcagcgccgcgaccttctctccggaccagatcagttcatttcgacgtcacaggtggactacatcctgggagacaaccccaggagcgcgtcctacatggtcggcttcagctccaagttcccgaggcgcatccaccaccgcggctcctccattccgtccatcaaggtcctcccccggaaggtcacctgcagcgagggcttctcgtcgtggttcccgacggccaaccccaaccccaacgtccacgtcggcgccatcgtcggcgggcccgacgggaacgaccagttcggcgacaacagggaggactccacgcactccgagccggcaacgtacatcaacgcggcatttgtgggcgcctgcgctgctgcactggggcgcagccagcaggtgcctgtggacgaaacagcctcagccccacagtgatgttatgtaactagctacaacggaggagtatgcaagggcgggcaaccaaaccatgatatcgctttgtgtaacatcccaaggcccctacccccactaccactcttgatcatcctgataagaagagataaataaataattaaatacaatg

SEQ ID NO: 5829 - protein, 350 aa, Zea mays subsp. mays
  peptide (1)..(350): Ceres Seq. ID no. 12405584
  misc_feature (48)..(311): Pfam Name: Glycosyl hydrolase family 9 Pfam Description: Glycosyl hydrolase family 9
  misc_feature (10)..(317): Homolog of NCBI NO: 1039431 NR Description: cellulase [Phaseolus vulgaris]
  misc_feature (10)..(317): Homolog of NCBI NO: 1346225 NR Description: Endoglucanase precursor (Endo-1,4-beta-glucanase) cellulase) >gi|7488761|pir||T11783 cellulase (EC 3.2.1.4)
  misc_feature (42)..(311): Homolog of NCBI NO: 1363496 NR Description: cellulase (EC 3.2.1.4) 3D precursor - pepper
  misc_feature (42)..(311): Homolog of NCBI NO: 1655543 NR Description: cellulase; endo-beta-1,4-glucanase [Capsicum
  misc_feature (13)..(317): Homolog of NCBI NO: 575404 NR Description: cellulase [Sambucus nigra]
  misc_feature (42)..(311): Homolog of NCBI NO: 7488977 NR Description: cellulase (EC 3.2.1.4) Cel1 precursor - tomato
  misc_feature (13)..(317): Homolog of NCBI NO: 1076692 NR Description: cellulase (EC 3.2.1.4) - European elder (fragment)
  misc_feature (10)..(317): Homolog of NCBI NO: 228690 NR Description: abscission cellulase
  misc_feature (44)..(309): Homolog of NCBI NO: 15236526 NR Description: glycosyl hydrolase family 9; protein id:
  misc_feature (45)..(311): Homolog of NCBI NO: 1655545 NR Description: endo-beta-1,4-glucanase [Capsicum annuum]
SQAIDQASMAVKVWVFAVALMMCAGVGLGADDDGGSRLISRCRLSSPNYRGALAKAILFFEGQRSGRLPANQRVRWRGDSALTERPTRKRELDGWLLRRRRQRQVRVSPMAFSVTLLSWSAVEYRDEVAAAGQLRHLRSAIQWGADFLLRAHTTPTTLYTQVGDGNADHQCWERPEDMDTPRTLYKITRSSPGSEAAGEAAAALAAAYLVFRDDRDKTLATQLLAASRSLFDFANDYRGSYQLSCPFYCSYSGYQDELQWASAWLYRATKDSKYLDFLQNNQGGSATEFSWDNKYPGAQLLATQEYLAGRTAAGRLQEGPGLVRLRRDAQQRQHADPHHPWRASLHPRLR

SEQ ID NO: 5830 - protein, 342 aa, Zea mays subsp. mays
  peptide (1)..(342): Ceres Seq. ID no. 12405585
  misc_feature (40)..(303): Pfam Name: Glycosyl hydrolase family 9 Pfam Description: Glycosyl hydrolase family 9
  misc_feature (2)..(309): Homolog of NCBI NO: 1039431 NR Description: cellulase [Phaseolus vulgaris]
  misc_feature (2)..(309): Homolog of NCBI NO: 1346225 NR Description: Endoglucanase precursor (Endo-1,4-beta-glucanase) cellulase) >gi|7488761|pir||T11783 cellulase (EC 3.2.1.4)
  misc_feature (34)..(303): Homolog of NCBI NO: 1363496 NR Description: cellulase (EC 3.2.1.4) 3D precursor - pepper
  misc_feature (34)..(303): Homolog of NCBI NO: 1655543 NR Description: cellulase; endo-beta-1,4-glucanase [Capsicum
  misc_feature (5)..(309): Homolog of NCBI NO: 575404 NR Description: cellulase [Sambucus nigra]
  misc_feature (34)..(303): Homolog of NCBI NO: 7488977 NR Description: cellulase (EC 3.2.1.4) Cel1 precursor - tomato
  misc_feature (5)..(309): Homolog of NCBI NO: 1076692 NR Description: cellulase (EC 3.2.1.4) - European elder (fragment)
  misc_feature (2)..(309): Homolog of NCBI NO: 228690 NR Description: abscission cellulase
  misc_feature (36)..(301): Homolog of NCBI NO: 15236526 NR Description: glycosyl hydrolase family 9; protein id:
  misc_feature (37)..(303): Homolog of NCBI NO: 1655545 NR Description: endo-beta-1,4-glucanase [Capsicum annuum]
MAVKVWVFAVALMMCAGVGLGADDDGGSRLISRCRLSSPNYRGALAKAILFFEGQRSGRLPANQRVRWRGDSALTERPTRKRELDGWLLRRRRQRQVRVSPMAFSVTLLSWSAVEYRDEVAAAGQLRHLRSAIQWGADFLLRAHTTPTTLYTQVGDGNADHQCWERPEDMDTPRTLYKITRSSPGSEAAGEAAAALAAAYLVFRDDRDKTLATQLLAASRSLFDFANDYRGSYQLSCPFYCSYSGYQDELQWASAWLYRATKDSKYLDFLQNNQGGSATEFSWDNKYPGAQLLATQEYLAGRTAAGRLQEGPGLVRLRRDAQQRQHADPHHPWRASLHPRLR

SEQ ID NO: 5831 - protein, 330 aa, Zea mays subsp. mays
  peptide (1)..(330): Ceres Seq. ID no. 12405586
  misc_feature (28)..(291): Pfam Name: Glycosyl hydrolase family 9 Pfam Description: Glycosyl hydrolase family 9
  misc_feature (1)..(297): Homolog of NCBI NO: 1039431 NR Description: cellulase [Phaseolus vulgaris]
  misc_feature (1)..(297): Homolog of NCBI NO: 1346225 NR Description: Endoglucanase precursor (Endo-1,4-beta-glucanase) cellulase) >gi|7488761|pir||T11783 cellulase (EC 3.2.1.4)
  misc_feature (22)..(291): Homolog of NCBI NO: 1363496 NR Description: cellulase (EC 3.2.1.4) 3D precursor - pepper
  misc_feature (22)..(291): Homolog of NCBI NO: 1655543 NR Description: cellulase; endo-beta-1,4-glucanase [Capsicum
  misc_feature (1)..(297): Homolog of NCBI NO: 575404 NR Description: cellulase [Sambucus nigra]
  misc_feature (22)..(291): Homolog of NCBI NO: 7488977 NR Description: cellulase (EC 3.2.1.4) Cel1 precursor - tomato
  misc_feature (1)..(297): Homolog of NCBI NO: 1076692 NR Description: cellulase (EC 3.2.1.4) - European elder (fragment)
  misc_feature (1)..(297): Homolog of NCBI NO: 228690 NR Description: abscission cellulase
  misc_feature (24)..(289): Homolog of NCBI NO: 15236526 NR Description: glycosyl hydrolase family 9; protein id:
  misc_feature (25)..(291): Homolog of NCBI NO: 1655545 NR Description: endo-beta-1,4-glucanase [Capsicum annuum]
MMCAGVGLGADDDGGSRLISRCRLSSPNYRGALAKAILFFEGQRSGRLPANQRVRWRGDSALTERPTRKRELDGWLLRRRRQRQVRVSPMAFSVTLLSWSAVEYRDEVAAAGQLRHLRSAIQWGADFLLRAHTTPTTLYTQVGDGNADHQCWERPEDMDTPRTLYKITRSSPGSEAAGEAAAALAAAYLVFRDDRDKTLATQLLAASRSLFDFANDYRGSYQLSCPFYCSYSGYQDELQWASAWLYRATKDSKYLDFLQNNQGGSATEFSWDNKYPGAQLLATQEYLAGRTAAGRLQEGPGLVRLRRDAQQRQHADPHHPWRASLHPRLR

SEQ ID NO: 5832 - DNA, 1109 bp, Zea mays subsp. mays
  misc_feature (1)..(1109): Ceres Seq. ID no. 13495270
  misc_feature: MA Experiment ID: 108543 Result: Up-regulated in Transcription
  misc_feature: MA Experiment ID: 20000492 Result: Down-regulated in Transcription
  misc_feature: MA Experiment 20000492 PARAMETER Experiment Name: Zm_Hybrid_Seed_Dev_P Parameter: DAP Value: 12
  misc_feature: MA Experiment 20000492 PARAMETER Experiment Name: Zm_Hybrid_Seed_Dev_P Parameter: Organism Value: Zea mays
  misc_feature: MA Experiment 20000492 PARAMETER Experiment Name: Zm_Hybrid_Seed_Dev_P Parameter: Plant Line Value: 35A19
  misc_feature: MA Experiment 20000492 PARAMETER Experiment Name: Zm_Hybrid_Seed_Dev_P Parameter: Tissue Value: Fert Kernel vs. Unfert Floret
  misc_feature: MA Experiment ID: 20000535 Result: Down-regulated in Transcription
  misc_feature: MA Experiment 20000535 PARAMETER Experiment Name: Zm_Hybrid_Seed_Dev_P Parameter: DAP Value: 30 vs. 12
  misc_feature: MA Experiment 20000535 PARAMETER Experiment Name: Zm_Hybrid_Seed_Dev_P Parameter: Organism Value: Zea mays
  misc_feature: MA Experiment 20000535 PARAMETER Experiment Name: Zm_Hybrid_Seed_Dev_P Parameter: Plant Line Value: 35A19
  misc_feature: MA Experiment 20000535 PARAMETER Experiment Name: Zm_Hybrid_Seed_Dev_P Parameter: Tissue Value: Embryo vs. Unfert Floret
  misc_feature: MA Experiment ID: 20000626 Result: Down-regulated in Transcription
  misc_feature: MA Experiment 20000626 PARAMETER Experiment Name: Zm_Herbicide-Treatments_P Parameter: Timepoint (hr) Value: 12
  misc_feature: MA Experiment 20000626 PARAMETER Experiment Name: Zm_Herbicide-Treatments_P Parameter: Tissue Value: Aerial
  misc_feature: MA Experiment 20000626 PARAMETER Experiment Name: Zm_Herbicide-Treatments_P Parameter: Treatment Value: Roundup vs. No Treatment
aaaaatcccgacgcgaatcgcccagaacgcgaggcggaatttcccatcctcttggacccccccccccccccctctgttcttcctccttcccccgctcctcgtccacacgctccgctccgattccgcccgcgtccgcggacccagatccggcgcccgcgcccatggcgacgcgcaggcgaatgctcctcaaggtcatcatcctcggcgacagcggggtcggcaagacctcgctgatgaaccagtacgtcaacaacaggttcagcaaccagtacaaggccaccatcggcgcggatttcctcaccaaggaggtccagatcgacgaccgcctcttcacactgcagatatgggatacggcaggacaggagcggtttcaaagtcttggtgtggcattttataggggagctgactgctgtgttcttgtatatgatgtcaacgtatccaagtcatttgaaaagctcaacaactggcgtgaggaattcctaattcaagccagcccatcagacccagagaatttcccatttgttgtgcttggtaacaagatcgatgttgatggtggtaacagccggactgtttctgagaagaaggctaaagcatggtgtgcttcaaagggaaacatcccctactttgagacgtcggctaaagagggcttcaatgtagaggctgcatttgagtgtatagcgaggaatgctgtaaaaaatgagccagaagaagatatgtatcttcctgatacgattgatgttgggggcgctggaaggcaacagcgttcgtcaggttgtgaatgctagaagatatggagcactgcgaattgctcggttggttggtctgattctctagggcttgttgtttgggtggcctgtgtcatcatttcatatatgtatttagtttgcaaaactgctatttgtggacactggatagtttggaagtctgcatgcgggtgcttattgtcgactcccgtgtagatgcagagaactcatttgtaactgccgtttcggtgttgtatcgtatctgcgctagatgctagtgttataacgcttttgattgttgatggattgcatatatgtactgtatttgtacatgaacagaacgtagtgcccattttcatagtgttc

SEQ ID NO: 5833 - protein, 260 aa, Zea mays subsp. mays
  peptide (1)..(260): Ceres Seq. ID no. 13495271
  misc_feature (63)..(231): Pfam Name: Ras family Pfam Description: Ras family
  misc_feature (54)..(260): Homolog of NCBI NO: 1370188 NR Description: RAB7D [Lotus japonicus]
  misc_feature (54)..(238): Homolog of NCBI NO: 34904236 NR Description: RAS-related GTP-binding protein Rab7 family
  misc_feature (54)..(260): Homolog of NCBI NO: 3914550 NR Description: RAS-RELATED PROTEIN RAB7
  misc_feature (54)..(260): Homolog of NCBI NO: 7388049 NR Description: Ras-related protein Rab7
  misc_feature (54)..(260): Homolog of NCBI NO: 15218194 NR Description: GTP-binding protein, putative [Arabidopsis
  misc_feature (54)..(260): Homolog of NCBI NO: 15233284 NR Description: Ras family GTP-binding protein [Arabidopsis
  misc_feature (54)..(259): Homolog of NCBI NO: 7438407 NR Description: GTP-binding protein Rab7a - common tobacco
  misc_feature (54)..(258): Homolog of NCBI NO: 3914557 NR Description: RAS-RELATED PROTEIN RAB7 (POSSIBLE
  misc_feature (54)..(260): Homolog of NCBI NO: 34484308 NR Description: putative GTP-binding protein [Cucumis sativus]
  misc_feature (54)..(260): Homolog of NCBI NO: 1370186 NR Description: RAB7C [Lotus japonicus]
KSRRESPRTRGGISHPLGPPPPPLCSSSFPRSSSTRSAPIPPASADPDPAPAPMATRRRMLLKVIILGDSGVGKTSLMNQYVNNRFSNQYKATIGADFLTKEVQIDDRLFTLQIWDTAGQERFQSLGVAFYRGADCCVLVYDVNVSKSFEKLNNWREEFLIQASPSDPENFPFVVLGNKIDVDGGNSRTVSEKKAKAWCASKGNIPYFETSAKEGFNVEAAFECIARNAVKNEPEEDMYLPDTIDVGGAGRQQRSSGCEC

SEQ ID NO: 5834 - protein, 207 aa, Zea mays subsp. mays
  peptide (1)..(207): Ceres Seq. ID no. 13495272
  misc_feature (10)..(178): Pfam Name: Ras family Pfam Description: Ras family
  misc_feature (1)..(207): Homolog of NCBI NO: 3914550 NR Description: RAS-RELATED PROTEIN RAB7
  misc_feature (1)..(207): Homolog of NCBI NO: 7388049 NR Description: Ras-related protein Rab7
  misc_feature (1)..(207): Homolog of NCBI NO: 15218194 NR Description: GTP-binding protein, putative [Arabidopsis
  misc_feature (1)..(207): Homolog of NCBI NO: 15233284 NR Description: Ras family GTP-binding protein [Arabidopsis
  misc_feature (1)..(207): Homolog of NCBI NO: 1370188 NR Description: RAB7D [Lotus japonicus]
  misc_feature (1)..(185): Homolog of NCBI NO: 34904236 NR Description: RAS-related GTP-binding protein Rab7 family
  misc_feature (1)..(206): Homolog of NCBI NO: 7438407 NR Description: GTP-binding protein Rab7a - common tobacco
  misc_feature (1)..(205): Homolog of NCBI NO: 3914557 NR Description: RAS-RELATED PROTEIN RAB7 (POSSIBLE
  misc_feature (1)..(207): Homolog of NCBI NO: 34484308 NR Description: putative GTP-binding protein [Cucumis sativus]
  misc_feature (1)..(207): Homolog of NCBI NO: 1370186 NR Description: RAB7C [Lotus japonicus]
MATRRRMLLKVIILGDSGVGKTSLMNQYVNNRFSNQYKATIGADFLTKEVQIDDRLFTLQIWDTAGQERFQSLGVAFYRGADCCVLVYDVNVSKSFEKLNNWREEFLIQASPSDPENFPFVVLGNKIDVDGGNSRTVSEKKAKAWCASKGNIPYFETSAKEGFNVEAAFECIARNAVKNEPEEDMYLPDTIDVGGAGRQQRSSGCEC

SEQ ID NO: 5835 - protein, 201 aa, Zea mays subsp. mays
  peptide (1)..(201): Ceres Seq. ID no. 13495273
  misc_feature (4)..(172): Pfam Name: Ras family Pfam Description: Ras family
  misc_feature (1)..(201): Homolog of NCBI NO: 1370188 NR Description: RAB7D [Lotus japonicus]
  misc_feature (1)..(179): Homolog of NCBI NO: 34904236 NR Description: RAS-related GTP-binding protein Rab7 family
  misc_feature (1)..(201): Homolog of NCBI NO: 3914550 NR Description: RAS-RELATED PROTEIN RAB7
  misc_feature (1)..(201): Homolog of NCBI NO: 7388049 NR Description: Ras-related protein Rab7
  misc_feature (1)..(201): Homolog of NCBI NO: 15218194 NR Description: GTP-binding protein, putative [Arabidopsis
  misc_feature (1)..(201): Homolog of NCBI NO: 15233284 NR Description: Ras family GTP-binding protein [Arabidopsis
  misc_feature (1)..(200): Homolog of NCBI NO: 7438407 NR Description: GTP-binding protein Rab7a - common tobacco
  misc_feature (1)..(199): Homolog of NCBI NO: 3914557 NR Description: RAS-RELATED PROTEIN RAB7 (POSSIBLE
  misc_feature (1)..(201): Homolog of NCBI NO: 34484308 NR Description: putative GTP-binding protein [Cucumis sativus]
  misc_feature (1)..(201): Homolog of NCBI NO: 1370186 NR Description: RAB7C [Lotus japonicus]
MLLKVIILGDSGVGKTSLMNQYVNNRFSNQYKATIGADFLTKEVQIDDRLFTLQIWDTAGQERFQSLGVAFYRGADCCVLVYDVNVSKSFEKLNNWREEFLIQASPSDPENFPFVVLGNKIDVDGGNSRTVSEKKAKAWCASKGNIPYFETSAKEGFNVEAAFECIARNAVKNEPEEDMYLPDTIDVGGAGRQQRSSGCEC

SEQ ID NO: 5836 - DNA, 1522 bp, Zea mays subsp. mays
  misc_feature (1)..(1522): Ceres Seq. ID no. 12369443
  misc_feature: MA Experiment ID: 108529 Result: Up-regulated in Transcription
  misc_feature: MA Experiment 108529 PARAMETER Experiment Name: Zm_Imbibed_Seeds_P Parameter: Age (day) Value: 5 vs. 2
  misc_feature: MA Experiment 108529 PARAMETER Experiment Name: Zm_Imbibed_Seeds_P Parameter: Organism Value: Zea mays
  misc_feature: MA Experiment 108529 PARAMETER Experiment Name: Zm_Imbibed_Seeds_P Parameter: Plant Line Value: 35A19
  misc_feature: MA Experiment 108529 PARAMETER Experiment Name: Zm_Imbibed_Seeds_P Parameter: Tissue Value: Roots vs. Embryo
  misc_feature: MA Experiment ID: 108535 Result: Down-regulated in Transcription
  misc_feature: MA Experiment 108535 PARAMETER Experiment Name: Zm_Meristem_P Parameter: Age (day) Value: 8
  misc_feature: MA Experiment 108535 PARAMETER Experiment Name: Zm_Meristem_P Parameter: Organism Value: Zea mays
  misc_feature: MA Experiment 108535 PARAMETER Experiment Name: Zm_Meristem_P Parameter: Plant Line Value: 35A19
  misc_feature: MA Experiment 108535 PARAMETER Experiment Name: Zm_Meristem_P Parameter: Tissue Value: Root Meristem vs. Above Root Meristem
  misc_feature: MA Experiment ID: 108543 Result: Up-regulated in Transcription
  misc_feature: MA Experiment ID: 108546 Result: Up-regulated in Transcription
  misc_feature: MA Experiment 108546 PARAMETER Experiment Name: Zm_Imbibed_Seeds_P Parameter: Age (day) Value: 3 vs. 2
  misc_feature: MA Experiment 108546 PARAMETER Experiment Name: Zm_Imbibed_Seeds_P Parameter: Organism Value: Zea mays
  misc_feature: MA Experiment 108546 PARAMETER Experiment Name: Zm_Imbibed_Seeds_P Parameter: Plant Line Value: 35A19
  misc_feature: MA Experiment 108546 PARAMETER Experiment Name: Zm_Imbibed_Seeds_P Parameter: Tissue Value: Roots vs. Embryo
  misc_feature: MA Experiment ID: 20000108 Result: Down-regulated in Transcription
  misc_feature: MA Experiment 20000108 PARAMETER Experiment Name: Zm_Root-Tips_P Parameter: Age (day) Value: 12
  misc_feature: MA Experiment 20000108 PARAMETER Experiment Name: Zm_Root-Tips_P Parameter: Organism Value: Zea mays
  misc_feature: MA Experiment 20000108 PARAMETER Experiment Name: Zm_Root-Tips_P Parameter: Tissue Value: Root tips vs. Root mid region    35
  misc_feature: MA Experiment 20000108 PARAMETER Experiment Name: Zm_Root-Tips_P Parameter: Tissue Value: Root tips vs. Root mid region   Sequence Listing-Misc Features (4)
  misc_feature: MA Experiment ID: 20000477 Result: Down-regulated in Transcription
  misc_feature: MA Experiment 20000477 PARAMETER Experiment Name: Zm_5mM_SA_P Parameter: Age (day) Value: 10
  misc_feature: MA Experiment 20000477 PARAMETER Experiment Name: Zm_5mM_SA_P Parameter: Organism Value: Zea mays
  misc_feature: MA Experiment 20000477 PARAMETER Experiment Name: Zm_5mM_SA_P Parameter: Plant Line Value: 35A19
  misc_feature: MA Experiment 20000477 PARAMETER Experiment Name: Zm_5mM_SA_P Parameter: Timepoint (hr) Value: 48
  misc_feature: MA Experiment 20000477 PARAMETER Experiment Name: Zm_5mM_SA_P Parameter: Tissue Value: Aerial
  misc_feature: MA Experiment 20000477 PARAMETER Experiment Name: Zm_5mM_SA_P Parameter: Treatment Value: 5mM SA vs. No Treatment
  misc_feature: MA Experiment ID: 20000478 Result: Down-regulated in Transcription
  misc_feature: MA Experiment 20000478 PARAMETER Experiment Name: Zm_5mM_SA_P Parameter: Age (day) Value: 11
  misc_feature: MA Experiment 20000478 PARAMETER Experiment Name: Zm_5mM_SA_P Parameter: Organism Value: Zea mays
  misc_feature: MA Experiment 20000478 PARAMETER Experiment Name: Zm_5mM_SA_P Parameter: Plant Line Value: 35A19
  misc_feature: MA Experiment 20000478 PARAMETER Experiment Name: Zm_5mM_SA_P Parameter: Timepoint (hr) Value: 72
  misc_feature: MA Experiment 20000478 PARAMETER Experiment Name: Zm_5mM_SA_P Parameter: Tissue Value: Aerial
  misc_feature: MA Experiment 20000478 PARAMETER Experiment Name: Zm_5mM_SA_P Parameter: Treatment Value: 5mM SA vs. No Treatment
  misc_feature: MA Experiment ID: 20000479 Result: Down-regulated in Transcription
  misc_feature: MA Experiment 20000479 PARAMETER Experiment Name: Zm_Drought_P Parameter: Age (day) Value: 10
  misc_feature: MA Experiment 20000479 PARAMETER Experiment Name: Zm_Drought_P Parameter: Organism Value: Zea mays
  misc_feature: MA Experiment 20000479 PARAMETER Experiment Name: Zm_Drought_P Parameter: Plant Line Value: 35A19
  misc_feature: MA Experiment 20000479 PARAMETER Experiment Name: Zm_Drought_P Parameter: Timepoint (hr) Value: 48
  misc_feature: MA Experiment 20000479 PARAMETER Experiment Name: Zm_Drought_P Parameter: Tissue Value: Aerial
  misc_feature: MA Experiment 20000479 PARAMETER Experiment Name: Zm_Drought_P Parameter: Treatment Value: Drought vs. No Drought
  misc_feature: MA Experiment ID: 20000480 Result: Down-regulated in Transcription
  misc_feature: MA Experiment 20000480 PARAMETER Experiment Name: Zm_Drought_P Parameter: Age (day) Value: 11
  misc_feature: MA Experiment 20000480 PARAMETER Experiment Name: Zm_Drought_P Parameter: Organism Value: Zea mays
  misc_feature: MA Experiment 20000480 PARAMETER Experiment Name: Zm_Drought_P Parameter: Plant Line Value: 35A19
  misc_feature: MA Experiment 20000480 PARAMETER Experiment Name: Zm_Drought_P Parameter: Timepoint (hr) Value: 72
  misc_feature: MA Experiment 20000480 PARAMETER Experiment Name: Zm_Drought_P Parameter: Tissue Value: Aerial
  misc_feature: MA Experiment 20000480 PARAMETER Experiment Name: Zm_Drought_P Parameter: Treatment Value: Drought vs. No Drought
  misc_feature: MA Experiment ID: 20000492 Result: Down-regulated in Transcription
  misc_feature: MA Experiment 20000492 PARAMETER Experiment Name: Zm_Hybrid_Seed_Dev_P Parameter: DAP Value: 12
  misc_feature: MA Experiment 20000492 PARAMETER Experiment Name: Zm_Hybrid_Seed_Dev_P Parameter: Organism Value: Zea mays
  misc_feature: MA Experiment 20000492 PARAMETER Experiment Name: Zm_Hybrid_Seed_Dev_P Parameter: Plant Line Value: 35A19
  misc_feature: MA Experiment 20000492 PARAMETER Experiment Name: Zm_Hybrid_Seed_Dev_P Parameter: Tissue Value: Fert Kernel vs. Unfert Floret
  misc_feature: MA Experiment ID: 20000535 Result: Down-regulated in Transcription
  misc_feature: MA Experiment 20000535 PARAMETER Experiment Name: Zm_Hybrid_Seed_Dev_P Parameter: DAP Value: 30 vs. 12
  misc_feature: MA Experiment 20000535 PARAMETER Experiment Name: Zm_Hybrid_Seed_Dev_P Parameter: Organism Value: Zea mays
  misc_feature: MA Experiment 20000535 PARAMETER Experiment Name: Zm_Hybrid_Seed_Dev_P Parameter: Plant Line Value: 35A19
  misc_feature: MA Experiment 20000535 PARAMETER Experiment Name: Zm_Hybrid_Seed_Dev_P Parameter: Tissue Value: Embryo vs. Unfert Floret
gtcgcatcgcacgccatcagcagctagcgcgctcctcgagcccagcagagaaaggccggcctacccactctctctctctctctctccagtctccaccggcagcgctaatcgtaatagccatgggctccaccgccggcgacgtggccgcggtggtggacgaggaggcgtgcatgtacgcgatgcagctggcgtcgtcgtccatcctgcccatgacgctgaagaacgccatcgagctgggcctgctggaggtgctgcagaaggaggccggcggcggcaaggcggcgctggcgcccgaggaggtggtggcgcggatgcccgcggcgcccggcgaccccgccgccgcggcggccatggtggaccgcatgctccgcctgctcgcctcctacgacgtcgtccggtgccagatggaggaccgggacggccggtacgagcgccgctactccgccgcgcccgtctgcaagtggctcacccccaacgaggacggcgtgtccatggccgccctcgcgctcatgaaccaggacaaggtcctcatggagagctggtactatctcaaggacgcggtgctggacggcggcatcccgttcaacaaggcgtacgggatgacggcgttcgagtaccacggcacggactcgcgcttcaaccgcgtgttcaacgagggcatgaagaaccactcggtgatcatcaccaagaagctgctggacttctacacgggcttcgagggcgtgtcgacgctggtggacgtgggcggcggcgtgggcgccacgctgcacgccatcacgtcccgccacccgcacatctccggggtcaacttcgacctgccgcacgtcatctccgaggcgccgccgttccccggcgtgcgccacgtgggcggggacatgttcgcgtccgtgcccgccggcgacgccatcctcatgaagtggatcctccacgactggagcgacgcgcactgcgccacgctgctcaagaactgctacgacgcgctgccggaaaatggcaaggtcatcgtcgtcgagtgcgtgctgccggtcaacacggaggccacccccaaggcgcagggcgtcttccacgtcgacatgatcatgctcgcgcacaaccccggcggcaaggagcggtacgagcgcgagttccgcgagctcgcaaagggcgccggcttctccgggttcaaggccacctgcatctacgccaacgcctgggccatcgagttcatcaagtgaaccaccgtcgccgcgatgagatggcatggctgccacatgctttgcttgcttggtcctcgtatcgtacgtcgccgtcgtcgtcttcttctggttattgcgctgctacctcgctgctctcgcgtatgcatgtacttttgcttaattttctttcttcatatcatgcactctggctggcctagactgcccccgatccatggtggccggtacgtcttgtcgagctcttgcatgtcgtggattctaaattcttcttctgcgtcgaattgtctctgccatgtgcgagtaataacaatcaaggttatacttacggt

SEQ ID NO: 5837 - protein, 463 aa, Zea mays subsp. mays
  peptide (1)..(463): Ceres Seq. ID no. 12369444
  misc_feature (71)..(300): Pfam Name: HlyD family secretion protein Pfam Description: HlyD family secretion protein
  misc_feature (3)..(386): Homolog of NCBI NO: 29247944 NR Description: GLP_26_54603_52153 [Giardia lamblia ATCC 50803]
  misc_feature (14)..(300): Homolog of NCBI NO: 23106326 NR Description: hypothetical protein [Azotobacter vinelandii]
SHRTPSAASALLEPSRERPAYPLSLSLSPVSTGSANRNSHGLHRRRRGRGGGRGGVHVRDAAGVVVHPAHDAEERHRAGPAGGAAEGGRRRQGGAGARGGGGADARGARRPRRRGGHGGPHAPPARLLRRRPVPDGGPGRPVRAPLLRRARLQVAHPQRGRRVHGRPRAHEPGQGPHGELVLSQGRGAGRRHPVQQGVRDDGVRVPRHGLALQPRVQRGHEEPLGDHHQEAAGLLHGLRGRVDAGGRGRRRGRHAARHHVPPPAHLRGQLRPAARHLRGAAVPRRAPRGRGHVRVRARRRRHPHEVDPPRLERRALRHAAQELLRRAAGKWQGHRRRVRAAGQHGGHPQGAGRLPRRHDHARAQPRRQGAVRARVPRARKGRRLLRVQGHLHLRQRLGHRVHQVNHRRRDEMAWLPHALLAWSSYRTSPSSSSSGYCAATSLLSRMHVLLLNFLSSYHALWLA

SEQ ID NO: 5838 - protein, 403 aa, Zea mays subsp. mays
  peptide (1)..(403): Ceres Seq. ID no. 12369445
  misc_feature (139)..(380): Pfam Name: O-methyltransferase Pfam Description: O-methyltransferase
  misc_feature (40)..(403): Homolog of NCBI NO: 729135 NR Description: Caffeic acid 3-O-methyltransferase (S-adenosysl-L-
  misc_feature (40)..(403): Homolog of NCBI NO: 28569609 NR Description: caffeic acid O-methyltransferase [Sorghum bicolor]
  misc_feature (40)..(403): Homolog of NCBI NO: 18033964 NR Description: O-methyltransferase [Sorghum bicolor]
  misc_feature (40)..(403): Homolog of NCBI NO: 14578615 NR Description: caffeic acid O-methyltransferase [Festuca
  misc_feature (40)..(403): Homolog of NCBI NO: 14578613 NR Description: caffeic acid O-methyltransferase [Festuca
  misc_feature (40)..(403): Homolog of NCBI NO: 14578617 NR Description: caffeic acid O-methyltransferase [Festuca
  misc_feature (40)..(403): Homolog of NCBI NO: 4104224 NR Description: caffeic acid O-methyltransferase; LPOMT3 [Lolium
  misc_feature (40)..(403): Homolog of NCBI NO: 14578611 NR Description: caffeic acid O-methyltransferase [Festuca
  misc_feature (40)..(403): Homolog of NCBI NO: 4104220 NR Description: caffeic acid O-methyltransferase; LPOMT1 [Lolium
  misc_feature (208)..(403): Homolog of NCBI NO: 15240132 NR Description: O-methyltransferase, family 2 family; protein id:
RIARHQQLARSSSPAEKGRPTHSLSLSLQSPPAALIVIAMGSTAGDVAAVVDEEACMYAMQLASSSILPMTLKNAIELGLLEVLQKEAGGGKAALAPEEVVARMPAAPGDPAAAAAMVDRMLRLLASYDVVRCQMEDRDGRYERRYSAAPVCKWLTPNEDGVSMAALALMNQDKVLMESWYYLKDAVLDGGIPFNKAYGMTAFEYHGTDSRFNRVFNEGMKNHSVIITKKLLDFYTGFEGVSTLVDVGGGVGATLHAITSRHPHISGVNFDLPHVISEAPPFPGVRHVGGDMFASVPAGDAILMKWILHDWSDAHCATLLKNCYDALPENGKVIVVECVLPVNTEATPKAQGVFHVDMIMLAHNPGGKERYEREFRELAKGAGFSGFKATCIYANAWAIEFIK

SEQ ID NO: 5839 - protein, 364 aa, Zea mays subsp. mays
  peptide (1)..(364): Ceres Seq. ID no. 12369446
  misc_feature (100)..(341): Pfam Name: O-methyltransferase Pfam Description: O-methyltransferase
  misc_feature (1)..(364): Homolog of NCBI NO: 729135 NR Description: Caffeic acid 3-O-methyltransferase (S-adenosysl-L-
  misc_feature (1)..(364): Homolog of NCBI NO: 28569609 NR Description: caffeic acid O-methyltransferase [Sorghum bicolor]
  misc_feature (1)..(364): Homolog of NCBI NO: 18033964 NR Description: O-methyltransferase [Sorghum bicolor]
  misc_feature (1)..(364): Homolog of NCBI NO: 14578615 NR Description: caffeic acid O-methyltransferase [Festuca
  misc_feature (1)..(364): Homolog of NCBI NO: 14578613 NR Description: caffeic acid O-methyltransferase [Festuca
  misc_feature (1)..(364): Homolog of NCBI NO: 14578617 NR Description: caffeic acid O-methyltransferase [Festuca
  misc_feature (1)..(364): Homolog of NCBI NO: 4104224 NR Description: caffeic acid O-methyltransferase; LPOMT3 [Lolium
  misc_feature (1)..(364): Homolog of NCBI NO: 14578611 NR Description: caffeic acid O-methyltransferase [Festuca
  misc_feature (1)..(364): Homolog of NCBI NO: 4104220 NR Description: caffeic acid O-methyltransferase; LPOMT1 [Lolium
  misc_feature (169)..(364): Homolog of NCBI NO: 15240132 NR Description: O-methyltransferase, family 2 family; protein id:
MGSTAGDVAAVVDEEACMYAMQLASSSILPMTLKNAIELGLLEVLQKEAGGGKAALAPEEVVARMPAAPGDPAAAAAMVDRMLRLLASYDVVRCQMEDRDGRYERRYSAAPVCKWLTPNEDGVSMAALALMNQDKVLMESWYYLKDAVLDGGIPFNKAYGMTAFEYHGTDSRFNRVFNEGMKNHSVIITKKLLDFYTGFEGVSTLVDVGGGVGATLHAITSRHPHISGVNFDLPHVISEAPPFPGVRHVGGDMFASVPAGDAILMKWILHDWSDAHCATLLKNCYDALPENGKVIVVECVLPVNTEATPKAQGVFHVDMIMLAHNPGGKERYEREFRELAKGAGFSGFKATCIYANAWAIEFIK

SEQ ID NO: 5840 - DNA, 1425 bp, Zea mays subsp. mays
  misc_feature (1)..(1425): Ceres Seq. ID no. 12373632
  misc_feature: MA Experiment ID: 108687 Result: Down-regulated in Transcription
  misc_feature: MA Experiment 108687 PARAMETER Experiment Name: Zm_Embryos-Flowers__P Parameter: Tissue Value: Embryo vs. Aerial+
ctctctccccaccatcagcagaccaccaccaatcacacacaccggccggccagctctctagctcttcctccaacacttgttgctccgctcccatcccctcaagcctctcttcactgaattttctggtcgccatgcacagctactacagagccatgcacccgtacgctcacccgtaccagcaccatgccgccgccgttgcccccaccaccaagcacggacactgccatgatgccgaggaggaggacgaccatcagtccatgctgctcctctccctgtggcctcccggccaccaccaccacagcgtcgccgccgccgcttcctcggcgtgctcgtctcctcccaccatatgcgccaccaccagcaccacctccatggccgcctccgccgcttcttcttacccttgttgcctcacccaccaaagccattacaatggcggcggatctgcagggagcagcagccacagtagctgcttcttgttccaccacgagcaccagcagcagcaggagcccgatgtgagcatatcgctgtccatagccccgccgcgcagcaacaacgacgcagcttcctgtggtggccgtggcttcgctgccccgtcgacggtgacgacgccggaggtgcccaccagccagtactggatcccctccgcctccgagatcctggtcggctccacgcagttctcctgcgccgtctgcaacaagaccttcaaccgcttcaacaacatgcagatgcacatgtggggccacggttcgcagtaccgcaagggctccgagtccctgctacgcggcgccattatcacggtgggcacggcggcggcggcgtcgtcgtcgctgacgcgcctgccgtgctactgctgcgcggaggggtgccggaacaacatcgagcacccgcgggcgcggccgctcaaggacttccgcacgctgcagacgcactaccggcgcaagcacggcgcccggccctacgcgtgccgccgctgcggcaagcgcttcgccgtgcgcggcgactggcgcacgcacgagaagaactgcggcaggctctggttctgcgcctgcggctccgacttcaagcacaagcggtcgctcaaggaccacgtccgatccttcggcggcggccacgcgccgcgcgtcgtcgagtccgtcgccgtcgaggacgaggaggaggaggaggacgtcgacgacgctgatgacgatggcgacctgcagactttcgacgacaacggcgccagcggagaacgacccagcgacatggtcgtcgtctagaggcttgcttcttcattaattagatcgatgtggtactatagtatgctagctactctactccaccgatggacataagtagttctaatgtgctgctcatgcatctcttagcccgatcgcgcggtcttattagctatatatatatatatatatagatttcatttcagtagtt

SEQ ID NO: 5841 - protein, 417 aa, Zea mays subsp. mays
  peptide (1)..(417): Ceres Seq. ID no. 12373633
  misc_feature (345)..(370): Pfam Name: Zinc finger, C2H2 type Pfam Description: Zinc finger, C2H2 type
  misc_feature (161)..(410): Homolog of NCBI NO: 15222242 NR Description: zinc finger protein, putative; protein id:
  misc_feature (150)..(395): Homolog of NCBI NO: 28973719 NR Description: putative zinc finger protein [Arabidopsis
  misc_feature (150)..(395): Homolog of NCBI NO: 15230370 NR Description: zinc finger - like protein; protein id: supported by cDNA: gi_18027011 [Arabidopsis thaliana]
  misc_feature (210)..(393): Homolog of NCBI NO: 9294415 NR Description: zinc finger-like protein [Arabidopsis thaliana]
  misc_feature (210)..(393): Homolog of NCBI NO: 30685975 NR Description: DNA-binding protein -related [Arabidopsis
  misc_feature (210)..(393): Homolog of NCBI NO: 15223781 NR Description: hypothetical protein; protein id: At1g51220.1 thaliana] >gi|18376498|emb|CAC86167.1| WIP5 protein [Arabidopsis
  misc_feature (207)..(379): Homolog of NCBI NO: 34908460 NR Description: P0683F02.21 [Oryza sativa (japonica
  misc_feature (204)..(388): Homolog of NCBI NO: 15223175 NR Description: hypothetical protein; protein id: At1g08290.1, by cDNA: gi_18027013, supported by cDNA: gi_20258781 [Arabidopsis >gi|6579204|gb|AAF18247.1|AC011438_9 T23G18.15 protein
LSPPSADHHQSHTPAGQLSSSSSNTCCSAPIPSSLSSLNFLVAMHSYYRAMHPYAHPYQHHAAAVAPTTKHGHCHDAEEEDDHQSMLLLSLWPPGHHHHSVAAAASSACSSPPTICATTSTTSMAASAASSYPCCLTHQSHYNGGGSAGSSSHSSCFLFHHEHQQQQEPDVSISLSIAPPRSNNDAASCGGRGFAAPSTVTTPEVPTSQYWIPSASEILVGSTQFSCAVCNKTFNRFNNMQMHMWGHGSQYRKGSESLLRGAIITVGTAAAASSSLTRLPCYCCAEGCRNNIEHPRARPLKDFRTLQTHYRRKHGARPYACRRCGKRFAVRGDWRTHEKNCGRLWFCACGSDFKHKRSLKDHVRSFGGGHAPRVVESVAVEDEEEEEDVDDADDDGDLQTFDDNGASGERPSDMVVV

SEQ ID NO: 5842 - protein, 374 aa, Zea mays subsp. mays
  peptide (1)..(374): Ceres Seq. ID no. 12373634
  misc_feature (302)..(327): Pfam Name: Zinc finger, C2H2 type Pfam Description: Zinc finger, C2H2 type
  misc_feature (118)..(367): Homolog of NCBI NO: 15222242 NR Description: zinc finger protein, putative; protein id:
  misc_feature (107)..(352): Homolog of NCBI NO: 28973719 NR Description: putative zinc finger protein [Arabidopsis
  misc_feature (107)..(352): Homolog of NCBI NO: 15230370 NR Description: zinc finger - like protein; protein id: supported by cDNA: gi_18027011 [Arabidopsis thaliana]
  misc_feature (167)..(350): Homolog of NCBI NO: 9294415 NR Description: zinc finger-like protein [Arabidopsis thaliana]
  misc_feature (167)..(350): Homolog of NCBI NO: 30685975 NR Description: DNA-binding protein -related [Arabidopsis
  misc_feature (167)..(350): Homolog of NCBI NO: 15223781 NR Description: hypothetical protein; protein id: At1g51220.1 thaliana] >gi|18376498|emb|CAC86167.1| WIP5 protein [Arabidopsis
  misc_feature (164)..(336): Homolog of NCBI NO: 34908460 NR Description: P0683F02.21 [Oryza sativa (japonica
  misc_feature (161)..(345): Homolog of NCBI NO: 15223175 NR Description: hypothetical protein; protein id: At1g08290.1, by cDNA: gi_18027013, supported by cDNA: gi_20258781 [Arabidopsis >gi|6579204|gb|AAF18247.1|AC011438_9 T23G18.15 protein
MHSYYRAMHPYAHPYQHHAAAVAPTTKHGHCHDAEEEDDHQSMLLLSLWPPGHHHHSVAAAASSACSSPPTICATTSTTSMAASAASSYPCCLTHQSHYNGGGSAGSSSHSSCFLFHHEHQQQQEPDVSISLSIAPPRSNNDAASCGGRGFAAPSTVTTPEVPTSQYWIPSASEILVGSTQFSCAVCNKTFNRFNNMQMHMWGHGSQYRKGSESLLRGAIITVGTAAAASSSLTRLPCYCCAEGCRNNIEHPRARPLKDFRTLQTHYRRKHGARPYACRRCGKRFAVRGDWRTHEKNCGRLWFCACGSDFKHKRSLKDHVRSFGGGHAPRVVESVAVEDEEEEEDVDDADDDGDLQTFDDNGASGERPSDMVVV

SEQ ID NO: 5843 - protein, 367 aa, Zea mays subsp. mays
  peptide (1)..(367): Ceres Seq. ID no. 12373635
  misc_feature (295)..(320): Pfam Name: Zinc finger, C2H2 type Pfam Description: Zinc finger, C2H2 type
  misc_feature (111)..(360): Homolog of NCBI NO: 15222242 NR Description: zinc finger protein, putative; protein id:
  misc_feature (100)..(345): Homolog of NCBI NO: 28973719 NR Description: putative zinc finger protein [Arabidopsis
  misc_feature (100)..(345): Homolog of NCBI NO: 15230370 NR Description: zinc finger - like protein; protein id: supported by cDNA: gi_18027011 [Arabidopsis thaliana]
  misc_feature (160)..(343): Homolog of NCBI NO: 9294415 NR Description: zinc finger-like protein [Arabidopsis thaliana]
  misc_feature (160)..(343): Homolog of NCBI NO: 30685975 NR Description: DNA-binding protein -related [Arabidopsis
  misc_feature (160)..(343): Homolog of NCBI NO: 15223781 NR Description: hypothetical protein; protein id: At1g51220.1 thaliana] >gi|18376498|emb|CAC86167.1| WIP5 protein [Arabidopsis
  misc_feature (157)..(329): Homolog of NCBI NO: 34908460 NR Description: P0683F02.21 [Oryza sativa (japonica
  misc_feature (154)..(338): Homolog of NCBI NO: 15223175 NR Description: hypothetical protein; protein id: At1g08290.1, by cDNA: gi_18027013, supported by cDNA: gi_20258781 [Arabidopsis >gi|6579204|gb|AAF18247.1|AC011438_9 T23G18.15 protein
MHPYAHPYQHHAAAVAPTTKHGHCHDAEEEDDHQSMLLLSLWPPGHHHHSVAAAASSACSSPPTICATTSTTSMAASAASSYPCCLTHQSHYNGGGSAGSSSHSSCFLFHHEHQQQQEPDVSISLSIAPPRSNNDAASCGGRGFAAPSTVTTPEVPTSQYWIPSASEILVGSTQFSCAVCNKTFNRFNNMQMHMWGHGSQYRKGSESLLRGAIITVGTAAAASSSLTRLPCYCCAEGCRNNIEHPRARPLKDFRTLQTHYRRKHGARPYACRRCGKRFAVRGDWRTHEKNCGRLWFCACGSDFKHKRSLKDHVRSFGGGHAPRVVESVAVEDEEEEEDVDDADDDGDLQTFDDNGASGERPSDMVVV

SEQ ID NO: 5844 - DNA, 1098 bp, Zea mays subsp. mays
  misc_feature (1)..(1098): Ceres Seq. ID no. 13499010
  misc_feature: MA Experiment ID: 108515 Result: Up-regulated in Transcription
  misc_feature: MA Experiment 108515 PARAMETER Experiment Name: Zm_2mM_SA_P Parameter: Age (day) Value: 8
  misc_feature: MA Experiment 108515 PARAMETER Experiment Name: Zm_2mM_SA_P Parameter: Organism Value: Zea mays
  misc_feature: MA Experiment 108515 PARAMETER Experiment Name: Zm_2mM_SA_P Parameter: Plant Line Value: 35A19
  misc_feature: MA Experiment 108515 PARAMETER Experiment Name: Zm_2mM_SA_P Parameter: Timepoint (hr) Value: 12
  misc_feature: MA Experiment 108515 PARAMETER Experiment Name: Zm_2mM_SA_P Parameter: Tissue Value: Aerial
  misc_feature: MA Experiment 108515 PARAMETER Experiment Name: Zm_2mM_SA_P Parameter: Treatment Value: 2mM SA vs. No Treatment
  misc_feature: MA Experiment ID: 108522 Result: Up-regulated in Transcription
  misc_feature: MA Experiment 108522 PARAMETER Experiment Name: Zm_42deg_Heat_P Parameter: Age (day) Value: 8
  misc_feature: MA Experiment 108522 PARAMETER Experiment Name: Zm_42deg_Heat_P Parameter: Organism Value: Zea mays
  misc_feature: MA Experiment 108522 PARAMETER Experiment Name: Zm_42deg_Heat_P Parameter: Plant Line Value: 35A19
  misc_feature: MA Experiment 108522 PARAMETER Experiment Name: Zm_42deg_Heat_P Parameter: Temperature (deg C) Value: 42 vs. 22
  misc_feature: MA Experiment 108522 PARAMETER Experiment Name: Zm_42deg_Heat_P Parameter: Timepoint (hr) Value: 1
  misc_feature: MA Experiment 108522 PARAMETER Experiment Name: Zm_42deg_Heat_P Parameter: Tissue Value: Aerial
  misc_feature: MA Experiment ID: 108523 Result: Up-regulated in Transcription
  misc_feature: MA Experiment 108523 PARAMETER Experiment Name: Zm_42deg_Heat_P Parameter: Age (day) Value: 8
  misc_feature: MA Experiment 108523 PARAMETER Experiment Name: Zm_42deg_Heat_P Parameter: Organism Value: Zea mays
  misc_feature: MA Experiment 108523 PARAMETER Experiment Name: Zm_42deg_Heat_P Parameter: Plant Line Value: 35A19
  misc_feature: MA Experiment 108523 PARAMETER Experiment Name: Zm_42deg_Heat_P Parameter: Temperature (deg C) Value: 42 vs. 22
  misc_feature: MA Experiment 108523 PARAMETER Experiment Name: Zm_42deg_Heat_P Parameter: Timepoint (hr) Value: 6
  misc_feature: MA Experiment 108523 PARAMETER Experiment Name: Zm_42deg_Heat_P Parameter: Tissue Value: Aerial
  misc_feature: MA Experiment ID: 108527 Result: Up-regulated in Transcription
  misc_feature: MA Experiment 108527 PARAMETER Experiment Name: Zm_5mM_NO_P Parameter: Age (day) Value: 8
  misc_feature: MA Experiment 108527 PARAMETER Experiment Name: Zm_5mM_NO_P Parameter: Organism Value: Zea mays
  misc_feature: MA Experiment 108527 PARAMETER Experiment Name: Zm_5mM_NO_P Parameter: Plant Line Value: 35A19
  misc_feature: MA Experiment 108527 PARAMETER Experiment Name: Zm_5mM_NO_P Parameter: Timepoint (hr) Value: 6
  misc_feature: MA Experiment 108527 PARAMETER Experiment Name: Zm_5mM_NO_P Parameter: Tissue Value: Aerial
  misc_feature: MA Experiment 108527 PARAMETER Experiment Name: Zm_5mM_NO_P Parameter: Treatment Value: 5mM NO vs. No Treatment
  misc_feature: MA Experiment ID: 108543 Result: Down-regulated in Transcription
  misc_feature: MA Experiment ID: 108559 Result: Up-regulated in Transcription
  misc_feature: MA Experiment 108559 PARAMETER Experiment Name: Zm_5mM_NO_P Parameter: Age (day) Value: 8
  misc_feature: MA Experiment 108559 PARAMETER Experiment Name: Zm_5mM_NO_P Parameter: Organism Value: Zea mays
  misc_feature: MA Experiment 108559 PARAMETER Experiment Name: Zm_5mM_NO_P Parameter: Plant Line Value: 35A19
  misc_feature: MA Experiment 108559 PARAMETER Experiment Name: Zm_5mM_NO_P Parameter: Timepoint (hr) Value: 12
  misc_feature: MA Experiment 108559 PARAMETER Experiment Name: Zm_5mM_NO_P Parameter: Tissue Value: Aerial
  misc_feature: MA Experiment 108559 PARAMETER Experiment Name: Zm_5mM_NO_P Parameter: Treatment Value: 5mM NO vs. No Treatment
aagcaagtaagcaacccaaaccctccctcccctcccattcgattcttgcctcccacgccgccgccggatcccgcgatggccgaccctcggctgtaccccacggagtccgggtccgacgaccggcgcgatgccgcctatcccggctccgagcgccgcctctacaacccgtaccaggacctcaacctcccctatcggcagctctacgaccttcccacctccccggagttcctcttccaggaggaggccgtcgcgcagcgccggtcctggggcgagaacctcacctactacaccggcgtgggatacctcggcggcgccggggccggggccgcgctggggctccgcgacgccgcccgaggcgccgagcctggggagcccgccaagatccgggccaaccgcgtcctcaactcctgcggcagctccggacgccgcgtcggtaacacgctcggggtcatcggcctcatgtacgccgggatcgagagcgccatggtcgccgcccgcgaccgcgacgactggatcaacagcgtcgtggccgggctaggcaccggcgcgctcttccgcgccgctaacgggccgcgctcggcggtcgtcgccggggcccgttggtggggttcttgctggcgcctccgccgctgccaagcaggttgggaagagatacctccccgccctctaaatctgattgcggtacttgtctctgccctgccatgccgtgatcaagggaaatcatttcgtcgcgtggatgttatttcttcgttctcgttaattatttgggaagagtcatgttcttctcgacattcctatatattgttgacatccatatgctggtactatatatgtcaaagaacgatctgatctcaccagatcacgaaatttttggtccacattgcaatgtaacattagacgctagctggtatcgacacaataatactgctttttccattatgctggagaacccatgacattgtgaaatgtaatgctgagtgtagtgtagttttgctagattgtcgctgttttcctatatctctttaaagacgaaattcttcgcctgcccgatgtatgtaaaaaaagacatgccttgatctcagtgagatgttttatacg

SEQ ID NO: 5845 - protein, 282 aa, Zea mays subsp. mays
  peptide (1)..(282): Ceres Seq. ID no. 13499011
  misc_feature (82)..(199): Pfam Name: Tim17/Tim22/Tim23 family Pfam Description: Tim17/Tim22/Tim23 family
  misc_feature (26)..(199): Homolog of NCBI NO: 34902184 NR Description: Putative mitochondrial inner membrane protein
  misc_feature (26)..(199): Homolog of NCBI NO: 37536126 NR Description: putaive mitochondrial inner membrane protein
  misc_feature (48)..(199): Homolog of NCBI NO: 15218593 NR Description: inner mitochondrial membrane protein [Arabidopsis
  misc_feature (42)..(199): Homolog of NCBI NO: 13641346 NR Description: translocase of inner mitochondrial membrane TIM23
  misc_feature (42)..(199): Homolog of NCBI NO: 18394498 NR Description: inner mitochondrial membrane protein -related thaliana] >gi|8778460|gb|AAF79468.1|AC022492_12 F1L3.24 thaliana] >gi|15010570|gb|AAK73944.1| At1g17530/F11A6.4
  misc_feature (52)..(199): Homolog of NCBI NO: 15229350 NR Description: inner mitochondrial membrane protein -related thaliana] >gi|6175180|gb|AAF04906.1|AC011437_21 putative inner membrane protein [Arabidopsis thaliana]
  misc_feature (37)..(90): Homolog of NCBI NO: 12039278 NR Description: putative inner mitochondrial membrane protein
  misc_feature (157)..(199): Homolog of NCBI NO: 12039278 NR Description: putative inner mitochondrial membrane protein
  misc_feature (51)..(129): Homolog of NCBI NO: 38344267 NR Description: OSJNBa0005N02.5 [Oryza sativa (japonica
  misc_feature (33)..(199): Homolog of NCBI NO: 19075496 NR Description: putative mitochondrial import inner membrane subunit [Schizosaccharomyces pombe] Probable mitochondrial import inner membrane translocase subunit
KQVSNPNPPSPPIRFLPPTPPPDPAMADPRLYPTESGSDDRRDAAYPGSERRLYNPYQDLNLPYRQLYDLPTSPEFLFQEEAVAQRRSWGENLTYYTGVGYLGGAGAGAALGLRDAARGAEPGEPAKIRANRVLNSCGSSGRRVGNTLGVIGLMYAGIESAMVAARDRDDWINSVVAGLGTGALFRAANGPRSAVVAGARWWGSCWRLRRCQAGWEEIPPRPLNLIAVLVSALPCRDQGKSFRRVDVISSFSLIIWEESCSSRHSYILLTSICWYYICQRTI

SEQ ID NO: 5846 - protein, 257 aa, Zea mays subsp. mays
  peptide (1)..(257): Ceres Seq. ID no. 13499012
  misc_feature (57)..(174): Pfam Name: Tim17/Tim22/Tim23 family Pfam Description: Tim17/Tim22/Tim23 family
  misc_feature (1)..(174): Homolog of NCBI NO: 34902184 NR Description: Putative mitochondrial inner membrane protein
  misc_feature (1)..(174): Homolog of NCBI NO: 37536126 NR Description: putaive mitochondrial inner membrane protein
  misc_feature (23)..(174): Homolog of NCBI NO: 15218593 NR Description: inner mitochondrial membrane protein [Arabidopsis
  misc_feature (17)..(174): Homolog of NCBI NO: 13641346 NR Description: translocase of inner mitochondrial membrane TIM23
  misc_feature (17)..(174): Homolog of NCBI NO: 18394498 NR Description: inner mitochondrial membrane protein -related thaliana] >gi|8778460|gb|AAF79468.1|AC022492_12 F1L3.24 thaliana] >gi|15010570|gb|AAK73944.1| At1g17530/F11A6.4
  misc_feature (27)..(174): Homolog of NCBI NO: 15229350 NR Description: inner mitochondrial membrane protein -related thaliana] >gi|6175180|gb|AAF04906.1|AC011437_21 putative inner membrane protein [Arabidopsis thaliana]
  misc_feature (12)..(65): Homolog of NCBI NO: 12039278 NR Description: putative inner mitochondrial membrane protein
  misc_feature (132)..(174): Homolog of NCBI NO: 12039278 NR Description: putative inner mitochondrial membrane protein
  misc_feature (26)..(104): Homolog of NCBI NO: 38344267 NR Description: OSJNBa0005N02.5 [Oryza sativa (japonica
  misc_feature (8)..(174): Homolog of NCBI NO: 19075496 NR Description: putative mitochondrial import inner membrane subunit [Schizosaccharomyces pombe] Probable mitochondrial import inner membrane translocase subunit
MADPRLYPTESGSDDRRDAAYPGSERRLYNPYQDLNLPYRQLYDLPTSPEFLFQEEAVAQRRSWGENLTYYTGVGYLGGAGAGAALGLRDAARGAEPGEPAKIRANRVLNSCGSSGRRVGNTLGVIGLMYAGIESAMVAARDRDDWINSVVAGLGTGALFRAANGPRSAVVAGARWWGSCWRLRRCQAGWEEIPPRPLNLIAVLVSALPCRDQGKSFRRVDVISSFSLIIWEESCSSRHSYILLTSICWYYICQRTI

SEQ ID NO: 5847 - protein, 144 aa, Zea mays subsp. mays
  peptide (1)..(144): Ceres Seq. ID no. 13499013
  misc_feature (105)..(144): Homolog of NCBI NO: 38344267 NR Description: OSJNBa0005N02.5 [Oryza sativa (japonica
ASKQPKPSLPSHSILASHAAAGSRDGRPSAVPHGVRVRRPARCRLSRLRAPPLQPVPGPQPPLSAALRPSHLPGVPLPGGGRRAAPVLGREPHLLHRRGIPRRRRGRGRAGAPRRRPRRRAWGARQDPGQPRPQLLRQLRTPRR

SEQ ID NO: 5848 - DNA, 1486 bp, Zea mays subsp. mays
  misc_feature (1)..(1486): Ceres Seq. ID no. 12407390
  misc_feature: MA Experiment ID: 108522 Result: Up-regulated in Transcription
  misc_feature: MA Experiment 108522 PARAMETER Experiment Name: Zm_42deg_Heat_P Parameter: Age (day) Value: 8
  misc_feature: MA Experiment 108522 PARAMETER Experiment Name: Zm_42deg_Heat_P Parameter: Organism Value: Zea mays
  misc_feature: MA Experiment 108522 PARAMETER Experiment Name: Zm_42deg_Heat_P Parameter: Plant Line Value: 35A19
  misc_feature: MA Experiment 108522 PARAMETER Experiment Name: Zm_42deg_Heat_P Parameter: Temperature (deg C) Value: 42 vs. 22
  misc_feature: MA Experiment 108522 PARAMETER Experiment Name: Zm_42deg_Heat_P Parameter: Timepoint (hr) Value: 1
  misc_feature: MA Experiment 108522 PARAMETER Experiment Name: Zm_42deg_Heat_P Parameter: Tissue Value: Aerial
  misc_feature: MA Experiment ID: 20000535 Result: Down-regulated in Transcription
  misc_feature: MA Experiment 20000535 PARAMETER Experiment Name: Zm_Hybrid_Seed_Dev_P Parameter: DAP Value: 30 vs. 12
  misc_feature: MA Experiment 20000535 PARAMETER Experiment Name: Zm_Hybrid_Seed_Dev_P Parameter: Organism Value: Zea mays
  misc_feature: MA Experiment 20000535 PARAMETER Experiment Name: Zm_Hybrid_Seed_Dev_P Parameter: Plant Line Value: 35A19
  misc_feature: MA Experiment 20000535 PARAMETER Experiment Name: Zm_Hybrid_Seed_Dev_P Parameter: Tissue Value: Embryo vs. Unfert Floret
ccttttcttctcttctctctctctctctctctctctgatttcttctcttaactctcgcgtctcgcgtccttttcccttcctcccctccgttgcgtccgtcgtctgcgttgcgtccctccgtccgtccgtccgttggcccgtccgtcgtcaccagcctcctccctcgcgcccaccgccgggatccggccctcctcgtctgcgcccgcctcggtctagatttctgagaaaatggcgagaagtgcgggaactaggaggcgtgtggctcgccagctcaagtccacacatcccattccttcataccgatggaagtcaaagcccatgaaaaagccgatgaaaaaatccaaccgaaagcaagtgttgccaaccttgcaaaagatggactgggaagatgccaattgctctgtgtgcatggaatacccacataatgctgtgctcatcctttgttcatcccatgataagggttgtcgtccttatatgtgtggaactagctaccgccactctaattgcttggatcagttcaagaaagcttacaccaagggggcattgcttgaggaagttcctgcaaatagtgttggctctaatctggattcggcgccattgactgcagaaaaaactgactccattgaccttgcatgtcccttgtgtcgtggcaaggtgaaagggtggacggtggtggaaccagctcgaagctacctcaatggaaaacgaagaacatgcatgcaggatggttgctcatttgtggggacctacaaggagctccgcaagcatgtcaagttggaacaccctcttgcaaagccaagggaagttgatcctgtccttgagcaaaaatggagattgctcgagattgaaagagagcggcaagatgcgctcagtacgatcactgcaacaatgggcagagccgtcgtttttggtgattatgtgctagacttggaggatggaatggactcggaggatgttgacagtgatgctgataatgatggccgtgggacagaaaacactcgtaggatgctactatttattatgcgccaagttgctcaacatcaccaaaaccaaaggctccagaatgcgactggtgcatctgacaatgctgaggacaattatgtggtgagcagtggtgccaatggaaccacaccatactcttaccccttggagggggaggacgagaatggtatggttgtggccggaggcagaagcactgatgtgctgagaccagagaggaggcgccgtcgccgccgcaggaaccgtgggagattgtttttaggtgctaattgagaggacaggtgaccaggtagggtttagccgccagaggagtacatacagaaatgcttccctggtgcctggcattcatcaattcctgtctcaatttacttgatcatgatcatgtaccaagtagttatcttaacatcagctcattgtcataaatttatggtatctcacattcttcgttgaaaaaggaaaacaccgcatccatctcttgcggtttgtg

SEQ ID NO: 5849 - protein, 347 aa, Zea mays subsp. mays
  peptide (1)..(347): Ceres Seq. ID no. 12407391
  misc_feature (11)..(339): Homolog of NCBI NO: 15221290 NR Description: unknown protein; protein id: At1g68140.1, by cDNA: gi_17064999 [Arabidopsis thaliana]
  misc_feature (1)..(247): Homolog of NCBI NO: 38344827 NR Description: OSJNBa0064H22.8 [Oryza sativa (japonica
  misc_feature (127)..(255): Homolog of NCBI NO: 15236507 NR Description: hypothetical protein; protein id: At4g08460.1, by cDNA: gi_18389229 [Arabidopsis thaliana]
  misc_feature (47)..(111): Homolog of NCBI NO: 15236507 NR Description: hypothetical protein; protein id: At4g08460.1, by cDNA: gi_18389229 [Arabidopsis thaliana]
  misc_feature (127)..(250): Homolog of NCBI NO: 25365932 NR Description: unknown protein T32E8.10 [imported] - Arabidopsis
  misc_feature (127)..(250): Homolog of NCBI NO: 30699285 NR Description: expressed protein [Arabidopsis thaliana] unknown protein [Arabidopsis thaliana]
  misc_feature (49)..(101): Homolog of NCBI NO: 25365932 NR Description: unknown protein T32E8.10 [imported] - Arabidopsis
  misc_feature (49)..(101): Homolog of NCBI NO: 30699285 NR Description: expressed protein [Arabidopsis thaliana] unknown protein [Arabidopsis thaliana]
  misc_feature (125)..(333): Homolog of NCBI NO: 38346521 NR Description: OSJNBa0027H09.16 [Oryza sativa (japonica
  misc_feature (27)..(99): Homolog of NCBI NO: 38346521 NR Description: OSJNBa0027H09.16 [Oryza sativa (japonica
MARSAGTRRRVARQLKSTHPIPSYRWKSKPMKKPMKKSNRKQVLPTLQKMDWEDANCSVCMEYPHNAVLILCSSHDKGCRPYMCGTSYRHSNCLDQFKKAYTKGALLEEVPANSVGSNLDSAPLTAEKTDSIDLACPLCRGKVKGWTVVEPARSYLNGKRRTCMQDGCSFVGTYKELRKHVKLEHPLAKPREVDPVLEQKWRLLEIERERQDALSTITATMGRAVVFGDYVLDLEDGMDSEDVDSDADNDGRGTENTRRMLLFIMRQVAQHHQNQRLQNATGASDNAEDNYVVSSGANGTTPYSYPLEGEDENGMVVAGGRSTDVLRPERRRRRRRRNRGRLFLGAN

SEQ ID NO: 5850 - protein, 317 aa, Zea mays subsp. mays
  peptide (1)..(317): Ceres Seq. ID no. 12407392
  misc_feature (1)..(309): Homolog of NCBI NO: 15221290 NR Description: unknown protein; protein id: At1g68140.1, by cDNA: gi_17064999 [Arabidopsis thaliana]
  misc_feature (1)..(217): Homolog of NCBI NO: 38344827 NR Description: OSJNBa0064H22.8 [Oryza sativa (japonica
  misc_feature (97)..(225): Homolog of NCBI NO: 15236507 NR Description: hypothetical protein; protein id: At4g08460.1, by cDNA: gi_18389229 [Arabidopsis thaliana]
  misc_feature (17)..(81): Homolog of NCBI NO: 15236507 NR Description: hypothetical protein; protein id: At4g08460.1, by cDNA: gi_18389229 [Arabidopsis thaliana]
  misc_feature (97)..(220): Homolog of NCBI NO: 25365932 NR Description: unknown protein T32E8.10 [imported] - Arabidopsis
  misc_feature (97)..(220): Homolog of NCBI NO: 30699285 NR Description: expressed protein [Arabidopsis thaliana] unknown protein [Arabidopsis thaliana]
  misc_feature (19)..(71): Homolog of NCBI NO: 25365932 NR Description: unknown protein T32E8.10 [imported] - Arabidopsis
  misc_feature (19)..(71): Homolog of NCBI NO: 30699285 NR Description: expressed protein [Arabidopsis thaliana] unknown protein [Arabidopsis thaliana]
  misc_feature (95)..(303): Homolog of NCBI NO: 38346521 NR Description: OSJNBa0027H09.16 [Oryza sativa (japonica
  misc_feature (1)..(69): Homolog of NCBI NO: 38346521 NR Description: OSJNBa0027H09.16 [Oryza sativa (japonica
MKKPMKKSNRKQVLPTLQKMDWEDANCSVCMEYPHNAVLILCSSHDKGCRPYMCGTSYRHSNCLDQFKKAYTKGALLEEVPANSVGSNLDSAPLTAEKTDSIDLACPLCRGKVKGWTVVEPARSYLNGKRRTCMQDGCSFVGTYKELRKHVKLEHPLAKPREVDPVLEQKWRLLEIERERQDALSTITATMGRAVVFGDYVLDLEDGMDSEDVDSDADNDGRGTENTRRMLLFIMRQVAQHHQNQRLQNATGASDNAEDNYVVSSGANGTTPYSYPLEGEDENGMVVAGGRSTDVLRPERRRRRRRRNRGRLFLGAN

SEQ ID NO: 5851 - protein, 313 aa, Zea mays subsp. mays
  peptide (1)..(313): Ceres Seq. ID no. 12407393
  misc_feature (15)..(67): Homolog of NCBI NO: 30699285 NR Description: expressed protein [Arabidopsis thaliana] unknown protein [Arabidopsis thaliana]
  misc_feature (91)..(299): Homolog of NCBI NO: 38346521 NR Description: OSJNBa0027H09.16 [Oryza sativa (japonica
  misc_feature (1)..(65): Homolog of NCBI NO: 38346521 NR Description: OSJNBa0027H09.16 [Oryza sativa (japonica
  misc_feature (1)..(305): Homolog of NCBI NO: 15221290 NR Description: unknown protein; protein id: At1g68140.1, by cDNA: gi_17064999 [Arabidopsis thaliana]
  misc_feature (1)..(213): Homolog of NCBI NO: 38344827 NR Description: OSJNBa0064H22.8 [Oryza sativa (japonica
  misc_feature (93)..(221): Homolog of NCBI NO: 15236507 NR Description: hypothetical protein; protein id: At4g08460.1, by cDNA: gi_18389229 [Arabidopsis thaliana]
  misc_feature (13)..(77): Homolog of NCBI NO: 15236507 NR Description: hypothetical protein; protein id: At4g08460.1, by cDNA: gi_18389229 [Arabidopsis thaliana]
  misc_feature (93)..(216): Homolog of NCBI NO: 25365932 NR Description: unknown protein T32E8.10 [imported] - Arabidopsis
  misc_feature (93)..(216): Homolog of NCBI NO: 30699285 NR Description: expressed protein [Arabidopsis thaliana] unknown protein [Arabidopsis thaliana]
  misc_feature (15)..(67): Homolog of NCBI NO: 25365932 NR Description: unknown protein T32E8.10 [imported] - Arabidopsis
MKKSNRKQVLPTLQKMDWEDANCSVCMEYPHNAVLILCSSHDKGCRPYMCGTSYRHSNCLDQFKKAYTKGALLEEVPANSVGSNLDSAPLTAEKTDSIDLACPLCRGKVKGWTVVEPARSYLNGKRRTCMQDGCSFVGTYKELRKHVKLEHPLAKPREVDPVLEQKWRLLEIERERQDALSTITATMGRAVVFGDYVLDLEDGMDSEDVDSDADNDGRGTENTRRMLLFIMRQVAQHHQNQRLQNATGASDNAEDNYVVSSGANGTTPYSYPLEGEDENGMVVAGGRSTDVLRPERRRRRRRRNRGRLFLGAN

SEQ ID NO: 5852 - DNA, 1356 bp, Zea mays subsp. mays
  misc_feature (1)..(1356): Ceres Seq. ID no. 12379426
  misc_feature: MA Experiment ID: 20000479 Result: Up-regulated in Transcription
  misc_feature: MA Experiment 20000479 PARAMETER Experiment Name: Zm_Drought_P Parameter: Age (day) Value: 10
  misc_feature: MA Experiment 20000479 PARAMETER Experiment Name: Zm_Drought_P Parameter: Organism Value: Zea mays
  misc_feature: MA Experiment 20000479 PARAMETER Experiment Name: Zm_Drought_P Parameter: Plant Line Value: 35A19
  misc_feature: MA Experiment 20000479 PARAMETER Experiment Name: Zm_Drought_P Parameter: Timepoint (hr) Value: 48
  misc_feature: MA Experiment 20000479 PARAMETER Experiment Name: Zm_Drought_P Parameter: Tissue Value: Aerial
  misc_feature: MA Experiment 20000479 PARAMETER Experiment Name: Zm_Drought_P Parameter: Treatment Value: Drought vs. No Drought
  misc_feature: MA Experiment ID: 20000480 Result: Up-regulated in Transcription
  misc_feature: MA Experiment 20000480 PARAMETER Experiment Name: Zm_Drought_P Parameter: Age (day) Value: 11
  misc_feature: MA Experiment 20000480 PARAMETER Experiment Name: Zm_Drought_P Parameter: Organism Value: Zea mays
  misc_feature: MA Experiment 20000480 PARAMETER Experiment Name: Zm_Drought_P Parameter: Plant Line Value: 35A19
  misc_feature: MA Experiment 20000480 PARAMETER Experiment Name: Zm_Drought_P Parameter: Timepoint (hr) Value: 72
  misc_feature: MA Experiment 20000480 PARAMETER Experiment Name: Zm_Drought_P Parameter: Tissue Value: Aerial
  misc_feature: MA Experiment 20000480 PARAMETER Experiment Name: Zm_Drought_P Parameter: Treatment Value: Drought vs. No Drought
  misc_feature: MA Experiment ID: 20000535 Result: Up-regulated in Transcription
  misc_feature: MA Experiment 20000535 PARAMETER Experiment Name: Zm_Hybrid_Seed_Dev_P Parameter: DAP Value: 30 vs. 12
  misc_feature: MA Experiment 20000535 PARAMETER Experiment Name: Zm_Hybrid_Seed_Dev_P Parameter: Organism Value: Zea mays
  misc_feature: MA Experiment 20000535 PARAMETER Experiment Name: Zm_Hybrid_Seed_Dev_P Parameter: Plant Line Value: 35A19
  misc_feature: MA Experiment 20000535 PARAMETER Experiment Name: Zm_Hybrid_Seed_Dev_P Parameter: Tissue Value: Embryo vs. Unfert Floret
attgataacagatgtcggcattctcctcgctcctgctgccatcgtttttcctttttcctggacagccactgcaactcctcccaaatcctcccacccggtttagccggctccgctgccaccgccgcgactccacctctgtcgccaccatggtcaagtccaaggccatcagggtccacgagctgggcggccccgaggtgctgcggtgggaggaggtggaggtcggggagcccggtgaaggggagatccgcatcaggaccaccgccgtcggcgtcaacttcatcgacatctactttcggaagggggtctacgccgcgcccaccatgcccttcaccccaggaatggaagccgttggcgtcgtcaccgctgttgggcctggcctcactggcaggaaggtgggcgatgttgttgcatatgccggcaaccccatgggctcctatgctcaggagcagatccttccagcggctgtcgctgttcctgttccaccttccgttgatcataagcaagcagcttctgtgatgctcaagggcatgaccgcccatgttctgcttcgccgggtattcaaggttgagagtggccatactatcctggtccatgctgctgctggtggtgtcggctcactcctttgtcaatgggcaaacgcccttggtgccactgtcatcgggactgtttccaatcaagaaaaagccgctcaggcagctcaggatggatgccaccatcccataatttacactagcgaggatgtcgtcgcaagagtcaaggatattacatcaggaaaaggtgtcaatgtcgtctatgattctgttggaaaggatacatacaaggcttccctggagtgcttggcgtcccgcggcttcctggtgtcgtttgggcagtcgtcaggcaaacctgacccaatcccaacgagcgacctggcttccaagtccttgttcctcactcgtcctagcctcatgcattacactgctacccgtgatgagctgctggagtcagccggcgaggtgtttgccaatgtcgctaaggccttgtttggataaagagggattgaagtggattgaagtgtattttagggattgaaagagaaattagttcatattacacttcaatacaccttataccacctcaatccactccaatccaagattatccaaacaaggcctaacggggtgctgcacgtccgggtaaaccacacgtatccattgtcggaagctgcccaggcccatgcagatctggagggcaggaagacatcagggtccatagtgctcatcccgggatagactcaagggcatgtgaatgaataaatggggtgatctggttatgggaacggcgtaataataattatatctatgctgtttatgcggg

SEQ ID NO: 5853 - protein, 339 aa, Zea mays subsp. mays
  peptide (1)..(339): Ceres Seq. ID no. 12379427
  misc_feature (50)..(337): Homolog of NCBI NO: 7430955 NR Description: quinone oxidoreductase homolog - cowpea
  misc_feature (50)..(337): Homolog of NCBI NO: 15240274 NR Description: quinone oxidoreductase - like protein; protein At5g61510.1, supported by cDNA: 37197. [Arabidopsis thaliana]
  misc_feature (47)..(334): Homolog of NCBI NO: 13570000 NR Description: putative quinone oxidoreductase [Oryza sativa]
  misc_feature (47)..(184): Homolog of NCBI NO: 37536850 NR Description: putative quinone oxidoreductase [Oryza sativa
  misc_feature (206)..(334): Homolog of NCBI NO: 37536850 NR Description: putative quinone oxidoreductase [Oryza sativa
  misc_feature (47)..(337): Homolog of NCBI NO: 23014744 NR Description: hypothetical protein [Magnetospirillum
  misc_feature (50)..(337): Homolog of NCBI NO: 531096 NR Description: TED2 [Zinnia elegans]
  misc_feature (50)..(330): Homolog of NCBI NO: 22982287 NR Description: hypothetical protein [Burkholderia fungorum]
  misc_feature (51)..(336): Homolog of NCBI NO: 27381248 NR Description: quinone oxidoreductase [Bradyrhizobium japonicum]
  misc_feature (51)..(330): Homolog of NCBI NO: 23500315 NR Description: quinone oxidoreductase [Brucella suis 1330]
MSAFSSLLLPSFFLFPGQPLQLLPNPPTRFSRLRCHRRDSTSVATMVKSKAIRVHELGGPEVLRWEEVEVGEPGEGEIRIRTTAVGVNFIDIYFRKGVYAAPTMPFTPGMEAVGVVTAVGPGLTGRKVGDVVAYAGNPMGSYAQEQILPAAVAVPVPPSVDHKQAASVMLKGMTAHVLLRRVFKVESGHTILVHAAAGGVGSLLCQWANALGATVIGTVSNQEKAAQAAQDGCHHPIIYTSEDVVARVKDITSGKGVNVVYDSVGKDTYKASLECLASRGFLVSFGQSSGKPDPIPTSDLASKSLFLTRPSLMHYTATRDELLESAGEVFANVAKALFG

SEQ ID NO: 5854 - protein, 294 aa, Zea mays subsp. mays
  peptide (1)..(294): Ceres Seq. ID no. 12379428
  misc_feature (5)..(292): Homolog of NCBI NO: 7430955 NR Description: quinone oxidoreductase homolog - cowpea
  misc_feature (5)..(292): Homolog of NCBI NO: 15240274 NR Description: quinone oxidoreductase - like protein; protein At5g61510.1, supported by cDNA: 37197. [Arabidopsis thaliana]
  misc_feature (2)..(289): Homolog of NCBI NO: 13570000 NR Description: putative quinone oxidoreductase [Oryza sativa]
  misc_feature (2)..(139): Homolog of NCBI NO: 37536850 NR Description: putative quinone oxidoreductase [Oryza sativa
  misc_feature (161)..(289): Homolog of NCBI NO: 37536850 NR Description: putative quinone oxidoreductase [Oryza sativa
  misc_feature (2)..(292): Homolog of NCBI NO: 23014744 NR Description: hypothetical protein [Magnetospirillum
  misc_feature (5)..(292): Homolog of NCBI NO: 531096 NR Description: TED2 [Zinnia elegans]
  misc_feature (5)..(285): Homolog of NCBI NO: 22982287 NR Description: hypothetical protein [Burkholderia fungorum]
  misc_feature (6)..(291): Homolog of NCBI NO: 27381248 NR Description: quinone oxidoreductase [Bradyrhizobium japonicum]
  misc_feature (6)..(285): Homolog of NCBI NO: 23500315 NR Description: quinone oxidoreductase [Brucella suis 1330]
MVKSKAIRVHELGGPEVLRWEEVEVGEPGEGEIRIRTTAVGVNFIDIYFRKGVYAAPTMPFTPGMEAVGVVTAVGPGLTGRKVGDVVAYAGNPMGSYAQEQILPAAVAVPVPPSVDHKQAASVMLKGMTAHVLLRRVFKVESGHTILVHAAAGGVGSLLCQWANALGATVIGTVSNQEKAAQAAQDGCHHPIIYTSEDVVARVKDITSGKGVNVVYDSVGKDTYKASLECLASRGFLVSFGQSSGKPDPIPTSDLASKSLFLTRPSLMHYTATRDELLESAGEVFANVAKALFG

SEQ ID NO: 5855 - protein, 236 aa, Zea mays subsp. mays
  peptide (1)..(236): Ceres Seq. ID no. 12379429
  misc_feature (1)..(234): Homolog of NCBI NO: 7430955 NR Description: quinone oxidoreductase homolog - cowpea
  misc_feature (1)..(234): Homolog of NCBI NO: 15240274 NR Description: quinone oxidoreductase - like protein; protein At5g61510.1, supported by cDNA: 37197. [Arabidopsis thaliana]
  misc_feature (1)..(231): Homolog of NCBI NO: 13570000 NR Description: putative quinone oxidoreductase [Oryza sativa]
  misc_feature (1)..(81): Homolog of NCBI NO: 37536850 NR Description: putative quinone oxidoreductase [Oryza sativa
  misc_feature (103)..(231): Homolog of NCBI NO: 37536850 NR Description: putative quinone oxidoreductase [Oryza sativa
  misc_feature (1)..(234): Homolog of NCBI NO: 23014744 NR Description: hypothetical protein [Magnetospirillum
  misc_feature (1)..(234): Homolog of NCBI NO: 531096 NR Description: TED2 [Zinnia elegans]
  misc_feature (1)..(227): Homolog of NCBI NO: 22982287 NR Description: hypothetical protein [Burkholderia fungorum]
  misc_feature (1)..(233): Homolog of NCBI NO: 27381248 NR Description: quinone oxidoreductase [Bradyrhizobium japonicum]
  misc_feature (1)..(227): Homolog of NCBI NO: 23500315 NR Description: quinone oxidoreductase [Brucella suis 1330]
MPFTPGMEAVGVVTAVGPGLTGRKVGDVVAYAGNPMGSYAQEQILPAAVAVPVPPSVDHKQAASVMLKGMTAHVLLRRVFKVESGHTILVHAAAGGVGSLLCQWANALGATVIGTVSNQEKAAQAAQDGCHHPIIYTSEDVVARVKDITSGKGVNVVYDSVGKDTYKASLECLASRGFLVSFGQSSGKPDPIPTSDLASKSLFLTRPSLMHYTATRDELLESAGEVFANVAKALFG

SEQ ID NO: 5856 - DNA, 1318 bp, Zea mays subsp. mays
  misc_feature (1)..(1318): Ceres Seq. ID no. 13498544
  misc_feature: MA Experiment ID: 108527 Result: Up-regulated in Transcription
  misc_feature: MA Experiment 108527 PARAMETER Experiment Name: Zm_5mM_NO_P Parameter: Age (day) Value: 8
  misc_feature: MA Experiment 108527 PARAMETER Experiment Name: Zm_5mM_NO_P Parameter: Organism Value: Zea mays
  misc_feature: MA Experiment 108527 PARAMETER Experiment Name: Zm_5mM_NO_P Parameter: Plant Line Value: 35A19
  misc_feature: MA Experiment 108527 PARAMETER Experiment Name: Zm_5mM_NO_P Parameter: Timepoint (hr) Value: 6
  misc_feature: MA Experiment 108527 PARAMETER Experiment Name: Zm_5mM_NO_P Parameter: Tissue Value: Aerial
  misc_feature: MA Experiment 108527 PARAMETER Experiment Name: Zm_5mM_NO_P Parameter: Treatment Value: 5mM NO vs. No Treatment
  misc_feature: MA Experiment ID: 108535 Result: Down-regulated in Transcription
  misc_feature: MA Experiment 108535 PARAMETER Experiment Name: Zm_Meristem_P Parameter: Age (day) Value: 8
  misc_feature: MA Experiment 108535 PARAMETER Experiment Name: Zm_Meristem_P Parameter: Organism Value: Zea mays
  misc_feature: MA Experiment 108535 PARAMETER Experiment Name: Zm_Meristem_P Parameter: Plant Line Value: 35A19
  misc_feature: MA Experiment 108535 PARAMETER Experiment Name: Zm_Meristem_P Parameter: Tissue Value: Root Meristem vs. Above Root Meristem
  misc_feature: MA Experiment ID: 108559 Result: Up-regulated in Transcription
  misc_feature: MA Experiment 108559 PARAMETER Experiment Name: Zm_5mM_NO_P Parameter: Age (day) Value: 8
  misc_feature: MA Experiment 108559 PARAMETER Experiment Name: Zm_5mM_NO_P Parameter: Organism Value: Zea mays
  misc_feature: MA Experiment 108559 PARAMETER Experiment Name: Zm_5mM_NO_P Parameter: Plant Line Value: 35A19
  misc_feature: MA Experiment 108559 PARAMETER Experiment Name: Zm_5mM_NO_P Parameter: Timepoint (hr) Value: 12
  misc_feature: MA Experiment 108559 PARAMETER Experiment Name: Zm_5mM_NO_P Parameter: Tissue Value: Aerial
  misc_feature: MA Experiment 108559 PARAMETER Experiment Name: Zm_5mM_NO_P Parameter: Treatment Value: 5mM NO vs. No Treatment
  misc_feature: MA Experiment ID: 20000479 Result: Up-regulated in Transcription
  misc_feature: MA Experiment 20000479 PARAMETER Experiment Name: Zm_Drought_P Parameter: Age (day) Value: 10
  misc_feature: MA Experiment 20000479 PARAMETER Experiment Name: Zm_Drought_P Parameter: Organism Value: Zea mays
  misc_feature: MA Experiment 20000479 PARAMETER Experiment Name: Zm_Drought_P Parameter: Plant Line Value: 35A19
  misc_feature: MA Experiment 20000479 PARAMETER Experiment Name: Zm_Drought_P Parameter: Timepoint (hr) Value: 48
  misc_feature: MA Experiment 20000479 PARAMETER Experiment Name: Zm_Drought_P Parameter: Tissue Value: Aerial
  misc_feature: MA Experiment 20000479 PARAMETER Experiment Name: Zm_Drought_P Parameter: Treatment Value: Drought vs. No Drought
  misc_feature: MA Experiment ID: 20000535 Result: Down-regulated in Transcription
  misc_feature: MA Experiment 20000535 PARAMETER Experiment Name: Zm_Hybrid_Seed_Dev_P Parameter: DAP Value: 30 vs. 12
  misc_feature: MA Experiment 20000535 PARAMETER Experiment Name: Zm_Hybrid_Seed_Dev_P Parameter: Organism Value: Zea mays
  misc_feature: MA Experiment 20000535 PARAMETER Experiment Name: Zm_Hybrid_Seed_Dev_P Parameter: Plant Line Value: 35A19
  misc_feature: MA Experiment 20000535 PARAMETER Experiment Name: Zm_Hybrid_Seed_Dev_P Parameter: Tissue Value: Embryo vs. Unfert Floret
gcacttggttggagctcctctaccttttccatcgctctgctctgctccgcgtctccgtccgccccggcaaaagcaaaacacagccatggaggggtacgaccgcgagttctggcagttcagcgaccagctgcgcctgcagacgaccgccttctccggcctctccctcggcgactccatctggtctccggccaccggcgccggcgggcggcgcaacaacaacaccgacctactcgcggcctccgcgtcggcagccgacgccggcaagcacaacggcgtgggcctcagcctgaatgatggagggcccggactcattggctccgggaagctcgccttcggcggcagcaaggccggccgctacaacaacctcccatccgagaaggccgcgcccgtctacaaccacagcggcgccacgatcaacggcggctacgccaggagcgacaacgccggcctggcggcgttcaacaagatggggagctacttccacaacagtaacggcaacggcggcggcggcggggaggtgaagagctacttcaacaagtccgccggacgggcggcgagcaacaacagccacgggcacgccggcggcggcaagaagggcggcggcggcgggaagcacggcaagaacgagggcaacggcggcgcggtggcggccacggacaagcggttcaagacgctgccggcgtcggaggcgctgccgcggggcgaggccatcggcggctacatcttcgtctgcaacaacgacaccatggacgagaacctcaggagggagctgttcgggctgccgtcgaggtacagggactcggtgcgggccatccgcccggggctgcccctcttcctctacaactactccacccaccagctgccggcatcttcaaggccgccagcttcggcgggaccaacatcgacccgacggcgtgggaggacaagaagtgccccggcgagtcgcgcttccctgcacaggtgcgagtggcaacgcggaagatctacgatccactggaggaggacgccttccgccccatccttcaccactacgacgggcccaagtttcggctcgagctctccgtcgccgagaccctcgccctcctcgacatcttcgctgacaaggatgacgcctgagccttccttgccgccccctcgcccgccagtgccaatccattaatgcacagacaataaaatggctggagggacagaccaaactatccacctttgtttgatatgataaagggctatgtatgaggcacgcgtcccattatttttgtttttattataagactagacctcgttccgtaagatacatgtatcaatattatataaaaac

SEQ ID NO: 5857 - protein, 385 aa, Zea mays subsp. mays
  peptide (1)..(385): Ceres Seq. ID no. 13498545
  misc_feature (285)..(381): Pfam Name: Extensin-like region Pfam Description: Extensin-like region
  misc_feature (29)..(287): Homolog of NCBI NO: 34913876 NR Description: B1156H12.22 [Oryza sativa (japonica
  misc_feature (34)..(287): Homolog of NCBI NO: 18422167 NR Description: expressed protein [Arabidopsis thaliana] unknown protein [Arabidopsis thaliana] unknown protein [Arabidopsis thaliana]
  misc_feature (178)..(287): Homolog of NCBI NO: 9757950 NR Description: gene_id:MJC20.15~similar to unknown
  misc_feature (162)..(287): Homolog of NCBI NO: 21665866 NR Description: GDA2 protein [Pisum sativum]
  misc_feature (179)..(287): Homolog of NCBI NO: 15232081 NR Description: gda-1 -related [Arabidopsis thaliana] contains similarity to unknown [Arabidopsis thaliana] >gi|16604450|gb|AAL24231.1|
  misc_feature (179)..(287): Homolog of NCBI NO: 21592623 NR Description: gda-1, putative [Arabidopsis thaliana]
  misc_feature (173)..(287): Homolog of NCBI NO: 2369766 NR Description: hypothetical protein [Citrus x paradisi]
  misc_feature (162)..(322): Homolog of NCBI NO: 584825 NR Description: B2 PROTEIN >gi|322726|pir||S32124 B2 protein -
  misc_feature (249)..(287): Homolog of NCBI NO: 7488804 NR Description: gda-1 protein - garden pea
  misc_feature (283)..(381): Homolog of NCBI NO: 188864 NR Description: mucin
HLVGAPLPFPSLCSAPRLRPPRQKQNTAMEGYDREFWQFSDQLRLQTTAFSGLSLGDSIWSPATGAGGRRNNNTDLLAASASAADAGKHNGVGLSLNDGGPGLIGSGKLAFGGSKAGRYNNLPSEKAAPVYNHSGATINGGYARSDNAGLAAFNKMGSYFHNSNGNGGGGGEVKSYFNKSAGRAASNNSHGHAGGGKKGGGGGKHGKNEGNGGAVAATDKRFKTLPASEALPRGEAIGGYIFVCNNDTMDENLRRELFGLPSRYRDSVRAIRPGLPLFLYNYSTHQLPASSRPPASAGPTSTRRRGRTRSAPASRASLHRCEWQRGRSTIHWRRTPSAPSFTTTTGPSFGSSSPSPRPSPSSTSSLTRMTPEPSLPPPRPPVPIH

SEQ ID NO: 5858 - protein, 357 aa, Zea mays subsp. mays
  peptide (1)..(357): Ceres Seq. ID no. 13498546
  misc_feature (257)..(353): Pfam Name: Extensin-like region Pfam Description: Extensin-like region
  misc_feature (1)..(259): Homolog of NCBI NO: 34913876 NR Description: B1156H12.22 [Oryza sativa (japonica
  misc_feature (6)..(259): Homolog of NCBI NO: 18422167 NR Description: expressed protein [Arabidopsis thaliana] unknown protein [Arabidopsis thaliana] unknown protein [Arabidopsis thaliana]
  misc_feature (150)..(259): Homolog of NCBI NO: 9757950 NR Description: gene_id:MJC20.15~similar to unknown
  misc_feature (134)..(259): Homolog of NCBI NO: 21665866 NR Description: GDA2 protein [Pisum sativum]
  misc_feature (151)..(259): Homolog of NCBI NO: 15232081 NR Description: gda-1 -related [Arabidopsis thaliana] contains similarity to unknown [Arabidopsis thaliana] >gi|16604450|gb|AAL24231.1|
  misc_feature (151)..(259): Homolog of NCBI NO: 21592623 NR Description: gda-1, putative [Arabidopsis thaliana]
  misc_feature (145)..(259): Homolog of NCBI NO: 2369766 NR Description: hypothetical protein [Citrus x paradisi]
  misc_feature (134)..(294): Homolog of NCBI NO: 584825 NR Description: B2 PROTEIN >gi|322726|pir||S32124 B2 protein -
  misc_feature (221)..(259): Homolog of NCBI NO: 7488804 NR Description: gda-1 protein - garden pea
  misc_feature (255)..(353): Homolog of NCBI NO: 188864 NR Description: mucin
MEGYDREFWQFSDQLRLQTTAFSGLSLGDSIWSPATGAGGRRNNNTDLLAASASAADAGKHNGVGLSLNDGGPGLIGSGKLAFGGSKAGRYNNLPSEKAAPVYNHSGATINGGYARSDNAGLAAFNKMGSYFHNSNGNGGGGGEVKSYFNKSAGRAASNNSHGHAGGGKKGGGGGKHGKNEGNGGAVAATDKRFKTLPASEALPRGEAIGGYIFVCNNDTMDENLRRELFGLPSRYRDSVRAIRPGLPLFLYNYSTHQLPASSRPPASAGPTSTRRRGRTRSAPASRASLHRCEWQRGRSTIHWRRTPSAPSFTTTTGPSFGSSSPSPRPSPSSTSSLTRMTPEPSLPPPRPPVPIH

SEQ ID NO: 5859 - protein, 230 aa, Zea mays subsp. mays
  peptide (1)..(230): Ceres Seq. ID no. 13498547
  misc_feature (130)..(226): Pfam Name: Extensin-like region Pfam Description: Extensin-like region
  misc_feature (1)..(132): Homolog of NCBI NO: 34913876 NR Description: B1156H12.22 [Oryza sativa (japonica
  misc_feature (1)..(132): Homolog of NCBI NO: 18422167 NR Description: expressed protein [Arabidopsis thaliana] unknown protein [Arabidopsis thaliana] unknown protein [Arabidopsis thaliana]
  misc_feature (23)..(132): Homolog of NCBI NO: 9757950 NR Description: gene_id:MJC20.15~similar to unknown
  misc_feature (7)..(132): Homolog of NCBI NO: 21665866 NR Description: GDA2 protein [Pisum sativum]
  misc_feature (24)..(132): Homolog of NCBI NO: 15232081 NR Description: gda-1 -related [Arabidopsis thaliana] contains similarity to unknown [Arabidopsis thaliana] >gi|16604450|gb|AAL24231.1|
  misc_feature (24)..(132): Homolog of NCBI NO: 21592623 NR Description: gda-1, putative [Arabidopsis thaliana]
  misc_feature (18)..(132): Homolog of NCBI NO: 2369766 NR Description: hypothetical protein [Citrus x paradisi]
  misc_feature (7)..(167): Homolog of NCBI NO: 584825 NR Description: B2 PROTEIN >gi|322726|pir||S32124 B2 protein -
  misc_feature (94)..(132): Homolog of NCBI NO: 7488804 NR Description: gda-1 protein - garden pea
  misc_feature (128)..(226): Homolog of NCBI NO: 188864 NR Description: mucin
MGSYFHNSNGNGGGGGEVKSYFNKSAGRAASNNSHGHAGGGKKGGGGGKHGKNEGNGGAVAATDKRFKTLPASEALPRGEAIGGYIFVCNNDTMDENLRRELFGLPSRYRDSVRAIRPGLPLFLYNYSTHQLPASSRPPASAGPTSTRRRGRTRSAPASRASLHRCEWQRGRSTIHWRRTPSAPSFTTTTGPSFGSSSPSPRPSPSSTSSLTRMTPEPSLPPPRPPVPIH

SEQ ID NO: 5860 - DNA, 1309 bp, Zea mays subsp. mays
  misc_feature (1)..(1309): Ceres Seq. ID no. 12369060
  misc_feature: MA Experiment ID: 108522 Result: Up-regulated in Transcription
  misc_feature: MA Experiment 108522 PARAMETER Experiment Name: Zm_42deg_Heat_P Parameter: Age (day) Value: 8
  misc_feature: MA Experiment 108522 PARAMETER Experiment Name: Zm_42deg_Heat_P Parameter: Organism Value: Zea mays
  misc_feature: MA Experiment 108522 PARAMETER Experiment Name: Zm_42deg_Heat_P Parameter: Plant Line Value: 35A19
  misc_feature: MA Experiment 108522 PARAMETER Experiment Name: Zm_42deg_Heat_P Parameter: Temperature (deg C) Value: 42 vs. 22
  misc_feature: MA Experiment 108522 PARAMETER Experiment Name: Zm_42deg_Heat_P Parameter: Timepoint (hr) Value: 1
  misc_feature: MA Experiment 108522 PARAMETER Experiment Name: Zm_42deg_Heat_P Parameter: Tissue Value: Aerial
  misc_feature: MA Experiment ID: 108556 Result: Up-regulated in Transcription
  misc_feature: MA Experiment 108556 PARAMETER Experiment Name: Zm_Drought_P Parameter: Age (day) Value: 9
  misc_feature: MA Experiment 108556 PARAMETER Experiment Name: Zm_Drought_P Parameter: Organism Value: Zea mays
  misc_feature: MA Experiment 108556 PARAMETER Experiment Name: Zm_Drought_P Parameter: Plant Line Value: 35A19
  misc_feature: MA Experiment 108556 PARAMETER Experiment Name: Zm_Drought_P Parameter: Timepoint (hr) Value: 24
  misc_feature: MA Experiment 108556 PARAMETER Experiment Name: Zm_Drought_P Parameter: Tissue Value: Aerial
  misc_feature: MA Experiment 108556 PARAMETER Experiment Name: Zm_Drought_P Parameter: Treatment Value: Drought vs. No Drought
aaactgctggaatatacttacaccgggaagaaggcgaaggccgtcgcgctctcggcggcggcggcggcggcggcagcggcgatgcttgcgttcgagcagcaggtgttggcggatctggtggaagatccgaacggaggtctggtggtgctctcctcgggtctccgctctcgcttccctagccgctaccctcctcctccatctccaccagacccccggcaacgcggctggaggaggatgtctcctcgtcctctccgccaccgataccctcaaggcccggatccggcgccgcctccaagacaagctgcaggttcacgacgtgccccctgacctcgccgcgcagcagcgcgccaccctttacgcctctggcgctgctctcttcctctctccccgcgccctcgccgccgacctcctcacctcccgcctcctcccctcccgcgtccaagccctactcctcctctccgcccaccgctccaccgatacctcctccgatgccttcatctgccgcctcctccgtcaacgcaatcttctccccgtttacgccttctccgattgcccccatgccatggtcgccggtttctccaaggccgagcgtaccatgaagagcctctacgtccgccgtctccacctctggccccgcttccacgttctcgccgcagccgacctggaacgcgccccgcctgacgtcgtagacgtgcgcgttcccatgacgccgcccatgaggggtatccaggctgctgtcctcgctaccatggacgcttgtctcaaggaacttaggcgcaccaacaaggtggatgttgaggacctcaccgtcgacaagggcctcttcaagtccttcgatgagatcgtccggaggcagctcgaccccatctggcacactcttgggaagaagacaaagcagcttgtggctgacctcaggacgctacgcaagctgcttgattacctcgtcaggatgaacctgatgagaaaaaagcaacaagagttggcgtgccatccgaggatggtatcgtggaggatgatgtgaggtctgaaaattacaacacatcagccattgagttcttaagaaggcttcctggggtgacggattctaactaccgagcaatcatggatggatgcaatagcttggccgagctggccctgcttccagtggaaaggttggcggagctaatgggtggtcagaaagctgcgcggacgctcaaggagtttctcgatgccaagtgcccaaccatgttgtagccagagtgacgctgtactgtttgtattgtgtcctgtgggatacaaatacttcagttgatgtgccttatatatatat

SEQ ID NO: 5861 - protein, 339 aa, Zea mays subsp. mays
  peptide (1)..(339): Ceres Seq. ID no. 12369061
  misc_feature (55)..(316): Homolog of NCBI NO: 8926611 NR Description: 5' repair endonuclease [Arabidopsis thaliana]
  misc_feature (55)..(316): Homolog of NCBI NO: 15237571 NR Description: repair endonuclease (gb|AAF01274.1); protein id: supported by cDNA: gi_11995298, supported by cDNA: gi_6013182 thaliana] >gi|6013183|gb|AAF01274.1|AF160500_1 repair repair
  misc_feature (55)..(316): Homolog of NCBI NO: 6503090 NR Description: nucleotide excision repair protein XP-F homolog
  misc_feature (106)..(314): Homolog of NCBI NO: 20073215 NR Description: excision repair cross-complementing rodent repair
  misc_feature (106)..(314): Homolog of NCBI NO: 2896801 NR Description: ERCC4_MOUSE [Mus musculus]
  misc_feature (106)..(314): Homolog of NCBI NO: 7657064 NR Description: excision repair cross-complementing rodent repair complementation group 4 [Mus musculus]
  misc_feature (106)..(314): Homolog of NCBI NO: 1524411 NR Description: DNA repair endonuclease subunit
  misc_feature (106)..(314): Homolog of NCBI NO: 2842712 NR Description: DNA-REPAIR PROTEIN COMPLEMENTING XP-F CELL
  misc_feature (106)..(314): Homolog of NCBI NO: 4885217 NR Description: excision repair cross-complementing rodent repair
  misc_feature (63)..(316): Homolog of NCBI NO: 32766570 NR Description: Unknown (protein for MGC:63468) [Danio rerio]
NCWNILTPGRRRRPSRSRRRRRRRQRRCLRSSSRCWRIWWKIRTEVWWCSPRVSALASLAATLLLHLHQTPGNAAGGGCLLVLSATDTLKARIRRRLQDKLQVHDVPPDLAAQQRATLYASGAALFLSPRALAADLLTSRLLPSRVQALLLLSAHRSTDTSSDAFICRLLRQRNLLPVYAFSDCPHAMVAGFSKAERTMKSLYVRRLHLWPRFHVLAAADLERAPPDVVDVRVPMTPPMRGIQAAVLATMDACLKELRRTNKVDVEDLTVDKGLFKSFDEIVRRQLDPIWHTLGKKTKQLVADLRTLRKLLDYLVRMNLMRKKQQELACHPRMVSWRMM

SEQ ID NO: 5862 - DNA, 1174 bp, Zea mays subsp. mays
  misc_feature (1)..(1174): Ceres Seq. ID no. 12381799
  misc_feature: MA Experiment ID: 108522 Result: Up-regulated in Transcription
  misc_feature: MA Experiment 108522 PARAMETER Experiment Name: Zm_42deg_Heat_P Parameter: Age (day) Value: 8
  misc_feature: MA Experiment 108522 PARAMETER Experiment Name: Zm_42deg_Heat_P Parameter: Organism Value: Zea mays
  misc_feature: MA Experiment 108522 PARAMETER Experiment Name: Zm_42deg_Heat_P Parameter: Plant Line Value: 35A19
  misc_feature: MA Experiment 108522 PARAMETER Experiment Name: Zm_42deg_Heat_P Parameter: Temperature (deg C) Value: 42 vs. 22
  misc_feature: MA Experiment 108522 PARAMETER Experiment Name: Zm_42deg_Heat_P Parameter: Timepoint (hr) Value: 1
  misc_feature: MA Experiment 108522 PARAMETER Experiment Name: Zm_42deg_Heat_P Parameter: Tissue Value: Aerial
  misc_feature: MA Experiment ID: 108527 Result: Down-regulated in Transcription
  misc_feature: MA Experiment 108527 PARAMETER Experiment Name: Zm_5mM_NO_P Parameter: Age (day) Value: 8
  misc_feature: MA Experiment 108527 PARAMETER Experiment Name: Zm_5mM_NO_P Parameter: Organism Value: Zea mays
  misc_feature: MA Experiment 108527 PARAMETER Experiment Name: Zm_5mM_NO_P Parameter: Plant Line Value: 35A19
  misc_feature: MA Experiment 108527 PARAMETER Experiment Name: Zm_5mM_NO_P Parameter: Timepoint (hr) Value: 6
  misc_feature: MA Experiment 108527 PARAMETER Experiment Name: Zm_5mM_NO_P Parameter: Tissue Value: Aerial
  misc_feature: MA Experiment 108527 PARAMETER Experiment Name: Zm_5mM_NO_P Parameter: Treatment Value: 5mM NO vs. No Treatment
  misc_feature: MA Experiment ID: 108528 Result: Up-regulated in Transcription
  misc_feature: MA Experiment 108528 PARAMETER Experiment Name: Zm_Imbibed_Seeds_P Parameter: Age (day) Value: 5 vs. 2
  misc_feature: MA Experiment 108528 PARAMETER Experiment Name: Zm_Imbibed_Seeds_P Parameter: Organism Value: Zea mays
  misc_feature: MA Experiment 108528 PARAMETER Experiment Name: Zm_Imbibed_Seeds_P Parameter: Plant Line Value: 35A19
  misc_feature: MA Experiment 108528 PARAMETER Experiment Name: Zm_Imbibed_Seeds_P Parameter: Tissue Value: Aerial vs. Embryo
  misc_feature: MA Experiment ID: 108530 Result: Up-regulated in Transcription
  misc_feature: MA Experiment 108530 PARAMETER Experiment Name: Zm_Imbibed_Seeds_P Parameter: Age (day) Value: 6 vs. 2
  misc_feature: MA Experiment 108530 PARAMETER Experiment Name: Zm_Imbibed_Seeds_P Parameter: Organism Value: Zea mays
  misc_feature: MA Experiment 108530 PARAMETER Experiment Name: Zm_Imbibed_Seeds_P Parameter: Plant Line Value: 35A19
  misc_feature: MA Experiment 108530 PARAMETER Experiment Name: Zm_Imbibed_Seeds_P Parameter: Tissue Value: Aerial vs. Embryo
  misc_feature: MA Experiment ID: 108545 Result: Up-regulated in Transcription
  misc_feature: MA Experiment 108545 PARAMETER Experiment Name: Zm_Imbibed_Seeds_P Parameter: Age (day) Value: 3 vs. 2
  misc_feature: MA Experiment 108545 PARAMETER Experiment Name: Zm_Imbibed_Seeds_P Parameter: Organism Value: Zea mays
  misc_feature: MA Experiment 108545 PARAMETER Experiment Name: Zm_Imbibed_Seeds_P Parameter: Plant Line Value: 35A19
  misc_feature: MA Experiment 108545 PARAMETER Experiment Name: Zm_Imbibed_Seeds_P Parameter: Tissue Value: Aerial vs. Embryo
  misc_feature: MA Experiment ID: 108547 Result: Up-regulated in Transcription
  misc_feature: MA Experiment 108547 PARAMETER Experiment Name: Zm_Imbibed_Seeds_P Parameter: Age (day) Value: 4 vs. 2
  misc_feature: MA Experiment 108547 PARAMETER Experiment Name: Zm_Imbibed_Seeds_P Parameter: Organism Value: Zea mays
  misc_feature: MA Experiment 108547 PARAMETER Experiment Name: Zm_Imbibed_Seeds_P Parameter: Plant Line Value: 35A19
  misc_feature: MA Experiment 108547 PARAMETER Experiment Name: Zm_Imbibed_Seeds_P Parameter: Tissue Value: Aerial vs. Embryo
  misc_feature: MA Experiment ID: 108556 Result: Down-regulated in Transcription
  misc_feature: MA Experiment 108556 PARAMETER Experiment Name: Zm_Drought_P Parameter: Age (day) Value: 9
  misc_feature: MA Experiment 108556 PARAMETER Experiment Name: Zm_Drought_P Parameter: Organism Value: Zea mays
  misc_feature: MA Experiment 108556 PARAMETER Experiment Name: Zm_Drought_P Parameter: Plant Line Value: 35A19
  misc_feature: MA Experiment 108556 PARAMETER Experiment Name: Zm_Drought_P Parameter: Timepoint (hr) Value: 24
  misc_feature: MA Experiment 108556 PARAMETER Experiment Name: Zm_Drought_P Parameter: Tissue Value: Aerial
  misc_feature: MA Experiment 108556 PARAMETER Experiment Name: Zm_Drought_P Parameter: Treatment Value: Drought vs. No Drought
  misc_feature: MA Experiment ID: 20000480 Result: Down-regulated in Transcription
  misc_feature: MA Experiment 20000480 PARAMETER Experiment Name: Zm_Drought_P Parameter: Age (day) Value: 11
  misc_feature: MA Experiment 20000480 PARAMETER Experiment Name: Zm_Drought_P Parameter: Organism Value: Zea mays
  misc_feature: MA Experiment 20000480 PARAMETER Experiment Name: Zm_Drought_P Parameter: Plant Line Value: 35A19
  misc_feature: MA Experiment 20000480 PARAMETER Experiment Name: Zm_Drought_P Parameter: Timepoint (hr) Value: 72
  misc_feature: MA Experiment 20000480 PARAMETER Experiment Name: Zm_Drought_P Parameter: Tissue Value: Aerial
  misc_feature: MA Experiment 20000480 PARAMETER Experiment Name: Zm_Drought_P Parameter: Treatment Value: Drought vs. No Drought
acgcggtcgttctcacgttggcggctggccaccattccctgtctcgtgctcacggcgggcggcagaccgccaggcgccaccgcgccagaccagctgaccagcaggcggcagtgcaggccatcagccgtcacggctctccctcaggtcggcagtgcaggccatcagccgccaaccgatctagtagtgcagaccgccagaggccaggtgaccaggtcggcagtgcagccgtgcaggcggccagccctctccaggcgtccagctaccaccacacacacgaagagcaggcgatgaaaatgtccgcttccgttgcggccgcctcccccaccctccgcttctcctccgccactcatcctctccaccgaccgctccgccggcggctcccgtcggttcgatgctccctcgccgccgccgccggccccggtgtccgggcgccccctgagctcgtcgactccatcctctccaaggtgaagggaactgaccgaggagtgctgctgccaaaagatgggcaccaggaagtggctgaggtcgcgctgcagctggggaagtactgcatagacgaccccgtcaagtccccgcttatattcggagaatgggaggttgtgtactgctcggtgccaacctcgccgggagggctctaccggacgccccttggccgcctggtattcaaaaccgacgagatggtccaggcggtggaagcgcctgacgtggtcaggaacaaggtgtcgttctccgtctttggcctagagggcgcagtgtcattgaaaggtaagctgaatgtgctggacagtaaatggattcaggtcgtgttcgaagcaccagaactgaaggtcggctccttggggtttcagtacggtggcgagagcgaagtcaagctggagatcacctatgtcgatgagaagatcaggctagggagagggtccagaggctcgcttttcgtcttccttagacgatgatagaatggcatgcatgtgtgttgagacttcagacccacaagcaccgatgaggggtggcgctgacgcggtcgtttgtacaatactgtgttcaggacttctatacgtttatgtaaaaattctggcgtccagctgggtaattctggcgtttcagtacggtggcctgatgaatgttgttgtgtagtttgtagcatccattattagtgctgtaagatgatgttttg

SEQ ID NO: 5863 - protein, 316 aa, Zea mays subsp. mays
  peptide (1)..(316): Ceres Seq. ID no. 12381800
  misc_feature (146)..(313): Pfam Name: PAP_fibrillin Pfam Description: PAP_fibrillin
  misc_feature (103)..(316): Homolog of NCBI NO: 38346556 NR Description: OSJNBa0035M09.17 [Oryza sativa (japonica
  misc_feature (119)..(316): Homolog of NCBI NO: 15241221 NR Description: putative protein; protein id: At5g19940.1, by cDNA: 32193., supported by cDNA: gi_15529231, supported by gi_16974384 [Arabidopsis thaliana] >gi|15529232|gb|AAK97710.1|
AVVLTLAAGHHSLSRAHGGRQTARRHRARPADQQAAVQAISRHGSPSGRQCRPSAANRSSSADRQRPGDQVGSAAVQAASPLQASSYHHTHEEQAMKMSASVAAASPTLRFSSATHPLHRPLRRRLPSVRCSLAAAAGPGVRAPPELVDSILSKVKGTDRGVLLPKDGHQEVAEVALQLGKYCIDDPVKSPLIFGEWEVVYCSVPTSPGGLYRTPLGRLVFKTDEMVQAVEAPDVVRNKVSFSVFGLEGAVSLKGKLNVLDSKWIQVVFEAPELKVGSLGFQYGGESEVKLEITYVDEKIRLGRGSRGSLFVFLRR

SEQ ID NO: 5864 - protein, 221 aa, Zea mays subsp. mays
  peptide (1)..(221): Ceres Seq. ID no. 12381801
  misc_feature (51)..(218): Pfam Name: PAP_fibrillin Pfam Description: PAP_fibrillin
  misc_feature (8)..(221): Homolog of NCBI NO: 38346556 NR Description: OSJNBa0035M09.17 [Oryza sativa (japonica
  misc_feature (24)..(221): Homolog of NCBI NO: 15241221 NR Description: putative protein; protein id: At5g19940.1, by cDNA: 32193., supported by cDNA: gi_15529231, supported by gi_16974384 [Arabidopsis thaliana] >gi|15529232|gb|AAK97710.1|
MKMSASVAAASPTLRFSSATHPLHRPLRRRLPSVRCSLAAAAGPGVRAPPELVDSILSKVKGTDRGVLLPKDGHQEVAEVALQLGKYCIDDPVKSPLIFGEWEVVYCSVPTSPGGLYRTPLGRLVFKTDEMVQAVEAPDVVRNKVSFSVFGLEGAVSLKGKLNVLDSKWIQVVFEAPELKVGSLGFQYGGESEVKLEITYVDEKIRLGRGSRGSLFVFLRR

SEQ ID NO: 5865 - protein, 219 aa, Zea mays subsp. mays
  peptide (1)..(219): Ceres Seq. ID no. 12381802
  misc_feature (49)..(216): Pfam Name: PAP_fibrillin Pfam Description: PAP_fibrillin
  misc_feature (6)..(219): Homolog of NCBI NO: 38346556 NR Description: OSJNBa0035M09.17 [Oryza sativa (japonica
  misc_feature (22)..(219): Homolog of NCBI NO: 15241221 NR Description: putative protein; protein id: At5g19940.1, by cDNA: 32193., supported by cDNA: gi_15529231, supported by gi_16974384 [Arabidopsis thaliana] >gi|15529232|gb|AAK97710.1|
MSASVAAASPTLRFSSATHPLHRPLRRRLPSVRCSLAAAAGPGVRAPPELVDSILSKVKGTDRGVLLPKDGHQEVAEVALQLGKYCIDDPVKSPLIFGEWEVVYCSVPTSPGGLYRTPLGRLVFKTDEMVQAVEAPDVVRNKVSFSVFGLEGAVSLKGKLNVLDSKWIQVVFEAPELKVGSLGFQYGGESEVKLEITYVDEKIRLGRGSRGSLFVFLRR

SEQ ID NO: 5866 - DNA, 1282 bp, Zea mays subsp. mays
  misc_feature (1)..(1282): Ceres Seq. ID no. 12409311
  misc_feature: MA Experiment ID: 108535 Result: Up-regulated in Transcription
  misc_feature: MA Experiment 108535 PARAMETER Experiment Name: Zm_Meristem_P Parameter: Age (day) Value: 8
  misc_feature: MA Experiment 108535 PARAMETER Experiment Name: Zm_Meristem_P Parameter: Organism Value: Zea mays
  misc_feature: MA Experiment 108535 PARAMETER Experiment Name: Zm_Meristem_P Parameter: Plant Line Value: 35A19
  misc_feature: MA Experiment 108535 PARAMETER Experiment Name: Zm_Meristem_P Parameter: Tissue Value: Root Meristem vs. Above Root Meristem
  misc_feature: MA Experiment ID: 108543 Result: Up-regulated in Transcription
  misc_feature: MA Experiment ID: 108556 Result: Down-regulated in Transcription
  misc_feature: MA Experiment 108556 PARAMETER Experiment Name: Zm_Drought_P Parameter: Age (day) Value: 9
  misc_feature: MA Experiment 108556 PARAMETER Experiment Name: Zm_Drought_P Parameter: Organism Value: Zea mays
  misc_feature: MA Experiment 108556 PARAMETER Experiment Name: Zm_Drought_P Parameter: Plant Line Value: 35A19
  misc_feature: MA Experiment 108556 PARAMETER Experiment Name: Zm_Drought_P Parameter: Timepoint (hr) Value: 24
  misc_feature: MA Experiment 108556 PARAMETER Experiment Name: Zm_Drought_P Parameter: Tissue Value: Aerial
  misc_feature: MA Experiment 108556 PARAMETER Experiment Name: Zm_Drought_P Parameter: Treatment Value: Drought vs. No Drought
  misc_feature: MA Experiment ID: 20000108 Result: Up-regulated in Transcription
  misc_feature: MA Experiment 20000108 PARAMETER Experiment Name: Zm_Root-Tips_P Parameter: Age (day) Value: 12
  misc_feature: MA Experiment 20000108 PARAMETER Experiment Name: Zm_Root-Tips_P Parameter: Organism Value: Zea mays
  misc_feature: MA Experiment 20000108 PARAMETER Experiment Name: Zm_Root-Tips_P Parameter: Tissue Value: Root tips vs. Root mid region    35
  misc_feature: MA Experiment 20000108 PARAMETER Experiment Name: Zm_Root-Tips_P Parameter: Tissue Value: Root tips vs. Root mid region   Sequence Listing-Misc Features (4)
  misc_feature: MA Experiment ID: 20000477 Result: Down-regulated in Transcription
  misc_feature: MA Experiment 20000477 PARAMETER Experiment Name: Zm_5mM_SA_P Parameter: Age (day) Value: 10
  misc_feature: MA Experiment 20000477 PARAMETER Experiment Name: Zm_5mM_SA_P Parameter: Organism Value: Zea mays
  misc_feature: MA Experiment 20000477 PARAMETER Experiment Name: Zm_5mM_SA_P Parameter: Plant Line Value: 35A19
  misc_feature: MA Experiment 20000477 PARAMETER Experiment Name: Zm_5mM_SA_P Parameter: Timepoint (hr) Value: 48
  misc_feature: MA Experiment 20000477 PARAMETER Experiment Name: Zm_5mM_SA_P Parameter: Tissue Value: Aerial
  misc_feature: MA Experiment 20000477 PARAMETER Experiment Name: Zm_5mM_SA_P Parameter: Treatment Value: 5mM SA vs. No Treatment
  misc_feature: MA Experiment ID: 20000479 Result: Down-regulated in Transcription
  misc_feature: MA Experiment 20000479 PARAMETER Experiment Name: Zm_Drought_P Parameter: Age (day) Value: 10
  misc_feature: MA Experiment 20000479 PARAMETER Experiment Name: Zm_Drought_P Parameter: Organism Value: Zea mays
  misc_feature: MA Experiment 20000479 PARAMETER Experiment Name: Zm_Drought_P Parameter: Plant Line Value: 35A19
  misc_feature: MA Experiment 20000479 PARAMETER Experiment Name: Zm_Drought_P Parameter: Timepoint (hr) Value: 48
  misc_feature: MA Experiment 20000479 PARAMETER Experiment Name: Zm_Drought_P Parameter: Tissue Value: Aerial
  misc_feature: MA Experiment 20000479 PARAMETER Experiment Name: Zm_Drought_P Parameter: Treatment Value: Drought vs. No Drought
  misc_feature: MA Experiment ID: 20000487 Result: Down-regulated in Transcription
  misc_feature: MA Experiment 20000487 PARAMETER Experiment Name: Zm_50mM_NH4NO3_L_to_H_P Parameter: Organism Value: Zea mays
  misc_feature: MA Experiment 20000487 PARAMETER Experiment Name: Zm_50mM_NH4NO3_L_to_H_P Parameter: Timepoint (hr) Value: 4
  misc_feature: MA Experiment 20000487 PARAMETER Experiment Name: Zm_50mM_NH4NO3_L_to_H_P Parameter: Tissue Value: Leaves
  misc_feature: MA Experiment 20000487 PARAMETER Experiment Name: Zm_50mM_NH4NO3_L_to_H_P Parameter: Treatment Value: 50mM NH4NO3 vs. 100mM Mannitol
  misc_feature: MA Experiment ID: 20000632 Result: Down-regulated in Transcription
  misc_feature: MA Experiment 20000632 PARAMETER Experiment Name: Zm_Herbicide-Treatments_P Parameter: Timepoint (hr) Value: 4
  misc_feature: MA Experiment 20000632 PARAMETER Experiment Name: Zm_Herbicide-Treatments_P Parameter: Tissue Value: Aerial
  misc_feature: MA Experiment 20000632 PARAMETER Experiment Name: Zm_Herbicide-Treatments_P Parameter: Treatment Value: Glean vs. No Treatment
aaactctgctgcatcttcttccactctccagtctccactagcatcagtcgccgctgcctatcctcgagcaccatttccatcaacagcatccgcctctggcaagctagcgacanaactcatggcactccgcgcgctcgacaacacgatgcccgccgccgtcgaggagcggcccaagaaggtggctaaggtgggcgtccccgccgccgccgccaaggccgcngcctcccccgggagtggcggcaagaagaagaaggggaacgacgagaactcggcgccaagggccacggccgcggcggcggagcaggcngtggagtacatctcgtcggaggagctggaggcggcggccaaccctaaggccaagggccgcgggggctggtcgcgggccttgactccaaggactgggtcaggacctgcgaggcgctcaacgacgcgcgccgcctcgcgatccaccaccccgcgctgctgaacccgatcctggagaaggtggtgctggcggtcgtgaagacgatgaagagcccccgcagcgcggtgctcaagacgtccatcatggcctgcgccgacatcttcagctccttcggcaacctcctcgcctccgtctccgacgacgccttcgacaagctgctgctccagctcctgctgaaggcgtcccaggacaagcggttcgtgtgcgaggaggccgagaaggcgacgcgcgcgatggcggcgtcgatgccgccgctgccgctgctgaagaagctcaaggcgtacgtccaccacgccaacctcagggtcagggctaaggccgccgtcgccatctcccactgcgccgcccggatggacatcggcgcgatgaaggagttcgggatgtcggcgctgctgcagctggcggcggagctgctgaacgaccggctgccggaggcgagggaggccgcccgcggcgtggtggcgtcgacgcacgcggccttcgccaaggaggccgccgcgagcggccaggaggaggacgcggccgcgtcctgggagagcctctgcgcgctcagcctcccgcccatctccgcgcaggccgtcgccaagatcgctgccgccgcctcctcctcgcagtagccacggcacgcgtgcggacttgnccgctggcgttgtttttgggggtcgtctggttcggttcagaagtagcgctcgtgagtcttcagacagagctcgtttgtcgccgccgccgagtctgtttgtttgttctttctactccatgctatctcgcatggttagtgttctgtttatggcttcgtcaagtaataacatagtatcaatt

SEQ ID NO: 5867 - protein, 190 aa, Zea mays subsp. mays
  peptide (1)..(190): Ceres Seq. ID no. 12409312
  misc_feature (1)..(185): Homolog of NCBI NO: 21593517 NR Description: unknown [Arabidopsis thaliana]
  misc_feature (1)..(185): Homolog of NCBI NO: 18414533 NR Description: expressed protein; protein id: At4g15830.1,
  misc_feature (1)..(186): Homolog of NCBI NO: 21537265 NR Description: unknown [Arabidopsis thaliana]
  misc_feature (1)..(186): Homolog of NCBI NO: 18395821 NR Description: expressed protein; protein id: At3g01450.1, by cDNA: 125711. [Arabidopsis thaliana]
  misc_feature (1)..(185): Homolog of NCBI NO: 7485173 NR Description: hypothetical protein - Arabidopsis thaliana hypothetical protein [Arabidopsis thaliana]
  misc_feature (1)..(182): Homolog of NCBI NO: 15241493 NR Description: putative protein; protein id: At5g14790.1, by cDNA: 98046., supported by cDNA: gi_20260677 [Arabidopsis
  misc_feature (1)..(141): Homolog of NCBI NO: 9294314 NR Description: gb|AAF24615.1~gene_id:K24M9.2~similar to unknown
  misc_feature (1)..(104): Homolog of NCBI NO: 15229670 NR Description: unknown protein; protein id: At3g18530.1
MKSPRSAVLKTSIMACADIFSSFGNLLASVSDDAFDKLLLQLLLKASQDKRFVCEEAEKATRAMAASMPPLPLLKKLKAYVHHANLRVRAKAAVAISHCAARMDIGAMKEFGMSALLQLAAELLNDRLPEAREAARGVVASTHAAFAKEAAASGQEEDAAASWESLCALSLPPISAQAVAKIAAAASSSQ

SEQ ID NO: 5868 - protein, 177 aa, Zea mays subsp. mays
  peptide (1)..(177): Ceres Seq. ID no. 12409313
  misc_feature (1)..(172): Homolog of NCBI NO: 21593517 NR Description: unknown [Arabidopsis thaliana]
  misc_feature (1)..(172): Homolog of NCBI NO: 18414533 NR Description: expressed protein; protein id: At4g15830.1,
  misc_feature (1)..(173): Homolog of NCBI NO: 21537265 NR Description: unknown [Arabidopsis thaliana]
  misc_feature (1)..(173): Homolog of NCBI NO: 18395821 NR Description: expressed protein; protein id: At3g01450.1, by cDNA: 125711. [Arabidopsis thaliana]
  misc_feature (1)..(172): Homolog of NCBI NO: 7485173 NR Description: hypothetical protein - Arabidopsis thaliana hypothetical protein [Arabidopsis thaliana]
  misc_feature (1)..(169): Homolog of NCBI NO: 15241493 NR Description: putative protein; protein id: At5g14790.1, by cDNA: 98046., supported by cDNA: gi_20260677 [Arabidopsis
  misc_feature (1)..(128): Homolog of NCBI NO: 9294314 NR Description: gb|AAF24615.1~gene_id:K24M9.2~similar to unknown
  misc_feature (1)..(91): Homolog of NCBI NO: 15229670 NR Description: unknown protein; protein id: At3g18530.1
MACADIFSSFGNLLASVSDDAFDKLLLQLLLKASQDKRFVCEEAEKATRAMAASMPPLPLLKKLKAYVHHANLRVRAKAAVAISHCAARMDIGAMKEFGMSALLQLAAELLNDRLPEAREAARGVVASTHAAFAKEAAASGQEEDAAASWESLCALSLPPISAQAVAKIAAAASSSQ

SEQ ID NO: 5869 - protein, 154 aa, Zea mays subsp. mays
  peptide (1)..(154): Ceres Seq. ID no. 12409314
  misc_feature (122)..(154): Homolog of NCBI NO: 30424862 NR Description: RIKEN cDNA 5033413A03 [Mus musculus]
  misc_feature (11)..(154): Homolog of NCBI NO: 5821145 NR Description: RNA binding protein [Homo sapiens]
  misc_feature (11)..(154): Homolog of NCBI NO: 5821143 NR Description: RNA binding protein [Homo sapiens]
  misc_feature (11)..(154): Homolog of NCBI NO: 6649242 NR Description: splicing coactivator subunit SRm300 [Homo sapiens]
  misc_feature (1)..(154): Homolog of NCBI NO: 13592175 NR Description: ppg3 [Leishmania major]
  misc_feature (11)..(154): Homolog of NCBI NO: 19923466 NR Description: splicing coactivator subunit SRm300; RNA binding
  misc_feature (69)..(154): Homolog of NCBI NO: 25989119 NR Description: unknown [Streptomyces aureofaciens]
  misc_feature (38)..(38): Xaa is any aa, unknown or other
  misc_feature (73)..(73): Xaa is any aa, unknown or other
  misc_feature (102)..(102): Xaa is any aa, unknown or other
NSAASSSTLQSPLASVAAAYPRAPFPSTASASGKLATXLMALRALDNTMPAAVEERPKKVAKVGVPAAAAKAXASPGSGGKKKKGNDENSAPRATAAAAEQXVEYISSEELEAAANPKAKGRGGWSRALTPRTGSGPARRSTTRAASRSTTPRC

SEQ ID NO: 5870 - DNA, 1453 bp, Zea mays subsp. mays
  misc_feature (1)..(1453): Ceres Seq. ID no. 12353850
  misc_feature: MA Experiment ID: 108528 Result: Down-regulated in Transcription
  misc_feature: MA Experiment 108528 PARAMETER Experiment Name: Zm_Imbibed_Seeds_P Parameter: Age (day) Value: 5 vs. 2
  misc_feature: MA Experiment 108528 PARAMETER Experiment Name: Zm_Imbibed_Seeds_P Parameter: Organism Value: Zea mays
  misc_feature: MA Experiment 108528 PARAMETER Experiment Name: Zm_Imbibed_Seeds_P Parameter: Plant Line Value: 35A19
  misc_feature: MA Experiment 108528 PARAMETER Experiment Name: Zm_Imbibed_Seeds_P Parameter: Tissue Value: Aerial vs. Embryo
  misc_feature: MA Experiment ID: 108530 Result: Down-regulated in Transcription
  misc_feature: MA Experiment 108530 PARAMETER Experiment Name: Zm_Imbibed_Seeds_P Parameter: Age (day) Value: 6 vs. 2
  misc_feature: MA Experiment 108530 PARAMETER Experiment Name: Zm_Imbibed_Seeds_P Parameter: Organism Value: Zea mays
  misc_feature: MA Experiment 108530 PARAMETER Experiment Name: Zm_Imbibed_Seeds_P Parameter: Plant Line Value: 35A19
  misc_feature: MA Experiment 108530 PARAMETER Experiment Name: Zm_Imbibed_Seeds_P Parameter: Tissue Value: Aerial vs. Embryo
  misc_feature: MA Experiment ID: 108545 Result: Down-regulated in Transcription
  misc_feature: MA Experiment 108545 PARAMETER Experiment Name: Zm_Imbibed_Seeds_P Parameter: Age (day) Value: 3 vs. 2
  misc_feature: MA Experiment 108545 PARAMETER Experiment Name: Zm_Imbibed_Seeds_P Parameter: Organism Value: Zea mays
  misc_feature: MA Experiment 108545 PARAMETER Experiment Name: Zm_Imbibed_Seeds_P Parameter: Plant Line Value: 35A19
  misc_feature: MA Experiment 108545 PARAMETER Experiment Name: Zm_Imbibed_Seeds_P Parameter: Tissue Value: Aerial vs. Embryo
  misc_feature: MA Experiment ID: 108547 Result: Down-regulated in Transcription
  misc_feature: MA Experiment 108547 PARAMETER Experiment Name: Zm_Imbibed_Seeds_P Parameter: Age (day) Value: 4 vs. 2
  misc_feature: MA Experiment 108547 PARAMETER Experiment Name: Zm_Imbibed_Seeds_P Parameter: Organism Value: Zea mays
  misc_feature: MA Experiment 108547 PARAMETER Experiment Name: Zm_Imbibed_Seeds_P Parameter: Plant Line Value: 35A19
  misc_feature: MA Experiment 108547 PARAMETER Experiment Name: Zm_Imbibed_Seeds_P Parameter: Tissue Value: Aerial vs. Embryo
cagaaagcgacccgaccgtctctccgctccctccctcccccacaccacccacctgtgatctcccgcgcgggagatccgcccgccccatggcgccgtcgcgcccgctcatgcgggggatccgcccgccgcgcgtcttcccgacccgcggcggccgcgcctcgccgtacgctgtcgccctcacggccctgctcctcgtctccgccgccctcctcgcgctcatcgccttcggcgtcttctcgctccccgtgtcagcgccgaacgccgccgccaccaccacagccggaggggagaccgaatccgccgacacccgccccgcgcgcccccgcgcccgccgggacctgggggaggggctgggagagcgcggcgcgcagtggaccgaggtcatctcgtgggagccaagggcattcgtctaccacaacttcctgtctaaggaagagtgtgaatacctaattggattggccaagcctcacatggtaaaatcaacagttgtcgacagcactactggtaaaagcaaggacagcagggtccggacaagttcgggcatgtttcttcaaagaggaagggacaaggttattcgagtaattgaaaagaggattgcagactataccttcatacctgtagatcatggagagggactccaagtactgcattatgaagtcgggcagaagtatgagcctcactttgattattttcttgatgagtttaacaccaagaatggtggtcagaggatggctactcttctgatgtatctatcagatgttgaagaagggggcgagactattttccctgatgcaaatgtgaacgtcagttctttaccatggtacaatgagctttcagagtgtgccaagagaggcctttctgtcaaaccaaagatgggagatgcacttcttttctggagcatgaaaccagatgccaccctggacccattaagtttgcatgggggttgtcctgtgattagaggaaataaatggtcgtcaaccaagtggatgcatatccacgagtacaaagcttgagccttcaagactcgagagtcgagcgtaccaaagatggatctctatgcatgtgacttggggctgtctactgggttgacacccatgtatgctttacagacccactgaagctgtattctttgctcctttgttggaggggggagaattgcagataataggggccaataagcaggggccttgctcatccctgcagtatttttgggtctgatccttgctgacttggcttttgtcttttcttttctttttcttaccttgccgtaccccagctatagaggaatggtttagtgtctgggggcatagagtttgagattttgttttgtgccacacctgtgttactagtataagctttggtactaatgaataacgaggcctaagctcacatctactacatgaatggtgtaatattgttgaagatagaaagcatctaatgttcggtggttttg

SEQ ID NO: 5871 - protein, 336 aa, Zea mays subsp. mays
  peptide (1)..(336): Ceres Seq. ID no. 12353851
  misc_feature (208)..(331): Pfam Name: 2OG-Fe(II) oxygenase superfamily Pfam Description: 2OG-Fe(II) oxygenase superfamily
  misc_feature (128)..(334): Homolog of NCBI NO: 15239594 NR Description: putative protein; protein id: At5g18900.1, by cDNA: 37828., supported by cDNA: gi_20260279 [Arabidopsis
  misc_feature (53)..(335): Homolog of NCBI NO: 18394842 NR Description: expressed protein; protein id: At1g20270.1,
  misc_feature (53)..(335): Homolog of NCBI NO: 21537370 NR Description: putative prolyl 4-hydroxylase, alpha subunit
  misc_feature (58)..(335): Homolog of NCBI NO: 15227885 NR Description: putative prolyl 4-hydroxylase, alpha subunit;
  misc_feature (58)..(335): Homolog of NCBI NO: 21593091 NR Description: putative prolyl 4-hydroxylase, alpha subunit
  misc_feature (49)..(318): Homolog of NCBI NO: 37535718 NR Description: putative prolyl 4-hydroxylase, alpha subunit
  misc_feature (40)..(313): Homolog of NCBI NO: 15239240 NR Description: prolyl 4-hydroxylase, alpha subunit-like protein;
  misc_feature (58)..(313): Homolog of NCBI NO: 7488226 NR Description: procollagen-proline dioxygenase alpha chain
  misc_feature (128)..(334): Homolog of NCBI NO: 20260280 NR Description: unknown protein [Arabidopsis thaliana]
  misc_feature (109)..(334): Homolog of NCBI NO: 29150365 NR Description: putative oxidoreductase [Oryza sativa (japonica
ESDPTVSPLPPSPTPPTCDLPRGRSARPMAPSRPLMRGIRPPRVFPTRGGRASPYAVALTALLLVSAALLALIAFGVFSLPVSAPNAAATTTAGGETESADTRPARPRARRDLGEGLGERGAQWTEVISWEPRAFVYHNFLSKEECEYLIGLAKPHMVKSTVVDSTTGKSKDSRVRTSSGMFLQRGRDKVIRVIEKRIADYTFIPVDHGEGLQVLHYEVGQKYEPHFDYFLDEFNTKNGGQRMATLLMYLSDVEEGGETIFPDANVNVSSLPWYNELSECAKRGLSVKPKMGDALLFWSMKPDATLDPLSLHGGCPVIRGNKWSSTKWMHIHEYKA

SEQ ID NO: 5872 - protein, 308 aa, Zea mays subsp. mays
  peptide (1)..(308): Ceres Seq. ID no. 12353852
  misc_feature (180)..(303): Pfam Name: 2OG-Fe(II) oxygenase superfamily Pfam Description: 2OG-Fe(II) oxygenase superfamily
  misc_feature (25)..(307): Homolog of NCBI NO: 18394842 NR Description: expressed protein; protein id: At1g20270.1,
  misc_feature (25)..(307): Homolog of NCBI NO: 21537370 NR Description: putative prolyl 4-hydroxylase, alpha subunit
  misc_feature (30)..(307): Homolog of NCBI NO: 15227885 NR Description: putative prolyl 4-hydroxylase, alpha subunit;
  misc_feature (30)..(307): Homolog of NCBI NO: 21593091 NR Description: putative prolyl 4-hydroxylase, alpha subunit
  misc_feature (21)..(290): Homolog of NCBI NO: 37535718 NR Description: putative prolyl 4-hydroxylase, alpha subunit
  misc_feature (12)..(285): Homolog of NCBI NO: 15239240 NR Description: prolyl 4-hydroxylase, alpha subunit-like protein;
  misc_feature (30)..(285): Homolog of NCBI NO: 7488226 NR Description: procollagen-proline dioxygenase alpha chain
  misc_feature (100)..(306): Homolog of NCBI NO: 20260280 NR Description: unknown protein [Arabidopsis thaliana]
  misc_feature (81)..(306): Homolog of NCBI NO: 29150365 NR Description: putative oxidoreductase [Oryza sativa (japonica
  misc_feature (100)..(306): Homolog of NCBI NO: 15239594 NR Description: putative protein; protein id: At5g18900.1, by cDNA: 37828., supported by cDNA: gi_20260279 [Arabidopsis
MAPSRPLMRGIRPPRVFPTRGGRASPYAVALTALLLVSAALLALIAFGVFSLPVSAPNAAATTTAGGETESADTRPARPRARRDLGEGLGERGAQWTEVISWEPRAFVYHNFLSKEECEYLIGLAKPHMVKSTVVDSTTGKSKDSRVRTSSGMFLQRGRDKVIRVIEKRIADYTFIPVDHGEGLQVLHYEVGQKYEPHFDYFLDEFNTKNGGQRMATLLMYLSDVEEGGETIFPDANVNVSSLPWYNELSECAKRGLSVKPKMGDALLFWSMKPDATLDPLSLHGGCPVIRGNKWSSTKWMHIHEYKA

SEQ ID NO: 5873 - protein, 301 aa, Zea mays subsp. mays
  peptide (1)..(301): Ceres Seq. ID no. 12353853
  misc_feature (173)..(296): Pfam Name: 2OG-Fe(II) oxygenase superfamily Pfam Description: 2OG-Fe(II) oxygenase superfamily
  misc_feature (18)..(300): Homolog of NCBI NO: 18394842 NR Description: expressed protein; protein id: At1g20270.1,
  misc_feature (18)..(300): Homolog of NCBI NO: 21537370 NR Description: putative prolyl 4-hydroxylase, alpha subunit
  misc_feature (23)..(300): Homolog of NCBI NO: 15227885 NR Description: putative prolyl 4-hydroxylase, alpha subunit;
  misc_feature (23)..(300): Homolog of NCBI NO: 21593091 NR Description: putative prolyl 4-hydroxylase, alpha subunit
  misc_feature (14)..(283): Homolog of NCBI NO: 37535718 NR Description: putative prolyl 4-hydroxylase, alpha subunit
  misc_feature (5)..(278): Homolog of NCBI NO: 15239240 NR Description: prolyl 4-hydroxylase, alpha subunit-like protein;
  misc_feature (23)..(278): Homolog of NCBI NO: 7488226 NR Description: procollagen-proline dioxygenase alpha chain
  misc_feature (93)..(299): Homolog of NCBI NO: 20260280 NR Description: unknown protein [Arabidopsis thaliana]
  misc_feature (74)..(299): Homolog of NCBI NO: 29150365 NR Description: putative oxidoreductase [Oryza sativa (japonica
  misc_feature (93)..(299): Homolog of NCBI NO: 15239594 NR Description: putative protein; protein id: At5g18900.1, by cDNA: 37828., supported by cDNA: gi_20260279 [Arabidopsis
MRGIRPPRVFPTRGGRASPYAVALTALLLVSAALLALIAFGVFSLPVSAPNAAATTTAGGETESADTRPARPRARRDLGEGLGERGAQWTEVISWEPRAFVYHNFLSKEECEYLIGLAKPHMVKSTVVDSTTGKSKDSRVRTSSGMFLQRGRDKVIRVIEKRIADYTFIPVDHGEGLQVLHYEVGQKYEPHFDYFLDEFNTKNGGQRMATLLMYLSDVEEGGETIFPDANVNVSSLPWYNELSECAKRGLSVKPKMGDALLFWSMKPDATLDPLSLHGGCPVIRGNKWSSTKWMHIHEYKA

SEQ ID NO: 5874 - DNA, 1160 bp, Zea mays subsp. mays
  misc_feature (1)..(1160): Ceres Seq. ID no. 12358324
  misc_feature: MA Experiment ID: 108535 Result: Up-regulated in Transcription
  misc_feature: MA Experiment 108535 PARAMETER Experiment Name: Zm_Meristem_P Parameter: Age (day) Value: 8
  misc_feature: MA Experiment 108535 PARAMETER Experiment Name: Zm_Meristem_P Parameter: Organism Value: Zea mays
  misc_feature: MA Experiment 108535 PARAMETER Experiment Name: Zm_Meristem_P Parameter: Plant Line Value: 35A19
  misc_feature: MA Experiment 108535 PARAMETER Experiment Name: Zm_Meristem_P Parameter: Tissue Value: Root Meristem vs. Above Root Meristem
  misc_feature: MA Experiment ID: 108544 Result: Down-regulated in Transcription
  misc_feature: MA Experiment ID: 108545 Result: Up-regulated in Transcription
  misc_feature: MA Experiment 108545 PARAMETER Experiment Name: Zm_Imbibed_Seeds_P Parameter: Age (day) Value: 3 vs. 2
  misc_feature: MA Experiment 108545 PARAMETER Experiment Name: Zm_Imbibed_Seeds_P Parameter: Organism Value: Zea mays
  misc_feature: MA Experiment 108545 PARAMETER Experiment Name: Zm_Imbibed_Seeds_P Parameter: Plant Line Value: 35A19
  misc_feature: MA Experiment 108545 PARAMETER Experiment Name: Zm_Imbibed_Seeds_P Parameter: Tissue Value: Aerial vs. Embryo
  misc_feature: MA Experiment ID: 108547 Result: Up-regulated in Transcription
  misc_feature: MA Experiment 108547 PARAMETER Experiment Name: Zm_Imbibed_Seeds_P Parameter: Age (day) Value: 4 vs. 2
  misc_feature: MA Experiment 108547 PARAMETER Experiment Name: Zm_Imbibed_Seeds_P Parameter: Organism Value: Zea mays
  misc_feature: MA Experiment 108547 PARAMETER Experiment Name: Zm_Imbibed_Seeds_P Parameter: Plant Line Value: 35A19
  misc_feature: MA Experiment 108547 PARAMETER Experiment Name: Zm_Imbibed_Seeds_P Parameter: Tissue Value: Aerial vs. Embryo
  misc_feature: MA Experiment ID: 108556 Result: Down-regulated in Transcription
  misc_feature: MA Experiment 108556 PARAMETER Experiment Name: Zm_Drought_P Parameter: Age (day) Value: 9
  misc_feature: MA Experiment 108556 PARAMETER Experiment Name: Zm_Drought_P Parameter: Organism Value: Zea mays
  misc_feature: MA Experiment 108556 PARAMETER Experiment Name: Zm_Drought_P Parameter: Plant Line Value: 35A19
  misc_feature: MA Experiment 108556 PARAMETER Experiment Name: Zm_Drought_P Parameter: Timepoint (hr) Value: 24
  misc_feature: MA Experiment 108556 PARAMETER Experiment Name: Zm_Drought_P Parameter: Tissue Value: Aerial
  misc_feature: MA Experiment 108556 PARAMETER Experiment Name: Zm_Drought_P Parameter: Treatment Value: Drought vs. No Drought
  misc_feature: MA Experiment ID: 108687 Result: Down-regulated in Transcription
  misc_feature: MA Experiment 108687 PARAMETER Experiment Name: Zm_Embryos-Flowers__P Parameter: Tissue Value: Embryo vs. Aerial+
  misc_feature: MA Experiment ID: 108689 Result: Down-regulated in Transcription
  misc_feature: MA Experiment 108689 PARAMETER Experiment Name: Zm_Drought_Roots_P Parameter: Age (day) Value: 9
  misc_feature: MA Experiment 108689 PARAMETER Experiment Name: Zm_Drought_Roots_P Parameter: Organism Value: Zea mays
  misc_feature: MA Experiment 108689 PARAMETER Experiment Name: Zm_Drought_Roots_P Parameter: Plant Line Value: 35A19
  misc_feature: MA Experiment 108689 PARAMETER Experiment Name: Zm_Drought_Roots_P Parameter: Timepoint (hr) Value: 24
  misc_feature: MA Experiment 108689 PARAMETER Experiment Name: Zm_Drought_Roots_P Parameter: Tissue Value: Roots
  misc_feature: MA Experiment 108689 PARAMETER Experiment Name: Zm_Drought_Roots_P Parameter: Treatment Value: Drought vs. No Drought
  misc_feature: MA Experiment ID: 20000477 Result: Down-regulated in Transcription
  misc_feature: MA Experiment 20000477 PARAMETER Experiment Name: Zm_5mM_SA_P Parameter: Age (day) Value: 10
  misc_feature: MA Experiment 20000477 PARAMETER Experiment Name: Zm_5mM_SA_P Parameter: Organism Value: Zea mays
  misc_feature: MA Experiment 20000477 PARAMETER Experiment Name: Zm_5mM_SA_P Parameter: Plant Line Value: 35A19
  misc_feature: MA Experiment 20000477 PARAMETER Experiment Name: Zm_5mM_SA_P Parameter: Timepoint (hr) Value: 48
  misc_feature: MA Experiment 20000477 PARAMETER Experiment Name: Zm_5mM_SA_P Parameter: Tissue Value: Aerial
  misc_feature: MA Experiment 20000477 PARAMETER Experiment Name: Zm_5mM_SA_P Parameter: Treatment Value: 5mM SA vs. No Treatment
  misc_feature: MA Experiment ID: 20000478 Result: Down-regulated in Transcription
  misc_feature: MA Experiment 20000478 PARAMETER Experiment Name: Zm_5mM_SA_P Parameter: Age (day) Value: 11
  misc_feature: MA Experiment 20000478 PARAMETER Experiment Name: Zm_5mM_SA_P Parameter: Organism Value: Zea mays
  misc_feature: MA Experiment 20000478 PARAMETER Experiment Name: Zm_5mM_SA_P Parameter: Plant Line Value: 35A19
  misc_feature: MA Experiment 20000478 PARAMETER Experiment Name: Zm_5mM_SA_P Parameter: Timepoint (hr) Value: 72
  misc_feature: MA Experiment 20000478 PARAMETER Experiment Name: Zm_5mM_SA_P Parameter: Tissue Value: Aerial
  misc_feature: MA Experiment 20000478 PARAMETER Experiment Name: Zm_5mM_SA_P Parameter: Treatment Value: 5mM SA vs. No Treatment
  misc_feature: MA Experiment ID: 20000479 Result: Down-regulated in Transcription
  misc_feature: MA Experiment 20000479 PARAMETER Experiment Name: Zm_Drought_P Parameter: Age (day) Value: 10
  misc_feature: MA Experiment 20000479 PARAMETER Experiment Name: Zm_Drought_P Parameter: Organism Value: Zea mays
  misc_feature: MA Experiment 20000479 PARAMETER Experiment Name: Zm_Drought_P Parameter: Plant Line Value: 35A19
  misc_feature: MA Experiment 20000479 PARAMETER Experiment Name: Zm_Drought_P Parameter: Timepoint (hr) Value: 48
  misc_feature: MA Experiment 20000479 PARAMETER Experiment Name: Zm_Drought_P Parameter: Tissue Value: Aerial
  misc_feature: MA Experiment 20000479 PARAMETER Experiment Name: Zm_Drought_P Parameter: Treatment Value: Drought vs. No Drought
  misc_feature: MA Experiment ID: 20000480 Result: Down-regulated in Transcription
  misc_feature: MA Experiment 20000480 PARAMETER Experiment Name: Zm_Drought_P Parameter: Age (day) Value: 11
  misc_feature: MA Experiment 20000480 PARAMETER Experiment Name: Zm_Drought_P Parameter: Organism Value: Zea mays
  misc_feature: MA Experiment 20000480 PARAMETER Experiment Name: Zm_Drought_P Parameter: Plant Line Value: 35A19
  misc_feature: MA Experiment 20000480 PARAMETER Experiment Name: Zm_Drought_P Parameter: Timepoint (hr) Value: 72
  misc_feature: MA Experiment 20000480 PARAMETER Experiment Name: Zm_Drought_P Parameter: Tissue Value: Aerial
  misc_feature: MA Experiment 20000480 PARAMETER Experiment Name: Zm_Drought_P Parameter: Treatment Value: Drought vs. No Drought
  misc_feature: MA Experiment ID: 20000488 Result: Down-regulated in Transcription
  misc_feature: MA Experiment 20000488 PARAMETER Experiment Name: Zm_50mM_NH4NO3_L_to_H_P Parameter: Organism Value: Zea mays
  misc_feature: MA Experiment 20000488 PARAMETER Experiment Name: Zm_50mM_NH4NO3_L_to_H_P Parameter: Timepoint (hr) Value: 8
  misc_feature: MA Experiment 20000488 PARAMETER Experiment Name: Zm_50mM_NH4NO3_L_to_H_P Parameter: Tissue Value: Leaves
  misc_feature: MA Experiment 20000488 PARAMETER Experiment Name: Zm_50mM_NH4NO3_L_to_H_P Parameter: Treatment Value: 50mM NH4NO3 vs. 100mM Mannitol
  misc_feature: MA Experiment ID: 20000534 Result: Down-regulated in Transcription
  misc_feature: MA Experiment 20000534 PARAMETER Experiment Name: Zm_Hybrid_Pollen_P Parameter: Age (day) Value: 8
  misc_feature: MA Experiment 20000534 PARAMETER Experiment Name: Zm_Hybrid_Pollen_P Parameter: Organism Value: Zea mays
  misc_feature: MA Experiment 20000534 PARAMETER Experiment Name: Zm_Hybrid_Pollen_P Parameter: Plant Line Value: 35A19
  misc_feature: MA Experiment 20000534 PARAMETER Experiment Name: Zm_Hybrid_Pollen_P Parameter: Tissue Value: Pollen vs. Aerial
  misc_feature: MA Experiment ID: 20000626 Result: Down-regulated in Transcription
  misc_feature: MA Experiment 20000626 PARAMETER Experiment Name: Zm_Herbicide-Treatments_P Parameter: Timepoint (hr) Value: 12
  misc_feature: MA Experiment 20000626 PARAMETER Experiment Name: Zm_Herbicide-Treatments_P Parameter: Tissue Value: Aerial
  misc_feature: MA Experiment 20000626 PARAMETER Experiment Name: Zm_Herbicide-Treatments_P Parameter: Treatment Value: Roundup vs. No Treatment
agtactcgtcctccttgcagagcttgcaccaacacgccaccttaccttgctttgctcgcactcgcacacagttgcgagcgcattgcttgcattgcgcagccgcaggccgcagcacgaagctagccagtaggcggtagatggcgagcagcgcggggaaccgcttcctgaggcagctgagcgcgagcaacggcgacgaagcggtctgcggcggcctgcagatggaccagcaggagtacggcggcgccggcgtggggaggaggggatcccggcggtggtcgaagaagcgggccgccgccgccgccgccgcgaggggctacggcgccggcagcgggaatggcgtgaagcagccggcctctgccgcggggaagcgggtgatggtggtggtggacgagagctcgggagccaaccacgccatgatgtgggcgctcacccacgtcgccgacaagggggacttcctcacgctgctccacgtcctgccgcgctccggcagcggcaggggcgaggaggcctcctccctcgccaactcgctcggcacgctctgcaaggcctccaggccagaggtggaggtcgaagcgcttgtgatccaagggcccaagctgggcaccgtgctcagccaggtgaagaatctggaggcctccgtgctggtgctcagccagtgcaggccatctccctgctggttaagctgcttccctgcggagcagcggcgaggagtttgtggagcagtgcatcaaccaggcggagtgcctgacgctggcggtgaggaagcagagcaagggcgtcggtgggtacctcatcagcacccggtggcagaagaacttctggctcctggcctgacaaccatgcattttacctagctagttactactgctacatgatcacatttgttttaagtcactcccgtatatttgctgtcatttcgtgtcatcaagtgcgtcacaagaaagaccatctctctctctccttcatcctgttgtaaagcgaaaagagcctccgaatctgaccacctttctacgaacctgtatcttccctgcaagtctttagcgtgcgtgtagtactgtgatctgcactgaacaatcatgtaatgctgcataaatgaccaattctgttgtacggcgcttcttgcttgctgcaattgacacttgaggctgtacagcttgcgg

SEQ ID NO: 5875 - protein, 238 aa, Zea mays subsp. mays
  peptide (1)..(238): Ceres Seq. ID no. 12358325
  misc_feature (77)..(183): Pfam Name: Universal stress protein family Pfam Description: Universal stress protein family
  misc_feature (1)..(183): Homolog of NCBI NO: 34907308 NR Description: hypothetical protein~similar to Arabidopsis
  misc_feature (40)..(189): Homolog of NCBI NO: 15219439 NR Description: hypothetical protein; protein id: At1g44760.1, by cDNA: gi_17380775 [Arabidopsis thaliana]
  misc_feature (57)..(191): Homolog of NCBI NO: 15237955 NR Description: putative protein; protein id: At5g17390.1
  misc_feature (68)..(196): Homolog of NCBI NO: 15228516 NR Description: hypothetical protein; protein id: At3g03290.1 thaliana] >gi|6714411|gb|AAF26099.1|AC012328_2 hypothetical
  misc_feature (76)..(175): Homolog of NCBI NO: 18409190 NR Description: expressed protein; protein id: At1g69080.1, by cDNA: 22327. [Arabidopsis thaliana]
  misc_feature (76)..(175): Homolog of NCBI NO: 21592322 NR Description: unknown [Arabidopsis thaliana]
  misc_feature (80)..(196): Homolog of NCBI NO: 15227695 NR Description: unknown protein; protein id: At2g03720.1
MASSAGNRFLRQLSASNGDEAVCGGLQMDQQEYGGAGVGRRGSRRWSKKRAAAAAAARGYGAGSGNGVKQPASAAGKRVMVVVDESSGANHAMMWALTHVADKGDFLTLLHVLPRSGSGRGEEASSLANSLGTLCKASRPEVEVEALVIQGPKLGTVLSQVKNLEASVLVLSQCRPSPCWLSCFPAEQRRGVCGAVHQPGGVPDAGGEEAEQGRRWVPHQHPVAEELLAPGLTTMHFT

SEQ ID NO: 5876 - protein, 211 aa, Zea mays subsp. mays
  peptide (1)..(211): Ceres Seq. ID no. 12358326
  misc_feature (50)..(156): Pfam Name: Universal stress protein family Pfam Description: Universal stress protein family
  misc_feature (1)..(156): Homolog of NCBI NO: 34907308 NR Description: hypothetical protein~similar to Arabidopsis
  misc_feature (13)..(162): Homolog of NCBI NO: 15219439 NR Description: hypothetical protein; protein id: At1g44760.1, by cDNA: gi_17380775 [Arabidopsis thaliana]
  misc_feature (30)..(164): Homolog of NCBI NO: 15237955 NR Description: putative protein; protein id: At5g17390.1
  misc_feature (41)..(169): Homolog of NCBI NO: 15228516 NR Description: hypothetical protein; protein id: At3g03290.1 thaliana] >gi|6714411|gb|AAF26099.1|AC012328_2 hypothetical
  misc_feature (49)..(148): Homolog of NCBI NO: 18409190 NR Description: expressed protein; protein id: At1g69080.1, by cDNA: 22327. [Arabidopsis thaliana]
  misc_feature (49)..(148): Homolog of NCBI NO: 21592322 NR Description: unknown [Arabidopsis thaliana]
  misc_feature (53)..(169): Homolog of NCBI NO: 15227695 NR Description: unknown protein; protein id: At2g03720.1
MDQQEYGGAGVGRRGSRRWSKKRAAAAAAARGYGAGSGNGVKQPASAAGKRVMVVVDESSGANHAMMWALTHVADKGDFLTLLHVLPRSGSGRGEEASSLANSLGTLCKASRPEVEVEALVIQGPKLGTVLSQVKNLEASVLVLSQCRPSPCWLSCFPAEQRRGVCGAVHQPGGVPDAGGEEAEQGRRWVPHQHPVAEELLAPGLTTMHFT

SEQ ID NO: 5877 - protein, 159 aa, Zea mays subsp. mays
  peptide (1)..(159): Ceres Seq. ID no. 12358327
  misc_feature (1)..(104): Pfam Name: Universal stress protein family Pfam Description: Universal stress protein family
  misc_feature (1)..(104): Homolog of NCBI NO: 34907308 NR Description: hypothetical protein~similar to Arabidopsis
  misc_feature (1)..(110): Homolog of NCBI NO: 15219439 NR Description: hypothetical protein; protein id: At1g44760.1, by cDNA: gi_17380775 [Arabidopsis thaliana]
  misc_feature (1)..(112): Homolog of NCBI NO: 15237955 NR Description: putative protein; protein id: At5g17390.1
  misc_feature (1)..(117): Homolog of NCBI NO: 15228516 NR Description: hypothetical protein; protein id: At3g03290.1 thaliana] >gi|6714411|gb|AAF26099.1|AC012328_2 hypothetical
  misc_feature (1)..(96): Homolog of NCBI NO: 18409190 NR Description: expressed protein; protein id: At1g69080.1, by cDNA: 22327. [Arabidopsis thaliana]
  misc_feature (1)..(96): Homolog of NCBI NO: 21592322 NR Description: unknown [Arabidopsis thaliana]
  misc_feature (1)..(117): Homolog of NCBI NO: 15227695 NR Description: unknown protein; protein id: At2g03720.1
MVVVDESSGANHAMMWALTHVADKGDFLTLLHVLPRSGSGRGEEASSLANSLGTLCKASRPEVEVEALVIQGPKLGTVLSQVKNLEASVLVLSQCRPSPCWLSCFPAEQRRGVCGAVHQPGGVPDAGGEEAEQGRRWVPHQHPVAEELLAPGLTTMHFT

SEQ ID NO: 5878 - DNA, 1420 bp, Zea mays subsp. mays
  misc_feature (1)..(1420): Ceres Seq. ID no. 12373624
  misc_feature: MA Experiment ID: 20000492 Result: Up-regulated in Transcription
  misc_feature: MA Experiment 20000492 PARAMETER Experiment Name: Zm_Hybrid_Seed_Dev_P Parameter: DAP Value: 12
  misc_feature: MA Experiment 20000492 PARAMETER Experiment Name: Zm_Hybrid_Seed_Dev_P Parameter: Organism Value: Zea mays
  misc_feature: MA Experiment 20000492 PARAMETER Experiment Name: Zm_Hybrid_Seed_Dev_P Parameter: Plant Line Value: 35A19
  misc_feature: MA Experiment 20000492 PARAMETER Experiment Name: Zm_Hybrid_Seed_Dev_P Parameter: Tissue Value: Fert Kernel vs. Unfert Floret
ctctctcgtgcggcaactgggctattggcgaccgccaacgccgacgattacatttacaccaagtgcccaagccgtcttcgactacaccaggtgccaagttttcttcgcgtccttcacccgcgacgagcacccaccaggcatagagagagatggcaagtctaaccggcctcaccgcgaaccctaatccgaacaagtcattcgagatactgccgaacccaggtgactctgtctccagcctcagctttagtcccaagagtaatctgcttgtggcaacctcctgggataaccaggtgaggtgctgggagattgttggtggtaacagtcagccaaaggcgtccatttctcatgatcagccggttctctgctcggcttggaaggatgatggaactactgtcttctctggaggctgtgacaagcaggtcaaaatgtggcctcttctgtcaggtgggcagcctcagacggttgctatgcatgatgcccctgtcaaggaggtcgcctggattcctcagatgaatcttcttgtatccggaagctgggataagactttaaggtactgggatacaaggcaatcaaatcctgtgcatattcagcaacttcctgaacgttgctatgctcttactgtgaattatccccttatgattgttggaactgctgaccgtcatcttgttgtcttcaatttgcagaatcctcagacggagttcaagcgaatccaatcaccactaaaataccagacacggtgccttgctgcattccctgatcaacaagggtttttggttggttcaatagaaggaagagttggcgttcatcatatcgatgacgcacagcaaagcaaaaacttcacattcaaatgccacagggaaggaaatgatatattctctgtcaattcactcaacttccaccctgtccatcacacatttgcaactgctggatctgacggtgctttcaacttctgggataaggatagcaagcagaggctaaaggcttttagtagatgcccccttcccattccttgcagtaccttcaacagtgatggttccatatttgcttatgcggtttgctatgactggagccgtggggccgaaaatcacaaccctgcagctgcaaagacatccatctatctccacagtccacaggaaaccgaggtcaaaggaaagccgcgcattgcaacaggcaggaagtgattgcattgaaggtgttgcaaggaaccatgatgtcatccagcagttttgtcatgcctccctcctgtcttggaagtctggtagagtgtaaatttcagctaacttatgcgccgattatagggtttctgtagtacctggtgtttgtggtgtcttcaaaatagattctgtcgacgttctgtgatgatctccttactgcttatttctggcagtaaaatcagtgtatcttaaaaaggttgtgatgt

SEQ ID NO: 5879 - protein, 343 aa, Zea mays subsp. mays
  peptide (1)..(343): Ceres Seq. ID no. 12373625
  misc_feature (1)..(343): Homolog of NCBI NO: 38636797 NR Description: putative RAE1 (RNA export 1, S.pombe) homolog
  misc_feature (1)..(338): Homolog of NCBI NO: 34913020 NR Description: putative mRNA export protein [Oryza sativa
  misc_feature (8)..(343): Homolog of NCBI NO: 15220198 NR Description: mRNA export protein, putative; protein id: supported by cDNA: 37635. [Arabidopsis thaliana]
  misc_feature (8)..(208): Homolog of NCBI NO: 3122671 NR Description: Hypothetical RAE1-like protein At1g80670
  misc_feature (8)..(337): Homolog of NCBI NO: 4506399 NR Description: RAE1 (RNA export 1, S.pombe) homolog; homolog of
  misc_feature (8)..(337): Homolog of NCBI NO: 28201956 NR Description: RAE1 RNA export 1 homolog; DNA segment, Chr 2, Doi 342, expressed [Mus musculus] >gi|26347957|dbj|BAC37627.1|
  misc_feature (8)..(337): Homolog of NCBI NO: 34860864 NR Description: similar to RAE1 RNA export 1 homolog; DNA
  misc_feature (8)..(337): Homolog of NCBI NO: 2231592 NR Description: mRNA-associated protein mrnp41 [Homo sapiens]
  misc_feature (3)..(337): Homolog of NCBI NO: 30039225 NR Description: Rae1/Gle2 [Xenopus laevis]
  misc_feature (8)..(308): Homolog of NCBI NO: 26330564 NR Description: unnamed protein product [Mus musculus]
MASLTGLTANPNPNKSFEILPNPGDSVSSLSFSPKSNLLVATSWDNQVRCWEIVGGNSQPKASISHDQPVLCSAWKDDGTTVFSGGCDKQVKMWPLLSGGQPQTVAMHDAPVKEVAWIPQMNLLVSGSWDKTLRYWDTRQSNPVHIQQLPERCYALTVNYPLMIVGTADRHLVVFNLQNPQTEFKRIQSPLKYQTRCLAAFPDQQGFLVGSIEGRVGVHHIDDAQQSKNFTFKCHREGNDIFSVNSLNFHPVHHTFATAGSDGAFNFWDKDSKQRLKAFSRCPLPIPCSTFNSDGSIFAYAVCYDWSRGAENHNPAAAKTSIYLHSPQETEVKGKPRIATGRK

SEQ ID NO: 5880 - protein, 251 aa, Zea mays subsp. mays
  peptide (1)..(251): Ceres Seq. ID no. 12373626
  misc_feature (1)..(251): Homolog of NCBI NO: 38636797 NR Description: putative RAE1 (RNA export 1, S.pombe) homolog
  misc_feature (1)..(246): Homolog of NCBI NO: 34913020 NR Description: putative mRNA export protein [Oryza sativa
  misc_feature (1)..(251): Homolog of NCBI NO: 15220198 NR Description: mRNA export protein, putative; protein id: supported by cDNA: 37635. [Arabidopsis thaliana]
  misc_feature (1)..(116): Homolog of NCBI NO: 3122671 NR Description: Hypothetical RAE1-like protein At1g80670
  misc_feature (1)..(245): Homolog of NCBI NO: 4506399 NR Description: RAE1 (RNA export 1, S.pombe) homolog; homolog of
  misc_feature (1)..(245): Homolog of NCBI NO: 28201956 NR Description: RAE1 RNA export 1 homolog; DNA segment, Chr 2, Doi 342, expressed [Mus musculus] >gi|26347957|dbj|BAC37627.1|
  misc_feature (1)..(245): Homolog of NCBI NO: 34860864 NR Description: similar to RAE1 RNA export 1 homolog; DNA
  misc_feature (1)..(245): Homolog of NCBI NO: 2231592 NR Description: mRNA-associated protein mrnp41 [Homo sapiens]
  misc_feature (1)..(245): Homolog of NCBI NO: 30039225 NR Description: Rae1/Gle2 [Xenopus laevis]
  misc_feature (1)..(216): Homolog of NCBI NO: 26330564 NR Description: unnamed protein product [Mus musculus]
MWPLLSGGQPQTVAMHDAPVKEVAWIPQMNLLVSGSWDKTLRYWDTRQSNPVHIQQLPERCYALTVNYPLMIVGTADRHLVVFNLQNPQTEFKRIQSPLKYQTRCLAAFPDQQGFLVGSIEGRVGVHHIDDAQQSKNFTFKCHREGNDIFSVNSLNFHPVHHTFATAGSDGAFNFWDKDSKQRLKAFSRCPLPIPCSTFNSDGSIFAYAVCYDWSRGAENHNPAAAKTSIYLHSPQETEVKGKPRIATGRK

SEQ ID NO: 5881 - protein, 237 aa, Zea mays subsp. mays
  peptide (1)..(237): Ceres Seq. ID no. 12373627
  misc_feature (1)..(237): Homolog of NCBI NO: 38636797 NR Description: putative RAE1 (RNA export 1, S.pombe) homolog
  misc_feature (1)..(232): Homolog of NCBI NO: 34913020 NR Description: putative mRNA export protein [Oryza sativa
  misc_feature (1)..(237): Homolog of NCBI NO: 15220198 NR Description: mRNA export protein, putative; protein id: supported by cDNA: 37635. [Arabidopsis thaliana]
  misc_feature (1)..(102): Homolog of NCBI NO: 3122671 NR Description: Hypothetical RAE1-like protein At1g80670
  misc_feature (1)..(231): Homolog of NCBI NO: 4506399 NR Description: RAE1 (RNA export 1, S.pombe) homolog; homolog of
  misc_feature (1)..(231): Homolog of NCBI NO: 28201956 NR Description: RAE1 RNA export 1 homolog; DNA segment, Chr 2, Doi 342, expressed [Mus musculus] >gi|26347957|dbj|BAC37627.1|
  misc_feature (1)..(231): Homolog of NCBI NO: 34860864 NR Description: similar to RAE1 RNA export 1 homolog; DNA
  misc_feature (1)..(231): Homolog of NCBI NO: 2231592 NR Description: mRNA-associated protein mrnp41 [Homo sapiens]
  misc_feature (1)..(231): Homolog of NCBI NO: 30039225 NR Description: Rae1/Gle2 [Xenopus laevis]
  misc_feature (1)..(202): Homolog of NCBI NO: 26330564 NR Description: unnamed protein product [Mus musculus]
MHDAPVKEVAWIPQMNLLVSGSWDKTLRYWDTRQSNPVHIQQLPERCYALTVNYPLMIVGTADRHLVVFNLQNPQTEFKRIQSPLKYQTRCLAAFPDQQGFLVGSIEGRVGVHHIDDAQQSKNFTFKCHREGNDIFSVNSLNFHPVHHTFATAGSDGAFNFWDKDSKQRLKAFSRCPLPIPCSTFNSDGSIFAYAVCYDWSRGAENHNPAAAKTSIYLHSPQETEVKGKPRIATGRK

SEQ ID NO: 5882 - DNA, 1510 bp, Zea mays subsp. mays
  misc_feature (1)..(1510): Ceres Seq. ID no. 12349160
  misc_feature: MA Experiment ID: 108527 Result: Down-regulated in Transcription
  misc_feature: MA Experiment 108527 PARAMETER Experiment Name: Zm_5mM_NO_P Parameter: Age (day) Value: 8
  misc_feature: MA Experiment 108527 PARAMETER Experiment Name: Zm_5mM_NO_P Parameter: Organism Value: Zea mays
  misc_feature: MA Experiment 108527 PARAMETER Experiment Name: Zm_5mM_NO_P Parameter: Plant Line Value: 35A19
  misc_feature: MA Experiment 108527 PARAMETER Experiment Name: Zm_5mM_NO_P Parameter: Timepoint (hr) Value: 6
  misc_feature: MA Experiment 108527 PARAMETER Experiment Name: Zm_5mM_NO_P Parameter: Tissue Value: Aerial
  misc_feature: MA Experiment 108527 PARAMETER Experiment Name: Zm_5mM_NO_P Parameter: Treatment Value: 5mM NO vs. No Treatment
  misc_feature: MA Experiment ID: 108528 Result: Up-regulated in Transcription
  misc_feature: MA Experiment 108528 PARAMETER Experiment Name: Zm_Imbibed_Seeds_P Parameter: Age (day) Value: 5 vs. 2
  misc_feature: MA Experiment 108528 PARAMETER Experiment Name: Zm_Imbibed_Seeds_P Parameter: Organism Value: Zea mays
  misc_feature: MA Experiment 108528 PARAMETER Experiment Name: Zm_Imbibed_Seeds_P Parameter: Plant Line Value: 35A19
  misc_feature: MA Experiment 108528 PARAMETER Experiment Name: Zm_Imbibed_Seeds_P Parameter: Tissue Value: Aerial vs. Embryo
  misc_feature: MA Experiment ID: 108529 Result: Down-regulated in Transcription
  misc_feature: MA Experiment 108529 PARAMETER Experiment Name: Zm_Imbibed_Seeds_P Parameter: Age (day) Value: 5 vs. 2
  misc_feature: MA Experiment 108529 PARAMETER Experiment Name: Zm_Imbibed_Seeds_P Parameter: Organism Value: Zea mays
  misc_feature: MA Experiment 108529 PARAMETER Experiment Name: Zm_Imbibed_Seeds_P Parameter: Plant Line Value: 35A19
  misc_feature: MA Experiment 108529 PARAMETER Experiment Name: Zm_Imbibed_Seeds_P Parameter: Tissue Value: Roots vs. Embryo
  misc_feature: MA Experiment ID: 108530 Result: Up-regulated in Transcription
  misc_feature: MA Experiment 108530 PARAMETER Experiment Name: Zm_Imbibed_Seeds_P Parameter: Age (day) Value: 6 vs. 2
  misc_feature: MA Experiment 108530 PARAMETER Experiment Name: Zm_Imbibed_Seeds_P Parameter: Organism Value: Zea mays
  misc_feature: MA Experiment 108530 PARAMETER Experiment Name: Zm_Imbibed_Seeds_P Parameter: Plant Line Value: 35A19
  misc_feature: MA Experiment 108530 PARAMETER Experiment Name: Zm_Imbibed_Seeds_P Parameter: Tissue Value: Aerial vs. Embryo
  misc_feature: MA Experiment ID: 108536 Result: Down-regulated in Transcription
  misc_feature: MA Experiment 108536 PARAMETER Experiment Name: Zm_Meristem_P Parameter: Age (day) Value: 8
  misc_feature: MA Experiment 108536 PARAMETER Experiment Name: Zm_Meristem_P Parameter: Organism Value: Zea mays
  misc_feature: MA Experiment 108536 PARAMETER Experiment Name: Zm_Meristem_P Parameter: Plant Line Value: 35A19
  misc_feature: MA Experiment 108536 PARAMETER Experiment Name: Zm_Meristem_P Parameter: Tissue Value: Shoot Meristem vs. Above Shoot Meristem
  misc_feature: MA Experiment ID: 108543 Result: Down-regulated in Transcription
  misc_feature: MA Experiment ID: 108545 Result: Up-regulated in Transcription
  misc_feature: MA Experiment 108545 PARAMETER Experiment Name: Zm_Imbibed_Seeds_P Parameter: Age (day) Value: 3 vs. 2
  misc_feature: MA Experiment 108545 PARAMETER Experiment Name: Zm_Imbibed_Seeds_P Parameter: Organism Value: Zea mays
  misc_feature: MA Experiment 108545 PARAMETER Experiment Name: Zm_Imbibed_Seeds_P Parameter: Plant Line Value: 35A19
  misc_feature: MA Experiment 108545 PARAMETER Experiment Name: Zm_Imbibed_Seeds_P Parameter: Tissue Value: Aerial vs. Embryo
  misc_feature: MA Experiment ID: 108546 Result: Down-regulated in Transcription
  misc_feature: MA Experiment 108546 PARAMETER Experiment Name: Zm_Imbibed_Seeds_P Parameter: Age (day) Value: 3 vs. 2
  misc_feature: MA Experiment 108546 PARAMETER Experiment Name: Zm_Imbibed_Seeds_P Parameter: Organism Value: Zea mays
  misc_feature: MA Experiment 108546 PARAMETER Experiment Name: Zm_Imbibed_Seeds_P Parameter: Plant Line Value: 35A19
  misc_feature: MA Experiment 108546 PARAMETER Experiment Name: Zm_Imbibed_Seeds_P Parameter: Tissue Value: Roots vs. Embryo
  misc_feature: MA Experiment ID: 108547 Result: Up-regulated in Transcription
  misc_feature: MA Experiment 108547 PARAMETER Experiment Name: Zm_Imbibed_Seeds_P Parameter: Age (day) Value: 4 vs. 2
  misc_feature: MA Experiment 108547 PARAMETER Experiment Name: Zm_Imbibed_Seeds_P Parameter: Organism Value: Zea mays
  misc_feature: MA Experiment 108547 PARAMETER Experiment Name: Zm_Imbibed_Seeds_P Parameter: Plant Line Value: 35A19
  misc_feature: MA Experiment 108547 PARAMETER Experiment Name: Zm_Imbibed_Seeds_P Parameter: Tissue Value: Aerial vs. Embryo
  misc_feature: MA Experiment ID: 108559 Result: Down-regulated in Transcription
  misc_feature: MA Experiment 108559 PARAMETER Experiment Name: Zm_5mM_NO_P Parameter: Age (day) Value: 8
  misc_feature: MA Experiment 108559 PARAMETER Experiment Name: Zm_5mM_NO_P Parameter: Organism Value: Zea mays
  misc_feature: MA Experiment 108559 PARAMETER Experiment Name: Zm_5mM_NO_P Parameter: Plant Line Value: 35A19
  misc_feature: MA Experiment 108559 PARAMETER Experiment Name: Zm_5mM_NO_P Parameter: Timepoint (hr) Value: 12
  misc_feature: MA Experiment 108559 PARAMETER Experiment Name: Zm_5mM_NO_P Parameter: Tissue Value: Aerial
  misc_feature: MA Experiment 108559 PARAMETER Experiment Name: Zm_5mM_NO_P Parameter: Treatment Value: 5mM NO vs. No Treatment
  misc_feature: MA Experiment ID: 108687 Result: Down-regulated in Transcription
  misc_feature: MA Experiment 108687 PARAMETER Experiment Name: Zm_Embryos-Flowers__P Parameter: Tissue Value: Embryo vs. Aerial+
  misc_feature: MA Experiment ID: 20000477 Result: Down-regulated in Transcription
  misc_feature: MA Experiment 20000477 PARAMETER Experiment Name: Zm_5mM_SA_P Parameter: Age (day) Value: 10
  misc_feature: MA Experiment 20000477 PARAMETER Experiment Name: Zm_5mM_SA_P Parameter: Organism Value: Zea mays
  misc_feature: MA Experiment 20000477 PARAMETER Experiment Name: Zm_5mM_SA_P Parameter: Plant Line Value: 35A19
  misc_feature: MA Experiment 20000477 PARAMETER Experiment Name: Zm_5mM_SA_P Parameter: Timepoint (hr) Value: 48
  misc_feature: MA Experiment 20000477 PARAMETER Experiment Name: Zm_5mM_SA_P Parameter: Tissue Value: Aerial
  misc_feature: MA Experiment 20000477 PARAMETER Experiment Name: Zm_5mM_SA_P Parameter: Treatment Value: 5mM SA vs. No Treatment
  misc_feature: MA Experiment ID: 20000479 Result: Down-regulated in Transcription
  misc_feature: MA Experiment 20000479 PARAMETER Experiment Name: Zm_Drought_P Parameter: Age (day) Value: 10
  misc_feature: MA Experiment 20000479 PARAMETER Experiment Name: Zm_Drought_P Parameter: Organism Value: Zea mays
  misc_feature: MA Experiment 20000479 PARAMETER Experiment Name: Zm_Drought_P Parameter: Plant Line Value: 35A19
  misc_feature: MA Experiment 20000479 PARAMETER Experiment Name: Zm_Drought_P Parameter: Timepoint (hr) Value: 48
  misc_feature: MA Experiment 20000479 PARAMETER Experiment Name: Zm_Drought_P Parameter: Tissue Value: Aerial
  misc_feature: MA Experiment 20000479 PARAMETER Experiment Name: Zm_Drought_P Parameter: Treatment Value: Drought vs. No Drought
  misc_feature: MA Experiment ID: 20000480 Result: Down-regulated in Transcription
  misc_feature: MA Experiment 20000480 PARAMETER Experiment Name: Zm_Drought_P Parameter: Age (day) Value: 11
  misc_feature: MA Experiment 20000480 PARAMETER Experiment Name: Zm_Drought_P Parameter: Organism Value: Zea mays
  misc_feature: MA Experiment 20000480 PARAMETER Experiment Name: Zm_Drought_P Parameter: Plant Line Value: 35A19
  misc_feature: MA Experiment 20000480 PARAMETER Experiment Name: Zm_Drought_P Parameter: Timepoint (hr) Value: 72
  misc_feature: MA Experiment 20000480 PARAMETER Experiment Name: Zm_Drought_P Parameter: Tissue Value: Aerial
  misc_feature: MA Experiment 20000480 PARAMETER Experiment Name: Zm_Drought_P Parameter: Treatment Value: Drought vs. No Drought
  misc_feature: MA Experiment ID: 20000488 Result: Up-regulated in Transcription
  misc_feature: MA Experiment 20000488 PARAMETER Experiment Name: Zm_50mM_NH4NO3_L_to_H_P Parameter: Organism Value: Zea mays
  misc_feature: MA Experiment 20000488 PARAMETER Experiment Name: Zm_50mM_NH4NO3_L_to_H_P Parameter: Timepoint (hr) Value: 8
  misc_feature: MA Experiment 20000488 PARAMETER Experiment Name: Zm_50mM_NH4NO3_L_to_H_P Parameter: Tissue Value: Leaves
  misc_feature: MA Experiment 20000488 PARAMETER Experiment Name: Zm_50mM_NH4NO3_L_to_H_P Parameter: Treatment Value: 50mM NH4NO3 vs. 100mM Mannitol
  misc_feature: MA Experiment ID: 20000534 Result: Down-regulated in Transcription
  misc_feature: MA Experiment 20000534 PARAMETER Experiment Name: Zm_Hybrid_Pollen_P Parameter: Age (day) Value: 8
  misc_feature: MA Experiment 20000534 PARAMETER Experiment Name: Zm_Hybrid_Pollen_P Parameter: Organism Value: Zea mays
  misc_feature: MA Experiment 20000534 PARAMETER Experiment Name: Zm_Hybrid_Pollen_P Parameter: Plant Line Value: 35A19
  misc_feature: MA Experiment 20000534 PARAMETER Experiment Name: Zm_Hybrid_Pollen_P Parameter: Tissue Value: Pollen vs. Aerial
aacacaacacatctgagagacatacagcaagctctctccccattggccatatctagctcgtagtctacactgcctctaaaccttgacatttcctttgtattcccctttccaatttgcagtagtttgtaggtagaccgcaaggtggttttttcttgcagcaatggcggccaaggtttgacaaggcatgacgtcctgattaagccccctcgcggcagccacaagatttgttgcagcgtgagacaggagctgcggctgcggaggaagtgagcaaaagcatggatctttccggcacgcagggcgagctgccgatggcaacaatgcacgccggcgggtcgccgtacctggggctgcaccacgggcacccacagcagcacaaccatggcgcgaacggccggcacatgtcgccgccggatgtggtggcggaggaggccaagaaccggcagctggcggtggtgcccgtgggcacaggaggcggaggcggggcaggggtgaggtaccgcgagtgcctgaagaaccacgcggctgccatcggcgggagcgcgacggacgggtgcggcgagttcatgcccgcgggcgaggaggggtcgctggacgcgctccggtgctcggcgtgcgggtgccaccgcaacttccaccgcaaggagccgccgggcggcgacgggcggcagctgtacgggcaccaccaccaccacccgctgagcccgctggccgcggtgcacccccaccatcaccgggggctgctggtggcggcgcttcccccggcgccgacgcgcatggtgatgccgctgagcgccgccatgcaccatcaccagcagccgccgcagcagcaccacagctcggcgtcagcggactccgacgacgcacacgtgccaggggtgcgcgggggggaggtgcagcagcagcagcaggcaccggcacggaagcggttccggaccaagttcaccgcggagcagaaggcccggatgctggggttcgccggaggacgccgggtggcggctgcagaagctggacgaggcggcggtgcagcgcttctgccaggaggtcggcgtgaagcggcgcgtgctcaaggtgtggatgcacaacaacaagcacaccctggcgcggcgcggccacgccgggctccccggcgacccggagctgctggggccgcacgacggccagctcggcatgccgctcccggagccggcggcggagcccgcagttgctgctgcggctgcggctggacttggagtgaccgaccaagccatgtctttcgggactggacgacattgatcaagagagtctaatgctgactgaatcagccttgcggcatagggaagctgttttctttgttaatctgctgctgatctcatcaatctagccgtagctttagctgcatttgcattccactgttccatccatcctagctatccatcaaccacaaactgatgatgcggagtctccatggatttctattccttgttgatttctgtagctgctctccccgctcttgactttaattttttagtgc

SEQ ID NO: 5883 - protein, 336 aa, Zea mays subsp. mays
  peptide (1)..(336): Ceres Seq. ID no. 12349161
  misc_feature (72)..(126): Pfam Name: ZF-HD protein dimerisation region Pfam Description: ZF-HD protein dimerisation region
  misc_feature (65)..(234): Homolog of NCBI NO: 13374061 NR Description: ZF-HD homeobox protein [Flaveria bidentis]
  misc_feature (72)..(234): Homolog of NCBI NO: 15223757 NR Description: hypothetical protein; protein id: At1g14440.1, by cDNA: gi_18377625, supported by cDNA: gi_20465766 [Arabidopsis
  misc_feature (57)..(234): Homolog of NCBI NO: 32480091 NR Description: OSJNBb0086G13.8 [Oryza sativa (japonica
  misc_feature (72)..(234): Homolog of NCBI NO: 15226993 NR Description: hypothetical protein; protein id: At2g02540.1, by cDNA: gi_20148767 [Arabidopsis thaliana]
  misc_feature (72)..(234): Homolog of NCBI NO: 20148768 NR Description: hypothetical protein At2g02540/T822.16
  misc_feature (72)..(185): Homolog of NCBI NO: 18410804 NR Description: expressed protein; protein id: At1g75240.1, by cDNA: 10873. [Arabidopsis thaliana] >gi|25406424|pir||G96782
  misc_feature (66)..(226): Homolog of NCBI NO: 15238445 NR Description: hypothetical protein common family; protein id: [Arabidopsis thaliana] >gi|9759621|dbj|BAB11563.1| contains to unknown protein~gene_id:MNA5.14~pir||T05568 [Arabidopsis
  misc_feature (62)..(166): Homolog of NCBI NO: 15233925 NR Description: putative protein; protein id: At4g24660.1, by cDNA: gi_16612294 [Arabidopsis thaliana]
  misc_feature (74)..(234): Homolog of NCBI NO: 18421904 NR Description: putative protein; protein id: At5g39760.1, by cDNA: 249321., supported by cDNA: gi_20259469 [Arabidopsis >gi|10177976|dbj|BAB11382.1| gene_id:MKM21.8~pir||T00609~similar
  misc_feature (74)..(234): Homolog of NCBI NO: 21592512 NR Description: unknown [Arabidopsis thaliana]
MDLSGTQGELPMATMHAGGSPYLGLHHGHPQQHNHGANGRHMSPPDVVAEEAKNRQLAVVPVGTGGGGGAGVRYRECLKNHAAAIGGSATDGCGEFMPAGEEGSLDALRCSACGCHRNFHRKEPPGGDGRQLYGHHHHHPLSPLAAVHPHHHRGLLVAALPPAPTRMVMPLSAAMHHHQQPPQQHHSSASADSDDAHVPGVRGGEVQQQQQAPARKRFRTKFTAEQKARMLGFAGGRRVAAAEAGRGGGAALLPGGRREAARAQGVDAQQQAHPGAARPRRAPRRPGAAGAARRPARHAAPGAGGGARSCCCGCGWTWSDRPSHVFRDWTTLIKRV

SEQ ID NO: 5884 - protein, 325 aa, Zea mays subsp. mays
  peptide (1)..(325): Ceres Seq. ID no. 12349162
  misc_feature (61)..(115): Pfam Name: ZF-HD protein dimerisation region Pfam Description: ZF-HD protein dimerisation region
  misc_feature (54)..(223): Homolog of NCBI NO: 13374061 NR Description: ZF-HD homeobox protein [Flaveria bidentis]
  misc_feature (61)..(223): Homolog of NCBI NO: 15223757 NR Description: hypothetical protein; protein id: At1g14440.1, by cDNA: gi_18377625, supported by cDNA: gi_20465766 [Arabidopsis
  misc_feature (46)..(223): Homolog of NCBI NO: 32480091 NR Description: OSJNBb0086G13.8 [Oryza sativa (japonica
  misc_feature (61)..(223): Homolog of NCBI NO: 15226993 NR Description: hypothetical protein; protein id: At2g02540.1, by cDNA: gi_20148767 [Arabidopsis thaliana]
  misc_feature (61)..(223): Homolog of NCBI NO: 20148768 NR Description: hypothetical protein At2g02540/T822.16
  misc_feature (61)..(174): Homolog of NCBI NO: 18410804 NR Description: expressed protein; protein id: At1g75240.1, by cDNA: 10873. [Arabidopsis thaliana] >gi|25406424|pir||G96782
  misc_feature (55)..(215): Homolog of NCBI NO: 15238445 NR Description: hypothetical protein common family; protein id: [Arabidopsis thaliana] >gi|9759621|dbj|BAB11563.1| contains to unknown protein~gene_id:MNA5.14~pir||T05568 [Arabidopsis
  misc_feature (51)..(155): Homolog of NCBI NO: 15233925 NR Description: putative protein; protein id: At4g24660.1, by cDNA: gi_16612294 [Arabidopsis thaliana]
  misc_feature (63)..(223): Homolog of NCBI NO: 18421904 NR Description: putative protein; protein id: At5g39760.1, by cDNA: 249321., supported by cDNA: gi_20259469 [Arabidopsis >gi|10177976|dbj|BAB11382.1| gene_id:MKM21.8~pir||T00609~similar
  misc_feature (63)..(223): Homolog of NCBI NO: 21592512 NR Description: unknown [Arabidopsis thaliana]
MATMHAGGSPYLGLHHGHPQQHNHGANGRHMSPPDVVAEEAKNRQLAVVPVGTGGGGGAGVRYRECLKNHAAAIGGSATDGCGEFMPAGEEGSLDALRCSACGCHRNFHRKEPPGGDGRQLYGHHHHHPLSPLAAVHPHHHRGLLVAALPPAPTRMVMPLSAAMHHHQQPPQQHHSSASADSDDAHVPGVRGGEVQQQQQAPARKRFRTKFTAEQKARMLGFAGGRRVAAAEAGRGGGAALLPGGRREAARAQGVDAQQQAHPGAARPRRAPRRPGAAGAARRPARHAAPGAGGGARSCCCGCGWTWSDRPSHVFRDWTTLIKRV

SEQ ID NO: 5885 - protein, 322 aa, Zea mays subsp. mays
  peptide (1)..(322): Ceres Seq. ID no. 12349163
  misc_feature (58)..(112): Pfam Name: ZF-HD protein dimerisation region Pfam Description: ZF-HD protein dimerisation region
  misc_feature (51)..(220): Homolog of NCBI NO: 13374061 NR Description: ZF-HD homeobox protein [Flaveria bidentis]
  misc_feature (58)..(220): Homolog of NCBI NO: 15223757 NR Description: hypothetical protein; protein id: At1g14440.1, by cDNA: gi_18377625, supported by cDNA: gi_20465766 [Arabidopsis
  misc_feature (43)..(220): Homolog of NCBI NO: 32480091 NR Description: OSJNBb0086G13.8 [Oryza sativa (japonica
  misc_feature (58)..(220): Homolog of NCBI NO: 15226993 NR Description: hypothetical protein; protein id: At2g02540.1, by cDNA: gi_20148767 [Arabidopsis thaliana]
  misc_feature (58)..(220): Homolog of NCBI NO: 20148768 NR Description: hypothetical protein At2g02540/T822.16
  misc_feature (58)..(171): Homolog of NCBI NO: 18410804 NR Description: expressed protein; protein id: At1g75240.1, by cDNA: 10873. [Arabidopsis thaliana] >gi|25406424|pir||G96782
  misc_feature (52)..(212): Homolog of NCBI NO: 15238445 NR Description: hypothetical protein common family; protein id: [Arabidopsis thaliana] >gi|9759621|dbj|BAB11563.1| contains to unknown protein~gene_id:MNA5.14~pir||T05568 [Arabidopsis
  misc_feature (48)..(152): Homolog of NCBI NO: 15233925 NR Description: putative protein; protein id: At4g24660.1, by cDNA: gi_16612294 [Arabidopsis thaliana]
  misc_feature (60)..(220): Homolog of NCBI NO: 18421904 NR Description: putative protein; protein id: At5g39760.1, by cDNA: 249321., supported by cDNA: gi_20259469 [Arabidopsis >gi|10177976|dbj|BAB11382.1| gene_id:MKM21.8~pir||T00609~similar
  misc_feature (60)..(220): Homolog of NCBI NO: 21592512 NR Description: unknown [Arabidopsis thaliana]
MHAGGSPYLGLHHGHPQQHNHGANGRHMSPPDVVAEEAKNRQLAVVPVGTGGGGGAGVRYRECLKNHAAAIGGSATDGCGEFMPAGEEGSLDALRCSACGCHRNFHRKEPPGGDGRQLYGHHHHHPLSPLAAVHPHHHRGLLVAALPPAPTRMVMPLSAAMHHHQQPPQQHHSSASADSDDAHVPGVRGGEVQQQQQAPARKRFRTKFTAEQKARMLGFAGGRRVAAAEAGRGGGAALLPGGRREAARAQGVDAQQQAHPGAARPRRAPRRPGAAGAARRPARHAAPGAGGGARSCCCGCGWTWSDRPSHVFRDWTTLIKRV

SEQ ID NO: 5886 - DNA, 1347 bp, Zea mays subsp. mays
  misc_feature (1)..(1347): Ceres Seq. ID no. 12381237
  misc_feature: MA Experiment ID: 108522 Result: Up-regulated in Transcription
  misc_feature: MA Experiment 108522 PARAMETER Experiment Name: Zm_42deg_Heat_P Parameter: Age (day) Value: 8
  misc_feature: MA Experiment 108522 PARAMETER Experiment Name: Zm_42deg_Heat_P Parameter: Organism Value: Zea mays
  misc_feature: MA Experiment 108522 PARAMETER Experiment Name: Zm_42deg_Heat_P Parameter: Plant Line Value: 35A19
  misc_feature: MA Experiment 108522 PARAMETER Experiment Name: Zm_42deg_Heat_P Parameter: Temperature (deg C) Value: 42 vs. 22
  misc_feature: MA Experiment 108522 PARAMETER Experiment Name: Zm_42deg_Heat_P Parameter: Timepoint (hr) Value: 1
  misc_feature: MA Experiment 108522 PARAMETER Experiment Name: Zm_42deg_Heat_P Parameter: Tissue Value: Aerial
  misc_feature: MA Experiment ID: 108529 Result: Up-regulated in Transcription
  misc_feature: MA Experiment 108529 PARAMETER Experiment Name: Zm_Imbibed_Seeds_P Parameter: Age (day) Value: 5 vs. 2
  misc_feature: MA Experiment 108529 PARAMETER Experiment Name: Zm_Imbibed_Seeds_P Parameter: Organism Value: Zea mays
  misc_feature: MA Experiment 108529 PARAMETER Experiment Name: Zm_Imbibed_Seeds_P Parameter: Plant Line Value: 35A19
  misc_feature: MA Experiment 108529 PARAMETER Experiment Name: Zm_Imbibed_Seeds_P Parameter: Tissue Value: Roots vs. Embryo
  misc_feature: MA Experiment ID: 108687 Result: Down-regulated in Transcription
  misc_feature: MA Experiment 108687 PARAMETER Experiment Name: Zm_Embryos-Flowers__P Parameter: Tissue Value: Embryo vs. Aerial+
ccggaacgcccgtcccgtccgtcctctccccatccacatccatcccgtgtgctcctactgctcctcgatttgatcaccgattaggggaggcggtttaccagtgagcacgcgcgagagataggataggaggaaagggaagctagcggcttcgctctcgcggggagatggcgcaggcggtggaggagtggtaccggcagatgcccatcatcacgcgctcctacctcaccgccgctgtcgtcaccaccgtcggctgcaccctcgaaatcatttcgccgtatcacctgtaccttaacccgaagctcgtggtgcagcactacgagatttggcgcctcgtcaccaacttcctctacttccgcaagatggatttggattttctattccacatgttctttcttgcacgatactgcaagcttctggaggaaaactcatttagaggaagaactgctgactttttttacatgctcttgtttggtgctactgtcctaactggcattgttctgatcggagggatgataccttacatttctgagacatttgccagaattctgttcttgagcaattcattgacatttatgatggtttatgtctggagcaagcacaacccttttatccatatgagctttctgggcctgtttacctttacggctgcgtacttaccatgggttctgttgggcttctctatcctcgttggaagcagcacatgggtggacctcttgggtatgattgctggacatatgtactacttcctggaagatgtatacccacgtatgactgggcgtcgccccctaaagacaccgtccttcatcaaggcgctatttgctgatgacaatgttgtggtggcacagccacccaatgctgggattggtgctggtgcaaggttcggtgctattggtgtagatccccaggctcaatgatgaattactttcagtgacctgagggccgaggctgtgactgatctgggatgcggcagtttgtattctctgcgcaaattgcggaactgtacaagccattgttcttgtgtatttatacaggctagatgagagttattgtgcataacaaaaagattagtagtatcggaggcggctaagtttgtcacctgttggcagggcccggaggaaaatggatcgtgatgggcaaacaggccaacccctgttgcagaaacttgttcatgtgacggtttaacatctgacctgctaccctttcatgcatcggtgaatttagtctaggaaactgtttgaagtggggaaatttggtgctttggcagcgagaatttggatggagcgctgtaattgcagaatggtgcaaggaatgactcctaacattgtggacgcctggatggtgttcgtc

SEQ ID NO: 5887 - protein, 249 aa, Zea mays subsp. mays
  peptide (1)..(249): Ceres Seq. ID no. 12381238
  misc_feature (12)..(212): Pfam Name: Der1-like family Pfam Description: Der1-like family
  misc_feature (15)..(245): Homolog of NCBI NO: 7487831 NR Description: hypothetical protein T8O5.20 - Arabidopsis >gi|2894559|emb|CAA17148.1| putative protein [Arabidopsis
  misc_feature (34)..(245): Homolog of NCBI NO: 25407582 NR Description: hypothetical protein AT4g21810 [imported] - thaliana >gi|7268978|emb|CAB81288.1| putative protein
  misc_feature (1)..(218): Homolog of NCBI NO: 40352706 NR Description: Unknown (protein for MGC:63991) [Danio rerio]
  misc_feature (1)..(249): Homolog of NCBI NO: 27573354 NR Description: putative Der1-like protein [Oryza sativa
  misc_feature (1)..(245): Homolog of NCBI NO: 17473759 NR Description: putative protein [Arabidopsis thaliana]
  misc_feature (1)..(245): Homolog of NCBI NO: 22328865 NR Description: putative protein; protein id: At4g21810.1,
  misc_feature (1)..(245): Homolog of NCBI NO: 15234480 NR Description: unknown protein; protein id: At4g04860.1, by cDNA: gi_14488072, supported by cDNA: gi_20147126 [Arabidopsis >gi|25407297|pir||B85061 hypothetical protein AT4g04860
  misc_feature (3)..(240): Homolog of NCBI NO: 16151831 NR Description: F-LANa [Mus musculus]
  misc_feature (3)..(218): Homolog of NCBI NO: 15808990 NR Description: carcinoma related gene [Mus musculus] Unknown (protein for MGC:11613) [Mus musculus] unnamed protein product [Mus musculus]
  misc_feature (1)..(220): Homolog of NCBI NO: 13435738 NR Description: RIKEN cDNA 1810063P04 gene [Mus musculus]
MAQAVEEWYRQMPIITRSYLTAAVVTTVGCTLEIISPYHLYLNPKLVVQHYEIWRLVTNFLYFRKMDLDFLFHMFFLARYCKLLEENSFRGRTADFFYMLLFGATVLTGIVLIGGMIPYISETFARILFLSNSLTFMMVYVWSKHNPFIHMSFLGLFTFTAAYLPWVLLGFSILVGSSTWVDLLGMIAGHMYYFLEDVYPRMTGRRPLKTPSFIKALFADDNVVVAQPPNAGIGAGARFGAIGVDPQAQ

SEQ ID NO: 5888 - protein, 238 aa, Zea mays subsp. mays
  peptide (1)..(238): Ceres Seq. ID no. 12381239
  misc_feature (1)..(201): Pfam Name: Der1-like family Pfam Description: Der1-like family
  misc_feature (1)..(238): Homolog of NCBI NO: 27573354 NR Description: putative Der1-like protein [Oryza sativa
  misc_feature (1)..(234): Homolog of NCBI NO: 15234480 NR Description: unknown protein; protein id: At4g04860.1, by cDNA: gi_14488072, supported by cDNA: gi_20147126 [Arabidopsis >gi|25407297|pir||B85061 hypothetical protein AT4g04860
  misc_feature (1)..(234): Homolog of NCBI NO: 17473759 NR Description: putative protein [Arabidopsis thaliana]
  misc_feature (1)..(234): Homolog of NCBI NO: 22328865 NR Description: putative protein; protein id: At4g21810.1,
  misc_feature (4)..(234): Homolog of NCBI NO: 7487831 NR Description: hypothetical protein T8O5.20 - Arabidopsis >gi|2894559|emb|CAA17148.1| putative protein [Arabidopsis
  misc_feature (23)..(234): Homolog of NCBI NO: 25407582 NR Description: hypothetical protein AT4g21810 [imported] - thaliana >gi|7268978|emb|CAB81288.1| putative protein
  misc_feature (1)..(207): Homolog of NCBI NO: 40352706 NR Description: Unknown (protein for MGC:63991) [Danio rerio]
  misc_feature (1)..(229): Homolog of NCBI NO: 16151831 NR Description: F-LANa [Mus musculus]
  misc_feature (1)..(207): Homolog of NCBI NO: 15808990 NR Description: carcinoma related gene [Mus musculus] Unknown (protein for MGC:11613) [Mus musculus] unnamed protein product [Mus musculus]
  misc_feature (1)..(209): Homolog of NCBI NO: 13435738 NR Description: RIKEN cDNA 1810063P04 gene [Mus musculus]
MPIITRSYLTAAVVTTVGCTLEIISPYHLYLNPKLVVQHYEIWRLVTNFLYFRKMDLDFLFHMFFLARYCKLLEENSFRGRTADFFYMLLFGATVLTGIVLIGGMIPYISETFARILFLSNSLTFMMVYVWSKHNPFIHMSFLGLFTFTAAYLPWVLLGFSILVGSSTWVDLLGMIAGHMYYFLEDVYPRMTGRRPLKTPSFIKALFADDNVVVAQPPNAGIGAGARFGAIGVDPQAQ

SEQ ID NO: 5889 - protein, 184 aa, Zea mays subsp. mays
  peptide (1)..(184): Ceres Seq. ID no. 12381240
  misc_feature (1)..(147): Pfam Name: Der1-like family Pfam Description: Der1-like family
  misc_feature (1)..(184): Homolog of NCBI NO: 27573354 NR Description: putative Der1-like protein [Oryza sativa
  misc_feature (1)..(180): Homolog of NCBI NO: 15234480 NR Description: unknown protein; protein id: At4g04860.1, by cDNA: gi_14488072, supported by cDNA: gi_20147126 [Arabidopsis >gi|25407297|pir||B85061 hypothetical protein AT4g04860
  misc_feature (1)..(180): Homolog of NCBI NO: 17473759 NR Description: putative protein [Arabidopsis thaliana]
  misc_feature (1)..(180): Homolog of NCBI NO: 22328865 NR Description: putative protein; protein id: At4g21810.1,
  misc_feature (1)..(180): Homolog of NCBI NO: 7487831 NR Description: hypothetical protein T8O5.20 - Arabidopsis >gi|2894559|emb|CAA17148.1| putative protein [Arabidopsis
  misc_feature (1)..(180): Homolog of NCBI NO: 25407582 NR Description: hypothetical protein AT4g21810 [imported] - thaliana >gi|7268978|emb|CAB81288.1| putative protein
  misc_feature (1)..(153): Homolog of NCBI NO: 40352706 NR Description: Unknown (protein for MGC:63991) [Danio rerio]
  misc_feature (1)..(175): Homolog of NCBI NO: 16151831 NR Description: F-LANa [Mus musculus]
  misc_feature (1)..(153): Homolog of NCBI NO: 15808990 NR Description: carcinoma related gene [Mus musculus] Unknown (protein for MGC:11613) [Mus musculus] unnamed protein product [Mus musculus]
  misc_feature (1)..(155): Homolog of NCBI NO: 13435738 NR Description: RIKEN cDNA 1810063P04 gene [Mus musculus]
MDLDFLFHMFFLARYCKLLEENSFRGRTADFFYMLLFGATVLTGIVLIGGMIPYISETFARILFLSNSLTFMMVYVWSKHNPFIHMSFLGLFTFTAAYLPWVLLGFSILVGSSTWVDLLGMIAGHMYYFLEDVYPRMTGRRPLKTPSFIKALFADDNVVVAQPPNAGIGAGARFGAIGVDPQAQ

SEQ ID NO: 5890 - DNA, 1244 bp, Zea mays subsp. mays
  misc_feature (1)..(1244): Ceres Seq. ID no. 12356309
  misc_feature: MA Experiment ID: 108504 Result: Up-regulated in Transcription
  misc_feature: MA Experiment 108504 PARAMETER Experiment Name: Zm_Drought_P Parameter: Age (day) Value: 8
  misc_feature: MA Experiment 108504 PARAMETER Experiment Name: Zm_Drought_P Parameter: Organism Value: Zea mays
  misc_feature: MA Experiment 108504 PARAMETER Experiment Name: Zm_Drought_P Parameter: Plant Line Value: 35A19
  misc_feature: MA Experiment 108504 PARAMETER Experiment Name: Zm_Drought_P Parameter: Timepoint (hr) Value: 12
  misc_feature: MA Experiment 108504 PARAMETER Experiment Name: Zm_Drought_P Parameter: Tissue Value: Aerial
  misc_feature: MA Experiment 108504 PARAMETER Experiment Name: Zm_Drought_P Parameter: Treatment Value: Drought vs. No Drought
  misc_feature: MA Experiment ID: 108527 Result: Up-regulated in Transcription
  misc_feature: MA Experiment 108527 PARAMETER Experiment Name: Zm_5mM_NO_P Parameter: Age (day) Value: 8
  misc_feature: MA Experiment 108527 PARAMETER Experiment Name: Zm_5mM_NO_P Parameter: Organism Value: Zea mays
  misc_feature: MA Experiment 108527 PARAMETER Experiment Name: Zm_5mM_NO_P Parameter: Plant Line Value: 35A19
  misc_feature: MA Experiment 108527 PARAMETER Experiment Name: Zm_5mM_NO_P Parameter: Timepoint (hr) Value: 6
  misc_feature: MA Experiment 108527 PARAMETER Experiment Name: Zm_5mM_NO_P Parameter: Tissue Value: Aerial
  misc_feature: MA Experiment 108527 PARAMETER Experiment Name: Zm_5mM_NO_P Parameter: Treatment Value: 5mM NO vs. No Treatment
  misc_feature: MA Experiment ID: 108534 Result: Up-regulated in Transcription
  misc_feature: MA Experiment 108534 PARAMETER Experiment Name: Zm_4deg_Cold_P Parameter: Age (hr) Value: 8
  misc_feature: MA Experiment 108534 PARAMETER Experiment Name: Zm_4deg_Cold_P Parameter: Organism Value: Zea mays
  misc_feature: MA Experiment 108534 PARAMETER Experiment Name: Zm_4deg_Cold_P Parameter: Plant Line Value: 35A19
  misc_feature: MA Experiment 108534 PARAMETER Experiment Name: Zm_4deg_Cold_P Parameter: Temperature (deg C) Value: 4 vs. 22
  misc_feature: MA Experiment 108534 PARAMETER Experiment Name: Zm_4deg_Cold_P Parameter: Timepoint (hr) Value: 6
  misc_feature: MA Experiment 108534 PARAMETER Experiment Name: Zm_4deg_Cold_P Parameter: Tissue Value: Aerial
  misc_feature: MA Experiment ID: 108535 Result: Down-regulated in Transcription
  misc_feature: MA Experiment 108535 PARAMETER Experiment Name: Zm_Meristem_P Parameter: Age (day) Value: 8
  misc_feature: MA Experiment 108535 PARAMETER Experiment Name: Zm_Meristem_P Parameter: Organism Value: Zea mays
  misc_feature: MA Experiment 108535 PARAMETER Experiment Name: Zm_Meristem_P Parameter: Plant Line Value: 35A19
  misc_feature: MA Experiment 108535 PARAMETER Experiment Name: Zm_Meristem_P Parameter: Tissue Value: Root Meristem vs. Above Root Meristem
  misc_feature: MA Experiment ID: 108536 Result: Up-regulated in Transcription
  misc_feature: MA Experiment 108536 PARAMETER Experiment Name: Zm_Meristem_P Parameter: Age (day) Value: 8
  misc_feature: MA Experiment 108536 PARAMETER Experiment Name: Zm_Meristem_P Parameter: Organism Value: Zea mays
  misc_feature: MA Experiment 108536 PARAMETER Experiment Name: Zm_Meristem_P Parameter: Plant Line Value: 35A19
  misc_feature: MA Experiment 108536 PARAMETER Experiment Name: Zm_Meristem_P Parameter: Tissue Value: Shoot Meristem vs. Above Shoot Meristem
  misc_feature: MA Experiment ID: 108540 Result: Up-regulated in Transcription
  misc_feature: MA Experiment 108540 PARAMETER Experiment Name: Zm_20percent_PEG_P Parameter: Age (day) Value: 8
  misc_feature: MA Experiment 108540 PARAMETER Experiment Name: Zm_20percent_PEG_P Parameter: Organism Value: Zea mays
  misc_feature: MA Experiment 108540 PARAMETER Experiment Name: Zm_20percent_PEG_P Parameter: Plant Line Value: 35A19
  misc_feature: MA Experiment 108540 PARAMETER Experiment Name: Zm_20percent_PEG_P Parameter: Timepoint (hr) Value: 6
  misc_feature: MA Experiment 108540 PARAMETER Experiment Name: Zm_20percent_PEG_P Parameter: Tissue Value: Aerial
  misc_feature: MA Experiment 108540 PARAMETER Experiment Name: Zm_20percent_PEG_P Parameter: Treatment Value: 20percent PEG vs. No Treatment
  misc_feature: MA Experiment ID: 108542 Result: Up-regulated in Transcription
  misc_feature: MA Experiment 108542 PARAMETER Experiment Name: Zm_150mM_NaCl_P Parameter: Age (day) Value: 8
  misc_feature: MA Experiment 108542 PARAMETER Experiment Name: Zm_150mM_NaCl_P Parameter: Organism Value: Zea mays
  misc_feature: MA Experiment 108542 PARAMETER Experiment Name: Zm_150mM_NaCl_P Parameter: Plant Line Value: 35A19
  misc_feature: MA Experiment 108542 PARAMETER Experiment Name: Zm_150mM_NaCl_P Parameter: Timepoint (hr) Value: 6
  misc_feature: MA Experiment 108542 PARAMETER Experiment Name: Zm_150mM_NaCl_P Parameter: Tissue Value: Aerial
  misc_feature: MA Experiment 108542 PARAMETER Experiment Name: Zm_150mM_NaCl_P Parameter: Treatment Value: 150mM NaCl vs. No Treatment
  misc_feature: MA Experiment ID: 108544 Result: Down-regulated in Transcription
  misc_feature: MA Experiment ID: 108556 Result: Up-regulated in Transcription
  misc_feature: MA Experiment 108556 PARAMETER Experiment Name: Zm_Drought_P Parameter: Age (day) Value: 9
  misc_feature: MA Experiment 108556 PARAMETER Experiment Name: Zm_Drought_P Parameter: Organism Value: Zea mays
  misc_feature: MA Experiment 108556 PARAMETER Experiment Name: Zm_Drought_P Parameter: Plant Line Value: 35A19
  misc_feature: MA Experiment 108556 PARAMETER Experiment Name: Zm_Drought_P Parameter: Timepoint (hr) Value: 24
  misc_feature: MA Experiment 108556 PARAMETER Experiment Name: Zm_Drought_P Parameter: Tissue Value: Aerial
  misc_feature: MA Experiment 108556 PARAMETER Experiment Name: Zm_Drought_P Parameter: Treatment Value: Drought vs. No Drought
  misc_feature: MA Experiment ID: 108559 Result: Up-regulated in Transcription
  misc_feature: MA Experiment 108559 PARAMETER Experiment Name: Zm_5mM_NO_P Parameter: Age (day) Value: 8
  misc_feature: MA Experiment 108559 PARAMETER Experiment Name: Zm_5mM_NO_P Parameter: Organism Value: Zea mays
  misc_feature: MA Experiment 108559 PARAMETER Experiment Name: Zm_5mM_NO_P Parameter: Plant Line Value: 35A19
  misc_feature: MA Experiment 108559 PARAMETER Experiment Name: Zm_5mM_NO_P Parameter: Timepoint (hr) Value: 12
  misc_feature: MA Experiment 108559 PARAMETER Experiment Name: Zm_5mM_NO_P Parameter: Tissue Value: Aerial
  misc_feature: MA Experiment 108559 PARAMETER Experiment Name: Zm_5mM_NO_P Parameter: Treatment Value: 5mM NO vs. No Treatment
  misc_feature: MA Experiment ID: 20000478 Result: Up-regulated in Transcription
  misc_feature: MA Experiment 20000478 PARAMETER Experiment Name: Zm_5mM_SA_P Parameter: Age (day) Value: 11
  misc_feature: MA Experiment 20000478 PARAMETER Experiment Name: Zm_5mM_SA_P Parameter: Organism Value: Zea mays
  misc_feature: MA Experiment 20000478 PARAMETER Experiment Name: Zm_5mM_SA_P Parameter: Plant Line Value: 35A19
  misc_feature: MA Experiment 20000478 PARAMETER Experiment Name: Zm_5mM_SA_P Parameter: Timepoint (hr) Value: 72
  misc_feature: MA Experiment 20000478 PARAMETER Experiment Name: Zm_5mM_SA_P Parameter: Tissue Value: Aerial
  misc_feature: MA Experiment 20000478 PARAMETER Experiment Name: Zm_5mM_SA_P Parameter: Treatment Value: 5mM SA vs. No Treatment
  misc_feature: MA Experiment ID: 20000479 Result: Up-regulated in Transcription
  misc_feature: MA Experiment 20000479 PARAMETER Experiment Name: Zm_Drought_P Parameter: Age (day) Value: 10
  misc_feature: MA Experiment 20000479 PARAMETER Experiment Name: Zm_Drought_P Parameter: Organism Value: Zea mays
  misc_feature: MA Experiment 20000479 PARAMETER Experiment Name: Zm_Drought_P Parameter: Plant Line Value: 35A19
  misc_feature: MA Experiment 20000479 PARAMETER Experiment Name: Zm_Drought_P Parameter: Timepoint (hr) Value: 48
  misc_feature: MA Experiment 20000479 PARAMETER Experiment Name: Zm_Drought_P Parameter: Tissue Value: Aerial
  misc_feature: MA Experiment 20000479 PARAMETER Experiment Name: Zm_Drought_P Parameter: Treatment Value: Drought vs. No Drought
  misc_feature: MA Experiment ID: 20000535 Result: Down-regulated in Transcription
  misc_feature: MA Experiment 20000535 PARAMETER Experiment Name: Zm_Hybrid_Seed_Dev_P Parameter: DAP Value: 30 vs. 12
  misc_feature: MA Experiment 20000535 PARAMETER Experiment Name: Zm_Hybrid_Seed_Dev_P Parameter: Organism Value: Zea mays
  misc_feature: MA Experiment 20000535 PARAMETER Experiment Name: Zm_Hybrid_Seed_Dev_P Parameter: Plant Line Value: 35A19
  misc_feature: MA Experiment 20000535 PARAMETER Experiment Name: Zm_Hybrid_Seed_Dev_P Parameter: Tissue Value: Embryo vs. Unfert Floret
  misc_feature: MA Experiment ID: 20001608 Result: Down-regulated in Transcription
  misc_feature: MA Experiment 20001608 PARAMETER Experiment Name: Zm_50ppm_KNO3_L-to-H_P Parameter: Age (day) Value: 21
  misc_feature: MA Experiment 20001608 PARAMETER Experiment Name: Zm_50ppm_KNO3_L-to-H_P Parameter: Organism Value: Zea mays
  misc_feature: MA Experiment 20001608 PARAMETER Experiment Name: Zm_50ppm_KNO3_L-to-H_P Parameter: Plant Line Value: 35A19
  misc_feature: MA Experiment 20001608 PARAMETER Experiment Name: Zm_50ppm_KNO3_L-to-H_P Parameter: Timepoint (hr) Value: 48
  misc_feature: MA Experiment 20001608 PARAMETER Experiment Name: Zm_50ppm_KNO3_L-to-H_P Parameter: Tissue Value: Shoots
  misc_feature: MA Experiment 20001608 PARAMETER Experiment Name: Zm_50ppm_KNO3_L-to-H_P Parameter: Treatment Value: 50ppm KNO3 vs. 50ppm KCl
acccatccaagataccgacgagcaggccagagcgaaggaatggactccatggccagcgacgacagcaaccaaggagcagcagccaagccgaagccgaagccaccaccgctaccgctgtccgtgcgcctccagctggccgggctgacagcggccatcgacgccgtggagcgccgcgacgggacggtgaaccgctgcctgtacggcgtgatcgaccggctcctgagcgcgcgcgccagcccgcgcccggacgcctccggggtgcgctcctacgacgtgaccatggacgcgtcccgcggcatctgggcgcgcgtcttcgcgccggccgcggcggaccgcccgctccccgtggtggtgtacttccacggcggcggcttcgcgctcttctccccggccatcgggcccttcaacggcgtgtgccgccgcctctgcgccgcgctcggcgccgtcgtggtgtccgtcaactaccgcctggccccggagcaccgctggcccgccgcctacgacgacggcgtcgacgcgctgcgcttcctcgacgcccgcggcggcgtcccgggcctggacgacggcgtgcccgtcgacctcggcacctgcttcctggccggggagagcgcgggcggaaacatcgtgcaccacgtcgccaaccgctgggcggcggcgtggcagccgtccgcgcgggccctccgcgtcgcgggcgtcttccccgtgcagccctacttcggcggcgtggagcgcacgccgtcggagctggagctagagggcgtggcgcccgtggtcaacctcaggcgctccgacttctcgtggaccgcgttcctgcccgacggcgccacccgcgaccacccggccgcgcacgtcaccgacgacaacgccgacctcgccgacgacttcccgcccgccatggtcattatcggcggcttcgacccgctcatggactggcagcgacgctacgccgacgtgctgcgccggaaggggaaggaggtgctggtggccgagtacccaggcatgttccacggcttctacggcttcccggagctccccgaggctaccaaggtgctgcaggatatgaaggccttcgtcgacagccacatacccacgcccaagctcgccgacgcgtgatgcacgaacaccatcccattccattctagtgtcatgagtcatgactgcttggttcatctatctgctgtcaaaatatatacttcctatatattaaagcagggcgcaaagcttccatctggtgcgcccacgcc

SEQ ID NO: 5891 - protein, 379 aa, Zea mays subsp. mays
  peptide (1)..(379): Ceres Seq. ID no. 12356310
  misc_feature (129)..(299): Pfam Name: Aminotransferase class-III Pfam Description: Aminotransferase class-III
  misc_feature (47)..(350): Homolog of NCBI NO: 23018055 NR Description: hypothetical protein [Thermobifida fusca]
  misc_feature (25)..(351): Homolog of NCBI NO: 73648 NR Description: immediate-early protein IE180 - suid herpesvirus
  misc_feature (20)..(369): Homolog of NCBI NO: 23105183 NR Description: hypothetical protein [Azotobacter vinelandii]
  misc_feature (1)..(291): Homolog of NCBI NO: 23018055 NR Description: hypothetical protein [Thermobifida fusca]
PSKIPTSRPERRNGLHGQRRQQPRSSSQAEAEATTATAVRAPPAGRADSGHRRRGAPRRDGEPLPVRRDRPAPERARQPAPGRLRGALLRRDHGRVPRHLGARLRAGRGGPPAPRGGVLPRRRLRALLPGHRALQRRVPPPLRRARRRRGVRQLPPGPGAPLARRLRRRRRRAALPRRPRRRPGPGRRRARRPRHLLPGRGERGRKHRAPRRQPLGGGVAAVRAGPPRRGRLPRAALLRRRGAHAVGAGARGRGARGQPQALRLLVDRVPARRRHPRPPGRARHRRQRRPRRRLPARHGHYRRLRPAHGLAATLRRRAAPEGEGGAGGRVPRHVPRLLRLPGAPRGYQGAAGYEGLRRQPHTHAQARRRVMHEHHPIPF

SEQ ID NO: 5892 - protein, 370 aa, Zea mays subsp. mays
  peptide (1)..(370): Ceres Seq. ID no. 12356311
  misc_feature (9)..(361): Homolog of NCBI NO: 34393714 NR Description: putative esterase [Oryza sativa (japonica
  misc_feature (13)..(361): Homolog of NCBI NO: 34904774 NR Description: similar to carboxylesterase [Oryza sativa
  misc_feature (31)..(366): Homolog of NCBI NO: 34904770 NR Description: similar to carboxylesterase [Oryza sativa
  misc_feature (34)..(361): Homolog of NCBI NO: 34904760 NR Description: similar to carboxylesterase [Oryza sativa
  misc_feature (26)..(362): Homolog of NCBI NO: 34904772 NR Description: similar to carboxylesterase [Oryza sativa
  misc_feature (33)..(361): Homolog of NCBI NO: 34904758 NR Description: hypothetical protein~predicted by GeneMark.hmm
  misc_feature (37)..(362): Homolog of NCBI NO: 15237783 NR Description: putative protein; protein id: At5g23530.1, by cDNA: 9482. [Arabidopsis thaliana] >gi|8809707|dbj|BAA97248.1| similarity to unknown protein~gb|AAF27018.1~gene_id:MQM1.21
  misc_feature (37)..(362): Homolog of NCBI NO: 21618039 NR Description: unknown [Arabidopsis thaliana]
  misc_feature (37)..(360): Homolog of NCBI NO: 15240483 NR Description: putative protein; protein id: At5g27320.1, by cDNA: gi_15451145 [Arabidopsis thaliana] Unknown protein [Arabidopsis thaliana]
  misc_feature (37)..(360): Homolog of NCBI NO: 15229905 NR Description: unknown protein; protein id: At3g05120.1 thaliana] >gi|6729022|gb|AAF27018.1|AC009177_8 unknown protein thaliana] >gi|22530934|gb|AAM96971.1| unknown protein
THPRYRRAGQSEGMDSMASDDSNQGAAAKPKPKPPPLPLSVRLQLAGLTAAIDAVERRDGTVNRCLYGVIDRLLSARASPRPDASGVRSYDVTMDASRGIWARVFAPAAADRPLPVVVYFHGGGFALFSPAIGPFNGVCRRLCAALGAVVVSVNYRLAPEHRWPAAYDDGVDALRFLDARGGVPGLDDGVPVDLGTCFLAGESAGGNIVHHVANRWAAAWQPSARALRVAGVFPVQPYFGGVERTPSELELEGVAPVVNLRRSDFSWTAFLPDGATRDHPAAHVTDDNADLADDFPPAMVIIGGFDPLMDWQRRYADVLRRKGKEVLVAEYPGMFHGFYGFPELPEATKVLQDMKAFVDSHIPTPKLADA

SEQ ID NO: 5893 - protein, 357 aa, Zea mays subsp. mays
  peptide (1)..(357): Ceres Seq. ID no. 12356312
  misc_feature (1)..(348): Homolog of NCBI NO: 34393714 NR Description: putative esterase [Oryza sativa (japonica
  misc_feature (1)..(348): Homolog of NCBI NO: 34904774 NR Description: similar to carboxylesterase [Oryza sativa
  misc_feature (18)..(353): Homolog of NCBI NO: 34904770 NR Description: similar to carboxylesterase [Oryza sativa
  misc_feature (21)..(348): Homolog of NCBI NO: 34904760 NR Description: similar to carboxylesterase [Oryza sativa
  misc_feature (13)..(349): Homolog of NCBI NO: 34904772 NR Description: similar to carboxylesterase [Oryza sativa
  misc_feature (20)..(348): Homolog of NCBI NO: 34904758 NR Description: hypothetical protein~predicted by GeneMark.hmm
  misc_feature (24)..(349): Homolog of NCBI NO: 15237783 NR Description: putative protein; protein id: At5g23530.1, by cDNA: 9482. [Arabidopsis thaliana] >gi|8809707|dbj|BAA97248.1| similarity to unknown protein~gb|AAF27018.1~gene_id:MQM1.21
  misc_feature (24)..(349): Homolog of NCBI NO: 21618039 NR Description: unknown [Arabidopsis thaliana]
  misc_feature (24)..(347): Homolog of NCBI NO: 15240483 NR Description: putative protein; protein id: At5g27320.1, by cDNA: gi_15451145 [Arabidopsis thaliana] Unknown protein [Arabidopsis thaliana]
  misc_feature (24)..(347): Homolog of NCBI NO: 15229905 NR Description: unknown protein; protein id: At3g05120.1 thaliana] >gi|6729022|gb|AAF27018.1|AC009177_8 unknown protein thaliana] >gi|22530934|gb|AAM96971.1| unknown protein
MDSMASDDSNQGAAAKPKPKPPPLPLSVRLQLAGLTAAIDAVERRDGTVNRCLYGVIDRLLSARASPRPDASGVRSYDVTMDASRGIWARVFAPAAADRPLPVVVYFHGGGFALFSPAIGPFNGVCRRLCAALGAVVVSVNYRLAPEHRWPAAYDDGVDALRFLDARGGVPGLDDGVPVDLGTCFLAGESAGGNIVHHVANRWAAAWQPSARALRVAGVFPVQPYFGGVERTPSELELEGVAPVVNLRRSDFSWTAFLPDGATRDHPAAHVTDDNADLADDFPPAMVIIGGFDPLMDWQRRYADVLRRKGKEVLVAEYPGMFHGFYGFPELPEATKVLQDMKAFVDSHIPTPKLADA

SEQ ID NO: 5894 - DNA, 1290 bp, Zea mays subsp. mays
  misc_feature (1)..(1290): Ceres Seq. ID no. 12409295
  misc_feature: MA Experiment ID: 20000488 Result: Down-regulated in Transcription
  misc_feature: MA Experiment 20000488 PARAMETER Experiment Name: Zm_50mM_NH4NO3_L_to_H_P Parameter: Organism Value: Zea mays
  misc_feature: MA Experiment 20000488 PARAMETER Experiment Name: Zm_50mM_NH4NO3_L_to_H_P Parameter: Timepoint (hr) Value: 8
  misc_feature: MA Experiment 20000488 PARAMETER Experiment Name: Zm_50mM_NH4NO3_L_to_H_P Parameter: Tissue Value: Leaves
  misc_feature: MA Experiment 20000488 PARAMETER Experiment Name: Zm_50mM_NH4NO3_L_to_H_P Parameter: Treatment Value: 50mM NH4NO3 vs. 100mM Mannitol
  misc_feature: MA Experiment ID: 20000627 Result: Up-regulated in Transcription
  misc_feature: MA Experiment 20000627 PARAMETER Experiment Name: Zm_Herbicide-Treatments_P Parameter: Timepoint (hr) Value: 12
  misc_feature: MA Experiment 20000627 PARAMETER Experiment Name: Zm_Herbicide-Treatments_P Parameter: Tissue Value: Aerial
  misc_feature: MA Experiment 20000627 PARAMETER Experiment Name: Zm_Herbicide-Treatments_P Parameter: Treatment Value: Finale vs. No Treatment
ctactgtttcggactttcgggttttggccgacacccgacaatcttaacatcaaactcgtcgtccacgccctcctcggcaaggttgcgtacggcgtggccctaaggttcatctcgccgcctccctcaacctcttgattccgcctccctcaacctcttgattccgcctccctgaaggcataccagcgggatcaagctattttgctggccaaccgaacggtcaagccgacgatgacgctcggatcggcggcacacaagatcccgctggaggttgcgcacaccctcgtcgagatcgccgaggtcgcgcgctacgcctaccaccaccgccccggccgccctgcaacccacgagggggacccgactgcgccgcccgcaggggctgatagcagcgggggcaccaacgaggatgccgcgcggctgctggaggagaacgccatgctccgcgcccgactcgcagatgacctcgcgctcctgcgtgagctccacggcgcgccctgcgtctccaaggagtgccctcctgatctatacaaccgattgatggcggcggtcaacaatgttagcttccttgctcatctcgagaaattacaggatgagtcagcacgtcaacttaatgaactaacttctggcgacatgacaggttcattcctcgttaagtattgtgaagtttgtttctagactacattttatggtcactgttggttcttctaatacattttgcgaagtgctattccattttctgcttcaatggaactagaggtggaagctgcagacattccggacaaagcgggtaacgggaagaaaggattgtgggtcttggtcccttgtgatacagctggagctaatttggaggaaattagtgggattgatgatgaaaattatgtcatagtaaatgaagacgatatagtcgatggtattgccgcctttgttgctaggtgcattcttgaagatccaaaatccaagtcgttatcgccaatgcagctccaaaaggctgttgcaaaggcattagatagcatgaaagctcgatggagatggtcaaccttttgggaggctggacagattatatatatcttggctacttggggcatcacattagcagggttgtacaagagccgccatgtcctgaaggtggcagcaaagggtgctgctgtgtctgccagatttgttatgaaggccatttgagtgtaagaggcactcatgtgggatcagcaatttgcaaaatgtaaatacaaaactcgtcccgtcagttgtgcatatggttgtggcatgtttatcatgatgaagttatgatcatcc

SEQ ID NO: 5895 - protein, 147 aa, Zea mays subsp. mays
  peptide (1)..(147): Ceres Seq. ID no. 12409296
  misc_feature (7)..(135): Homolog of NCBI NO: 19033559 NR Description: putative growth factor [Oryza sativa (japonica
  misc_feature (12)..(119): Homolog of NCBI NO: 15219442 NR Description: unknown protein; protein id: At1g44770.1 thaliana] >gi|27808560|gb|AAO24560.1| At1g44770 [Arabidopsis
  misc_feature (12)..(119): Homolog of NCBI NO: 25373234 NR Description: hypothetical protein T12C22.4 [imported] - thaliana >gi|8655987|gb|AAF78260.1|AC020576_4 Contains weak to tail completion gi|5354213 from coliphage T4 gb|AF158101. ESTs
MTLGSAAHKIPLEVAHTLVEIAEVARYAYHHRPGRPATHEGDPTAPPAGADSSGGTNEDAARLLEENAMLRARLADDLALLRELHGAPCVSKECPPDLYNRLMAAVNNVSFLAHLEKLQDESARQLNELTSGDMTGSFLVKYCEVCF

SEQ ID NO: 5896 - protein, 144 aa, Zea mays subsp. mays
  peptide (1)..(144): Ceres Seq. ID no. 12409297
  misc_feature (9)..(135): Homolog of NCBI NO: 19033559 NR Description: putative growth factor [Oryza sativa (japonica
  misc_feature (1)..(144): Homolog of NCBI NO: 15219442 NR Description: unknown protein; protein id: At1g44770.1 thaliana] >gi|27808560|gb|AAO24560.1| At1g44770 [Arabidopsis
  misc_feature (1)..(144): Homolog of NCBI NO: 25373234 NR Description: hypothetical protein T12C22.4 [imported] - thaliana >gi|8655987|gb|AAF78260.1|AC020576_4 Contains weak to tail completion gi|5354213 from coliphage T4 gb|AF158101. ESTs
  misc_feature (2)..(144): Homolog of NCBI NO: 30686591 NR Description: expressed protein [Arabidopsis thaliana]
  misc_feature (1)..(144): Homolog of NCBI NO: 30695733 NR Description: expressed protein [Arabidopsis thaliana]
MELEVEAADIPDKAGNGKKGLWVLVPCDTAGANLEEISGIDDENYVIVNEDDIVDGIAAFVARCILEDPKSKSLSPMQLQKAVAKALDSMKARWRWSTFWEAGQIIYILATWGITLAGLYKSRHVLKVAAKGAAVSARFVMKAI

SEQ ID NO: 5897 - protein, 79 aa, Zea mays subsp. mays
  peptide (1)..(79): Ceres Seq. ID no. 12409298
  misc_feature (1)..(67): Homolog of NCBI NO: 19033559 NR Description: putative growth factor [Oryza sativa (japonica
  misc_feature (1)..(51): Homolog of NCBI NO: 15219442 NR Description: unknown protein; protein id: At1g44770.1 thaliana] >gi|27808560|gb|AAO24560.1| At1g44770 [Arabidopsis
  misc_feature (1)..(51): Homolog of NCBI NO: 25373234 NR Description: hypothetical protein T12C22.4 [imported] - thaliana >gi|8655987|gb|AAF78260.1|AC020576_4 Contains weak to tail completion gi|5354213 from coliphage T4 gb|AF158101. ESTs
MLRARLADDLALLRELHGAPCVSKECPPDLYNRLMAAVNNVSFLAHLEKLQDESARQLNELTSGDMTGSFLVKYCEVCF
